United States Patent Application Publication US 2026/0258424 A1 - sequence listing, part 5

SEQ ID NO: 6904 - protein, 2090 aa, synthetic construct
MPAAKRVKLDGGDKKYSIGLDIGTNSVGWAVITDEYKVPSKKFKVLGNTDRHSIKKNLIGALLFDSGETAEATRLKRTARRRYTRRKNRICYLQEIFSNEMAKVDDSFFHRLEESFLVEEDKKHERHPIFGNIVDEVAYHEKYPTIYHLRKKLVDSTDKADLRLIYLALAHMIKFRGHFLIEGDLNPDNSDVDKLFIQLVQTYNQLFEENPINASGVDAKAILSARLSKSRRLENLIAQLPGEKKNGLFGNLIALSLGLTPNFKSNFDLAEDAKLQLSKDTYDDDLDNLLAQIGDQYADLFLAAKNLSDAILLSDILRVNTEITKAPLSASMIKRYDEHHQDLTLLKALVRQQLPEKYKEIFFDQSKNGYAGYIDGGASQEEFYKFIKPILEKMDGTEELLVKLNREDLLRKQRTFDNGSIPHQIHLGELHAILRRQEDFYPFLKDNREKIEKILTFRIPYYVGPLARGNSRFAWMTRKSEETITPWNFEEVVDKGASAQSFIERMTNFDKNLPNEKVLPKHSLLYEYFTVYNELTKVKYVTEGMRKPAFLSGEQKKAIVDLLFKTNRKVTVKQLKEDYFKKIECFDSVEISGVEDRFNASLGTYHDLLKIIKDKDFLDNEENEDILEDIVLTLTLFEDREMIEERLKTYAHLFDDKVMKQLKRRRYTGWGRLSRKLINGIRDKQSGKTILDFLKSDGFANRNFMQLIHDDSLTFKEDIQKAQVSGQGDSLHEHIANLAGSPAIKKGILQTVKVVDELVKVMGRHKPENIVIEMARENQTTQKGQKNSRERMKRIEEGIKELGSQILKEHPVENTQLQNEKLYLYYLQNGRDMYVDQELDINRLSDYDVDHIVPQSFLKDDSIDNKVLTRSDKARGKSDNVPSEEVVKKMKNYWRQLLNAKLITQRKFDNLTKAERGGLSELDKAGFIKRQLVETRQITKHVAQILDSRMNTKYDENDKLIREVKVITLKSKLVSDFRKDFQFYKVREINNYHHAHDAYLNAVVGTALIKKYPKLESEFVYGDYKVYDVRKMIAKSEQEIGKATAKYFFYSNIMNFFKTEITLANGEIRKRPLIETNGETGEIVWDKGRDFATVRKVLSMPQVNIVKKTEVQTGGFSKESILPKRNSDKLIARKKDWDPKKYGGFDSPTVAYSVLVVAKVEKGKSKKLKSVKELLGITIMERSSFEKNPIDFLEAKGYKEVKKDLIIKLPKYSLFELENGRKRMLASAGELQKGNELALPSKYVNFLYLASHYEKLKGSPEDNEQKQLFVEQHKHYLDEIIEQISEFSKRVILADANLDKVLSAYNKHRDKPIREQAENIIHLFTLTNLGAPAAFKYFDTTIDRKRYTSTKEVLDATLIHQSITGLYETRIDLSQLGGDGGGGSEAAAKGGGGGTLQLDDEYRLYSPLVKPDQNIQFWLEQFPQAWAETAGMGLAKQVPPQVIQLKASATPVSVRQYPLSKEAQEGIRPHVQRLIQQGILVPVQSPWNTPLLPVRKPGTNDYRPVQDLREVNKRVQDIHPTVPNPYNLLCALPPQRSWYTVLDLKDAFFCLRLHPTSQPLFAFEWRDPGTGRTGQLTWTRLPQGFKNSPTIFDEALHRDLANFRIQHPQVTLLQYVDDLLLAGATKQDCLEGTKALLLELSDLGYRASAKKAQICRREVTYLGYSLRDGQRWLTEARKKTVVQIPAPTTAKQVREFLGTAGFCRLWIPGFATLAAPLYPLTKEKGEFSWAPEHQKAFDAIKKALLSAPALALPDVTKPFTLYVDERKGVARGVLTQTLGPWRRPVAYLSKKLDPVASGWPVCLKAIAAVAILVKDADKLTLGQNITVIAPHALENIVRQPPDRWMTNARMTHYQSLLLTERVTFAPPAALNPATLLPEETDEPVTHDCHQLLIEETGVRKDLTDIPLTGEVLTWFTDGSSYVVEGKRMAGAAVVDGTRTIWASSLPEGTSAQKAELMALTQALRLAEGKSINIYTDSRYAFATAHVHGAIYKQRGLLTSAGREIKNKEEILSLLEALHLPKRLAIIHCPGHQKAKDPISRGNQMADRVAKQAAQGVNLLAGKRTADGSEFEKRTADGSEFESPKKKAKVE

SEQ ID NO: 6905 - protein, 2096 aa, synthetic construct
MPAAKRVKLDGGDKKYSIGLDIGTNSVGWAVITDEYKVPSKKFKVLGNTDRHSIKKNLIGALLFDSGETAEATRLKRTARRRYTRRKNRICYLQEIFSNEMAKVDDSFFHRLEESFLVEEDKKHERHPIFGNIVDEVAYHEKYPTIYHLRKKLVDSTDKADLRLIYLALAHMIKFRGHFLIEGDLNPDNSDVDKLFIQLVQTYNQLFEENPINASGVDAKAILSARLSKSRRLENLIAQLPGEKKNGLFGNLIALSLGLTPNFKSNFDLAEDAKLQLSKDTYDDDLDNLLAQIGDQYADLFLAAKNLSDAILLSDILRVNTEITKAPLSASMIKRYDEHHQDLTLLKALVRQQLPEKYKEIFFDQSKNGYAGYIDGGASQEEFYKFIKPILEKMDGTEELLVKLNREDLLRKQRTFDNGSIPHQIHLGELHAILRRQEDFYPFLKDNREKIEKILTFRIPYYVGPLARGNSRFAWMTRKSEETITPWNFEEVVDKGASAQSFIERMTNFDKNLPNEKVLPKHSLLYEYFTVYNELTKVKYVTEGMRKPAFLSGEQKKAIVDLLFKTNRKVTVKQLKEDYFKKIECFDSVEISGVEDRFNASLGTYHDLLKIIKDKDFLDNEENEDILEDIVLTLTLFEDREMIEERLKTYAHLFDDKVMKQLKRRRYTGWGRLSRKLINGIRDKQSGKTILDFLKSDGFANRNFMQLIHDDSLTFKEDIQKAQVSGQGDSLHEHIANLAGSPAIKKGILQTVKVVDELVKVMGRHKPENIVIEMARENQTTQKGQKNSRERMKRIEEGIKELGSQILKEHPVENTQLQNEKLYLYYLQNGRDMYVDQELDINRLSDYDVDHIVPQSFLKDDSIDNKVLTRSDKARGKSDNVPSEEVVKKMKNYWRQLLNAKLITQRKFDNLTKAERGGLSELDKAGFIKRQLVETRQITKHVAQILDSRMNTKYDENDKLIREVKVITLKSKLVSDFRKDFQFYKVREINNYHHAHDAYLNAVVGTALIKKYPKLESEFVYGDYKVYDVRKMIAKSEQEIGKATAKYFFYSNIMNFFKTEITLANGEIRKRPLIETNGETGEIVWDKGRDFATVRKVLSMPQVNIVKKTEVQTGGFSKESILPKRNSDKLIARKKDWDPKKYGGFDSPTVAYSVLVVAKVEKGKSKKLKSVKELLGITIMERSSFEKNPIDFLEAKGYKEVKKDLIIKLPKYSLFELENGRKRMLASAGELQKGNELALPSKYVNFLYLASHYEKLKGSPEDNEQKQLFVEQHKHYLDEIIEQISEFSKRVILADANLDKVLSAYNKHRDKPIREQAENIIHLFTLTNLGAPAAFKYFDTTIDRKRYTSTKEVLDATLIHQSITGLYETRIDLSQLGGDGGGGSEAAAKGGGGGTLNIEDEYRLHETSKEPDVPLGSTWLSDFPQAWAETGGMGLAVRQAPLIIPLKATSTPVSIKQYPMSQEARLGIKPHIQRLLDQGILVPCQSPWNTPLLPVKKPGTNDYRPVQDLREVNKRVEDIHPTVPNPYNLLSGLPPSHQWYTVLDLKDAFFCLRLHPTSQPLFAFEWRDPEMGISGQLTWTRLPQGFKNSPTLFDEALHRDLADFRIQHPDLILLQYVDDLLLAATSEQDCQRGTRALLQTLGNLGYRASAKKAQICQKQVKYLGYLLKEGQRWLTEARKETVMGQPTPKTPRQLREFLGTAGFCRLWIPGFAEMAAPLYPLTKTGTLFNWGPDQQKAYQEIKQALLTAPALGLPDLTKPFELFVDEKQGYAKGVLTQKLGPWRRPVAYLSKKLDPVAAGWPPCLRMVAAIAVLTKDAGKLTMGQPLVILAPHAVEALVKQPPDRWLSNARMTHYQAMLLDTDRVQFGPVVALNPATLLPLPEKEAPHDCLEILAETHGTRPDLTDQPIPDADYTWYTDGSSFLQEGQRRAGAAVTTETEVIWARALPAGTSAQRAELIALTQALKMAEGKKLNVYTDSRYAFATAHVHGEIYRRRGLLTSEGREIKNKNEILALLKALFLPKRLSIIHCPGHQKGNSAEARGNRMADQAAREAAMKAVLETSTLLAGKRTADGSEFEKRTADGSEFESPKKKAKVE

SEQ ID NO: 6906 - protein, 2096 aa, synthetic construct
MPAAKRVKLDGGDKKYSIGLDIGTNSVGWAVITDEYKVPSKKFKVLGNTDRHSIKKNLIGALLFDSGETAEATRLKRTARRRYTRRKNRICYLQEIFSNEMAKVDDSFFHRLEESFLVEEDKKHERHPIFGNIVDEVAYHEKYPTIYHLRKKLVDSTDKADLRLIYLALAHMIKFRGHFLIEGDLNPDNSDVDKLFIQLVQTYNQLFEENPINASGVDAKAILSARLSKSRRLENLIAQLPGEKKNGLFGNLIALSLGLTPNFKSNFDLAEDAKLQLSKDTYDDDLDNLLAQIGDQYADLFLAAKNLSDAILLSDILRVNTEITKAPLSASMIKRYDEHHQDLTLLKALVRQQLPEKYKEIFFDQSKNGYAGYIDGGASQEEFYKFIKPILEKMDGTEELLVKLNREDLLRKQRTFDNGSIPHQIHLGELHAILRRQEDFYPFLKDNREKIEKILTFRIPYYVGPLARGNSRFAWMTRKSEETITPWNFEEVVDKGASAQSFIERMTNFDKNLPNEKVLPKHSLLYEYFTVYNELTKVKYVTEGMRKPAFLSGEQKKAIVDLLFKTNRKVTVKQLKEDYFKKIECFDSVEISGVEDRFNASLGTYHDLLKIIKDKDFLDNEENEDILEDIVLTLTLFEDREMIEERLKTYAHLFDDKVMKQLKRRRYTGWGRLSRKLINGIRDKQSGKTILDFLKSDGFANRNFMQLIHDDSLTFKEDIQKAQVSGQGDSLHEHIANLAGSPAIKKGILQTVKVVDELVKVMGRHKPENIVIEMARENQTTQKGQKNSRERMKRIEEGIKELGSQILKEHPVENTQLQNEKLYLYYLQNGRDMYVDQELDINRLSDYDVDHIVPQSFLKDDSIDNKVLTRSDKARGKSDNVPSEEVVKKMKNYWRQLLNAKLITQRKFDNLTKAERGGLSELDKAGFIKRQLVETRQITKHVAQILDSRMNTKYDENDKLIREVKVITLKSKLVSDFRKDFQFYKVREINNYHHAHDAYLNAVVGTALIKKYPKLESEFVYGDYKVYDVRKMIAKSEQEIGKATAKYFFYSNIMNFFKTEITLANGEIRKRPLIETNGETGEIVWDKGRDFATVRKVLSMPQVNIVKKTEVQTGGFSKESILPKRNSDKLIARKKDWDPKKYGGFDSPTVAYSVLVVAKVEKGKSKKLKSVKELLGITIMERSSFEKNPIDFLEAKGYKEVKKDLIIKLPKYSLFELENGRKRMLASAGELQKGNELALPSKYVNFLYLASHYEKLKGSPEDNEQKQLFVEQHKHYLDEIIEQISEFSKRVILADANLDKVLSAYNKHRDKPIREQAENIIHLFTLTNLGAPAAFKYFDTTIDRKRYTSTKEVLDATLIHQSITGLYETRIDLSQLGGDGGGGSEAAAKGGGGGTLNIEDEYRLHETSKEPDVPLGSTWLSDFPQAWAETGGMGLAVRQAPLIIPLKATSTPVSIKQYPMSQEARLGIKPHIQRLLDQGILVPCQSPWNTPLLPVKKPGTNDYRPVQDLREVNKRVEDIHPTVPNPYNLLSGLPPSHQWYTVLDLKDAFFCLRLHPTSQPLFAFEWRDPEMGISGQLTWTRLPQGFKNSPTLFNEALHRDLADFRIQHPDLILLQYVDDLLLAATSEQDCQRGTRALLQTLGNLGYRASAKKAQICQKQVKYLGYLLKEGQRWLTEARKETVMGQPTPKTPRQLREFLGTAGFCRLWIPGFAEMAAPLYPLTKPGTLFNWGPDQQKAYQEIKQALLTAPALGLPDLTKPFELFVDEKQGYAKGVLTQKLGPWRRPVAYLSKKLDPVAAGWPPCLRMVAAIAVLTKDAGKLTMGQPLVILAPHAVEALVKQPPDRWLSNARMTHYQAMLLDTDRVQFGPVVALNPATLLPLPEKEAPHDCLEILAETHGTRPDLTDQPIPDADYTWYTDGSSFLQEGQRRAGAAVTTETEVIWARALPAGTSAQRAELIALTQALKMAEGKKLNVYTDSRYAFATAHVHGEIYRRRGWLTSEGREIKNKNEILALLKALFLPKRLSIIHCPGHQKGNSAEARGNRMADQAAREAAMKAVLETSTLLAGKRTADGSEFEKRTADGSEFESPKKKAKVE

SEQ ID NO: 6907 - protein, 2098 aa, synthetic construct
MPAAKRVKLDGGDKKYSIGLDIGTNSVGWAVITDEYKVPSKKFKVLGNTDRHSIKKNLIGALLFDSGETAEATRLKRTARRRYTRRKNRICYLQEIFSNEMAKVDDSFFHRLEESFLVEEDKKHERHPIFGNIVDEVAYHEKYPTIYHLRKKLVDSTDKADLRLIYLALAHMIKFRGHFLIEGDLNPDNSDVDKLFIQLVQTYNQLFEENPINASGVDAKAILSARLSKSRRLENLIAQLPGEKKNGLFGNLIALSLGLTPNFKSNFDLAEDAKLQLSKDTYDDDLDNLLAQIGDQYADLFLAAKNLSDAILLSDILRVNTEITKAPLSASMIKRYDEHHQDLTLLKALVRQQLPEKYKEIFFDQSKNGYAGYIDGGASQEEFYKFIKPILEKMDGTEELLVKLNREDLLRKQRTFDNGSIPHQIHLGELHAILRRQEDFYPFLKDNREKIEKILTFRIPYYVGPLARGNSRFAWMTRKSEETITPWNFEEVVDKGASAQSFIERMTNFDKNLPNEKVLPKHSLLYEYFTVYNELTKVKYVTEGMRKPAFLSGEQKKAIVDLLFKTNRKVTVKQLKEDYFKKIECFDSVEISGVEDRFNASLGTYHDLLKIIKDKDFLDNEENEDILEDIVLTLTLFEDREMIEERLKTYAHLFDDKVMKQLKRRRYTGWGRLSRKLINGIRDKQSGKTILDFLKSDGFANRNFMQLIHDDSLTFKEDIQKAQVSGQGDSLHEHIANLAGSPAIKKGILQTVKVVDELVKVMGRHKPENIVIEMARENQTTQKGQKNSRERMKRIEEGIKELGSQILKEHPVENTQLQNEKLYLYYLQNGRDMYVDQELDINRLSDYDVDHIVPQSFLKDDSIDNKVLTRSDKARGKSDNVPSEEVVKKMKNYWRQLLNAKLITQRKFDNLTKAERGGLSELDKAGFIKRQLVETRQITKHVAQILDSRMNTKYDENDKLIREVKVITLKSKLVSDFRKDFQFYKVREINNYHHAHDAYLNAVVGTALIKKYPKLESEFVYGDYKVYDVRKMIAKSEQEIGKATAKYFFYSNIMNFFKTEITLANGEIRKRPLIETNGETGEIVWDKGRDFATVRKVLSMPQVNIVKKTEVQTGGFSKESILPKRNSDKLIARKKDWDPKKYGGFDSPTVAYSVLVVAKVEKGKSKKLKSVKELLGITIMERSSFEKNPIDFLEAKGYKEVKKDLIIKLPKYSLFELENGRKRMLASAGELQKGNELALPSKYVNFLYLASHYEKLKGSPEDNEQKQLFVEQHKHYLDEIIEQISEFSKRVILADANLDKVLSAYNKHRDKPIREQAENIIHLFTLTNLGAPAAFKYFDTTIDRKRYTSTKEVLDATLIHQSITGLYETRIDLSQLGGDGGGGGGGSEAAAKGGTAPLEEEYRLFLEAPIQNVTLLEQWKREIPKVWAEINPPGLASTQAPIHVQLLSTALPVRVRQYPITLEAKRSLRETIRKFRAAGILRPVHSPWNTPLLPVRKSGTSEYRMVQDLREVNKRVETIHPTVPNPYTLLSLLPPDRIWYSVLDLKDAFFCIPLAPESQLIFAFEWADAEEGESGQLTWTRLPQGFKNSPTLFDEALNRDLQGFRLDHPSVSLLQYVDDLLIAADTQAACLSATRDLLMTLAELGYRVSGKKAQLCQEEVTYLGFKIHKGSRSLSNSRTQAILQIPVPKTKRQVREFLGTIGYCRLWIPGFAELAQPLYAATRGGNDPLVWGEKEEEAFQSLKLALTQPPALALPSLDKPFQLFVEETSGAAKGVLTQALGPWKRPVAYLSKRLDPVAAGWPRCLRAIAAAALLTREASKLTFGQDIEITSSHNLESLLRSPPDKWLTNARITQYQVLLLDPPRVRFKQTAALNPATLLPETDDTLPIHHCLDTLDSLTSTRPDLTDQPLAQAEATLFTDGSSYIRDGKRYAGAAVVTLDSVIWAEPLPIGTSAQKAELIALTKALEWSKDKSVNIYTDSRYAFATLHVHGMIYRERGLLTAGGKAIKNAPEILALLTAVWLPKRVAVMHCKGHQKDDAPTSTGNRRADEVAREVAIRPLSTQATISAGKRTADGSEFEKRTADGSEFESPKKKAKVE

SEQ ID NO: 6908 - protein, 2098 aa, synthetic construct
MPAAKRVKLDGGDKKYSIGLDIGTNSVGWAVITDEYKVPSKKFKVLGNTDRHSIKKNLIGALLFDSGETAEATRLKRTARRRYTRRKNRICYLQEIFSNEMAKVDDSFFHRLEESFLVEEDKKHERHPIFGNIVDEVAYHEKYPTIYHLRKKLVDSTDKADLRLIYLALAHMIKFRGHFLIEGDLNPDNSDVDKLFIQLVQTYNQLFEENPINASGVDAKAILSARLSKSRRLENLIAQLPGEKKNGLFGNLIALSLGLTPNFKSNFDLAEDAKLQLSKDTYDDDLDNLLAQIGDQYADLFLAAKNLSDAILLSDILRVNTEITKAPLSASMIKRYDEHHQDLTLLKALVRQQLPEKYKEIFFDQSKNGYAGYIDGGASQEEFYKFIKPILEKMDGTEELLVKLNREDLLRKQRTFDNGSIPHQIHLGELHAILRRQEDFYPFLKDNREKIEKILTFRIPYYVGPLARGNSRFAWMTRKSEETITPWNFEEVVDKGASAQSFIERMTNFDKNLPNEKVLPKHSLLYEYFTVYNELTKVKYVTEGMRKPAFLSGEQKKAIVDLLFKTNRKVTVKQLKEDYFKKIECFDSVEISGVEDRFNASLGTYHDLLKIIKDKDFLDNEENEDILEDIVLTLTLFEDREMIEERLKTYAHLFDDKVMKQLKRRRYTGWGRLSRKLINGIRDKQSGKTILDFLKSDGFANRNFMQLIHDDSLTFKEDIQKAQVSGQGDSLHEHIANLAGSPAIKKGILQTVKVVDELVKVMGRHKPENIVIEMARENQTTQKGQKNSRERMKRIEEGIKELGSQILKEHPVENTQLQNEKLYLYYLQNGRDMYVDQELDINRLSDYDVDHIVPQSFLKDDSIDNKVLTRSDKARGKSDNVPSEEVVKKMKNYWRQLLNAKLITQRKFDNLTKAERGGLSELDKAGFIKRQLVETRQITKHVAQILDSRMNTKYDENDKLIREVKVITLKSKLVSDFRKDFQFYKVREINNYHHAHDAYLNAVVGTALIKKYPKLESEFVYGDYKVYDVRKMIAKSEQEIGKATAKYFFYSNIMNFFKTEITLANGEIRKRPLIETNGETGEIVWDKGRDFATVRKVLSMPQVNIVKKTEVQTGGFSKESILPKRNSDKLIARKKDWDPKKYGGFDSPTVAYSVLVVAKVEKGKSKKLKSVKELLGITIMERSSFEKNPIDFLEAKGYKEVKKDLIIKLPKYSLFELENGRKRMLASAGELQKGNELALPSKYVNFLYLASHYEKLKGSPEDNEQKQLFVEQHKHYLDEIIEQISEFSKRVILADANLDKVLSAYNKHRDKPIREQAENIIHLFTLTNLGAPAAFKYFDTTIDRKRYTSTKEVLDATLIHQSITGLYETRIDLSQLGGDGGGGGGGSEAAAKGGTAPLEEEYRLFLEAPIQNVTLLEQWKREIPKVWAEINPPGLASTQAPIHVQLLSTALPVRVRQYPITLEAKRSLRETIRKFRAAGILRPVHSPWNTPLLPVRKSGTSEYRMVQDLREVNKRVETIHPTVPNPYTLLSLLPPDRIWYSVLDLKDAFFCIPLAPESQLIFAFEWADAEEGESGQLTWTRLPQGFKNSPTLFNEALNRDLQGFRLDHPSVSLLQYVDDLLIAADTQAACLSATRDLLMTLAELGYRVSGKKAQLCQEEVTYLGFKIHKGSRSLSNSRTQAILQIPVPKTKRQVREFLGTIGYCRLWIPGFAELAQPLYAATRPGNDPLVWGEKEEEAFQSLKLALTQPPALALPSLDKPFQLFVEETSGAAKGVLTQALGPWKRPVAYLSKRLDPVAAGWPRCLRAIAAAALLTREASKLTFGQDIEITSSHNLESLLRSPPDKWLTNARITQYQVLLLDPPRVRFKQTAALNPATLLPETDDTLPIHHCLDTLDSLTSTRPDLTDQPLAQAEATLFTDGSSYIRDGKRYAGAAVVTLDSVIWAEPLPIGTSAQKAELIALTKALEWSKDKSVNIYTDSRYAFATLHVHGMIYRERGWLTAGGKAIKNAPEILALLTAVWLPKRVAVMHCKGHQKDDAPTSTGNRRADEVAREVAIRPLSTQATISAGKRTADGSEFEKRTADGSEFESPKKKAKVE

SEQ ID NO: 6909 - protein, 2102 aa, synthetic construct
MPAAKRVKLDGGDKKYSIGLDIGTNSVGWAVITDEYKVPSKKFKVLGNTDRHSIKKNLIGALLFDSGETAEATRLKRTARRRYTRRKNRICYLQEIFSNEMAKVDDSFFHRLEESFLVEEDKKHERHPIFGNIVDEVAYHEKYPTIYHLRKKLVDSTDKADLRLIYLALAHMIKFRGHFLIEGDLNPDNSDVDKLFIQLVQTYNQLFEENPINASGVDAKAILSARLSKSRRLENLIAQLPGEKKNGLFGNLIALSLGLTPNFKSNFDLAEDAKLQLSKDTYDDDLDNLLAQIGDQYADLFLAAKNLSDAILLSDILRVNTEITKAPLSASMIKRYDEHHQDLTLLKALVRQQLPEKYKEIFFDQSKNGYAGYIDGGASQEEFYKFIKPILEKMDGTEELLVKLNREDLLRKQRTFDNGSIPHQIHLGELHAILRRQEDFYPFLKDNREKIEKILTFRIPYYVGPLARGNSRFAWMTRKSEETITPWNFEEVVDKGASAQSFIERMTNFDKNLPNEKVLPKHSLLYEYFTVYNELTKVKYVTEGMRKPAFLSGEQKKAIVDLLFKTNRKVTVKQLKEDYFKKIECFDSVEISGVEDRFNASLGTYHDLLKIIKDKDFLDNEENEDILEDIVLTLTLFEDREMIEERLKTYAHLFDDKVMKQLKRRRYTGWGRLSRKLINGIRDKQSGKTILDFLKSDGFANRNFMQLIHDDSLTFKEDIQKAQVSGQGDSLHEHIANLAGSPAIKKGILQTVKVVDELVKVMGRHKPENIVIEMARENQTTQKGQKNSRERMKRIEEGIKELGSQILKEHPVENTQLQNEKLYLYYLQNGRDMYVDQELDINRLSDYDVDHIVPQSFLKDDSIDNKVLTRSDKARGKSDNVPSEEVVKKMKNYWRQLLNAKLITQRKFDNLTKAERGGLSELDKAGFIKRQLVETRQITKHVAQILDSRMNTKYDENDKLIREVKVITLKSKLVSDFRKDFQFYKVREINNYHHAHDAYLNAVVGTALIKKYPKLESEFVYGDYKVYDVRKMIAKSEQEIGKATAKYFFYSNIMNFFKTEITLANGEIRKRPLIETNGETGEIVWDKGRDFATVRKVLSMPQVNIVKKTEVQTGGFSKESILPKRNSDKLIARKKDWDPKKYGGFDSPTVAYSVLVVAKVEKGKSKKLKSVKELLGITIMERSSFEKNPIDFLEAKGYKEVKKDLIIKLPKYSLFELENGRKRMLASAGELQKGNELALPSKYVNFLYLASHYEKLKGSPEDNEQKQLFVEQHKHYLDEIIEQISEFSKRVILADANLDKVLSAYNKHRDKPIREQAENIIHLFTLTNLGAPAAFKYFDTTIDRKRYTSTKEVLDATLIHQSITGLYETRIDLSQLGGDGGGGGGGSEAAAKGGTVSLQDEHRLFDIPVTTSLPDVWLQDFPQAWAETGGLGRAKCQAPIIIDLKPTAVPVSIKQYPMSLEAHMGIRQHIIKFLELGVLRPCRSPWNTPLLPVKKPGTQDYRPVQDLREINKRTVDIHPTVPNPYNLLSTLKPDYSWYTVLDLKDAFFCLPLAPQSQELFAFEWKDPERGISGQLTWTRLPQGFKNSPTLFNEALHRDLTDFRTQHPEVTLLQYVDDLLLAAPTKKACTQGTRHLLQELGEKGYRASAKKAQICQTKVTYLGYILSEGKRWLTPGRIETVARIPPPRNPREVREFLGTAGFCRLWIPGFAELAAPLYALTKPSTPFTWQTEHQLAFEALKKALLSAPALGLPDTSKPFTLFLDERQGIAKGVLTQKLGPWKRPVAYLSKKLDPVAAGWPPCLRIMAATAMLVKDSAKLTLGQPLTVITPHTLEAIVRQPPDRWITNARLTHYQALLLDTDRVQFGPPVTLNPATLLPVPENQPSPHDCRQVLAETHGTREDLKDQELPDADHTWYTDGSSYLDSGTRRAGAAVVDGHNTIWAQSLPPGTSAQKAELIALTKALELSKGKKANIYTDSRYAFATAHTHGSIYERRGWLTSEGKEIKNKAEIIALLKALFLPQEVAIIHCPGHQKGQDPVAVGNRQADRVARQAAMAEVLTLATEPDNTSHITAGKRTADGSEFEKRTADGSEFESPKKKAKVE

SEQ ID NO: 6910 - protein, 2173 aa, synthetic construct
MPAAKRVKLDGGDKKYSIGLDIGTNSVGWAVITDEYKVPSKKFKVLGNTDRHSIKKNLIGALLFDSGETAEATRLKRTARRRYTRRKNRICYLQEIFSNEMAKVDDSFFHRLEESFLVEEDKKHERHPIFGNIVDEVAYHEKYPTIYHLRKKLVDSTDKADLRLIYLALAHMIKFRGHFLIEGDLNPDNSDVDKLFIQLVQTYNQLFEENPINASGVDAKAILSARLSKSRRLENLIAQLPGEKKNGLFGNLIALSLGLTPNFKSNFDLAEDAKLQLSKDTYDDDLDNLLAQIGDQYADLFLAAKNLSDAILLSDILRVNTEITKAPLSASMIKRYDEHHQDLTLLKALVRQQLPEKYKEIFFDQSKNGYAGYIDGGASQEEFYKFIKPILEKMDGTEELLVKLNREDLLRKQRTFDNGSIPHQIHLGELHAILRRQEDFYPFLKDNREKIEKILTFRIPYYVGPLARGNSRFAWMTRKSEETITPWNFEEVVDKGASAQSFIERMTNFDKNLPNEKVLPKHSLLYEYFTVYNELTKVKYVTEGMRKPAFLSGEQKKAIVDLLFKTNRKVTVKQLKEDYFKKIECFDSVEISGVEDRFNASLGTYHDLLKIIKDKDFLDNEENEDILEDIVLTLTLFEDREMIEERLKTYAHLFDDKVMKQLKRRRYTGWGRLSRKLINGIRDKQSGKTILDFLKSDGFANRNFMQLIHDDSLTFKEDIQKAQVSGQGDSLHEHIANLAGSPAIKKGILQTVKVVDELVKVMGRHKPENIVIEMARENQTTQKGQKNSRERMKRIEEGIKELGSQILKEHPVENTQLQNEKLYLYYLQNGRDMYVDQELDINRLSDYDVDHIVPQSFLKDDSIDNKVLTRSDKARGKSDNVPSEEVVKKMKNYWRQLLNAKLITQRKFDNLTKAERGGLSELDKAGFIKRQLVETRQITKHVAQILDSRMNTKYDENDKLIREVKVITLKSKLVSDFRKDFQFYKVREINNYHHAHDAYLNAVVGTALIKKYPKLESEFVYGDYKVYDVRKMIAKSEQEIGKATAKYFFYSNIMNFFKTEITLANGEIRKRPLIETNGETGEIVWDKGRDFATVRKVLSMPQVNIVKKTEVQTGGFSKESILPKRNSDKLIARKKDWDPKKYGGFDSPTVAYSVLVVAKVEKGKSKKLKSVKELLGITIMERSSFEKNPIDFLEAKGYKEVKKDLIIKLPKYSLFELENGRKRMLASAGELQKGNELALPSKYVNFLYLASHYEKLKGSPEDNEQKQLFVEQHKHYLDEIIEQISEFSKRVILADANLDKVLSAYNKHRDKPIREQAENIIHLFTLTNLGAPAAFKYFDTTIDRKRYTSTKEVLDATLIHQSITGLYETRIDLSQLGGDGGGGGGGSEAAAKGGMDLLKPLTVERKGVKIKGYWNSQADITCVPKDLLQGEEPVRQQNVTTIHGTQEGDVYYVNLKIDGRRINTEVIGTTLDYAIITPGDVPWILKKPLELTIKLDLEEQQGTLLNNSILSKKGKEELKQLFEKYSALWQSWENQVGHRRIRPHKIATGTVKPTPQKQYHINPKAKPDIQIVINDLLKQGVLIQKESTMNTPVYPVPKPNGRWRMVLDYRAVNKVTPLIAVQNQHSYGILGSLFKGRYKTTIDLSNGFWAHPIVPEDYWITAFTWQGKQYCWTVLPQGFLNSPGLFTGDVVDLLQGIPNVEVYVDDVYISHDSEKEHLEYLDILFNRLKEAGYIISLKKSNIANSIVDFLGFQITNEGRGLTDTFKEKLENITAPTTLKQLQSILGLLNFARNFIPDFTELIAPLYALIPKSTKNYVPWQIEHSTTLETLITKLNGAEYLQGRKGDKTLIMKVNASYTTGYIRYYNEGEKKPISYVSIVFSKTELKFTELEKLLTTVHKGLLKALDLSMGQNIHVYSPIVSMQNIQKTPQTAKKALASRWLSWLSYLEDPRIRFFYDPQMPALKDLPAVDTGKDNKKHPSNFQHIFYTDGSAITSPTKEGHLNAGMGIVYFINKDGNLQKQQEWSISLGNHTAQFAEIAAFEFALKKCLPLGGNILVVTDSNYVAKAYNEELDVWASNGFVNNRKKPLKHISKWKSVADLKRLRPDVVVTHEPGHQKLDSSPHAYGNNLADQLATQASFKVHAGKRTADGSEFEKRTADGSEFESPKKKAKVE

SEQ ID NO: 6911 - protein, 2095 aa, synthetic construct
MPAAKRVKLDGGDKKYSIGLDIGTNSVGWAVITDEYKVPSKKFKVLGNTDRHSIKKNLIGALLFDSGETAEATRLKRTARRRYTRRKNRICYLQEIFSNEMAKVDDSFFHRLEESFLVEEDKKHERHPIFGNIVDEVAYHEKYPTIYHLRKKLVDSTDKADLRLIYLALAHMIKFRGHFLIEGDLNPDNSDVDKLFIQLVQTYNQLFEENPINASGVDAKAILSARLSKSRRLENLIAQLPGEKKNGLFGNLIALSLGLTPNFKSNFDLAEDAKLQLSKDTYDDDLDNLLAQIGDQYADLFLAAKNLSDAILLSDILRVNTEITKAPLSASMIKRYDEHHQDLTLLKALVRQQLPEKYKEIFFDQSKNGYAGYIDGGASQEEFYKFIKPILEKMDGTEELLVKLNREDLLRKQRTFDNGSIPHQIHLGELHAILRRQEDFYPFLKDNREKIEKILTFRIPYYVGPLARGNSRFAWMTRKSEETITPWNFEEVVDKGASAQSFIERMTNFDKNLPNEKVLPKHSLLYEYFTVYNELTKVKYVTEGMRKPAFLSGEQKKAIVDLLFKTNRKVTVKQLKEDYFKKIECFDSVEISGVEDRFNASLGTYHDLLKIIKDKDFLDNEENEDILEDIVLTLTLFEDREMIEERLKTYAHLFDDKVMKQLKRRRYTGWGRLSRKLINGIRDKQSGKTILDFLKSDGFANRNFMQLIHDDSLTFKEDIQKAQVSGQGDSLHEHIANLAGSPAIKKGILQTVKVVDELVKVMGRHKPENIVIEMARENQTTQKGQKNSRERMKRIEEGIKELGSQILKEHPVENTQLQNEKLYLYYLQNGRDMYVDQELDINRLSDYDVDHIVPQSFLKDDSIDNKVLTRSDKARGKSDNVPSEEVVKKMKNYWRQLLNAKLITQRKFDNLTKAERGGLSELDKAGFIKRQLVETRQITKHVAQILDSRMNTKYDENDKLIREVKVITLKSKLVSDFRKDFQFYKVREINNYHHAHDAYLNAVVGTALIKKYPKLESEFVYGDYKVYDVRKMIAKSEQEIGKATAKYFFYSNIMNFFKTEITLANGEIRKRPLIETNGETGEIVWDKGRDFATVRKVLSMPQVNIVKKTEVQTGGFSKESILPKRNSDKLIARKKDWDPKKYGGFDSPTVAYSVLVVAKVEKGKSKKLKSVKELLGITIMERSSFEKNPIDFLEAKGYKEVKKDLIIKLPKYSLFELENGRKRMLASAGELQKGNELALPSKYVNFLYLASHYEKLKGSPEDNEQKQLFVEQHKHYLDEIIEQISEFSKRVILADANLDKVLSAYNKHRDKPIREQAENIIHLFTLTNLGAPAAFKYFDTTIDRKRYTSTKEVLDATLIHQSITGLYETRIDLSQLGGDGGGGGGGSEAAAKGGTLQLEEEYRLFEPESTQKQEMDIWLKNFPQAWAETGGMGTAHCQAPVLIQLKATATPISIRQYPMPHEAYQGIKPHIRRMLDQGILKPCQSPWNTPLLPVKKPGTEDYRPVQDLREVNKRVEDIHPTVPNPYNLLSTLPPSHPWYTVLDLKDAFFCLRLHSESQLLFAFEWRDPEIGLSGQLTWTRLPQGFKNSPTLFNEALHSDLADFRVRYPALVLLQYVDDLLLAAATRTECLEGTKALLETLGNKGYRASAKKAQICLQEVTYLGYSLKDGQRWLTKARKEAILSIPVPKNSRQVREFLGKAGYCRLFIPGFAELAAPLYPLTRPGTLFQWGTEQQLAFEDIKKALLSSPALGLPDITKPFELFIDENSGFAKGVLVQKLGPWKRPVAYLSKKLDTVASGWPPCLRMVAAIAILVKDAGKLTLGQPLTILTSHPVEALVRQPPNKWLSNARMTHYQAMLLDAERVHFGPTVSLNPATLLPLPSGGNHHDCLQILAETHGTRPDLTDQPLPDADLTWYTDGSSFIRNGEREAGAAVTTESEVIWAAPLPPGTSAQRAELIALTQALKMAEGKKLTVYTDSRYAFATTHVHGEIYRRRGWLTSEGKEIKNKNEILALLEALFLPKRLSIIHCPGHQKGDSPQAKGNRLADDTAKKAATETHSSLTVLPAGKRTADGSEFEKRTADGSEFESPKKKAKVE

SEQ ID NO: 6912 - protein, 2176 aa, synthetic construct
MPAAKRVKLDGGDKKYSIGLDIGTNSVGWAVITDEYKVPSKKFKVLGNTDRHSIKKNLIGALLFDSGETAEATRLKRTARRRYTRRKNRICYLQEIFSNEMAKVDDSFFHRLEESFLVEEDKKHERHPIFGNIVDEVAYHEKYPTIYHLRKKLVDSTDKADLRLIYLALAHMIKFRGHFLIEGDLNPDNSDVDKLFIQLVQTYNQLFEENPINASGVDAKAILSARLSKSRRLENLIAQLPGEKKNGLFGNLIALSLGLTPNFKSNFDLAEDAKLQLSKDTYDDDLDNLLAQIGDQYADLFLAAKNLSDAILLSDILRVNTEITKAPLSASMIKRYDEHHQDLTLLKALVRQQLPEKYKEIFFDQSKNGYAGYIDGGASQEEFYKFIKPILEKMDGTEELLVKLNREDLLRKQRTFDNGSIPHQIHLGELHAILRRQEDFYPFLKDNREKIEKILTFRIPYYVGPLARGNSRFAWMTRKSEETITPWNFEEVVDKGASAQSFIERMTNFDKNLPNEKVLPKHSLLYEYFTVYNELTKVKYVTEGMRKPAFLSGEQKKAIVDLLFKTNRKVTVKQLKEDYFKKIECFDSVEISGVEDRFNASLGTYHDLLKIIKDKDFLDNEENEDILEDIVLTLTLFEDREMIEERLKTYAHLFDDKVMKQLKRRRYTGWGRLSRKLINGIRDKQSGKTILDFLKSDGFANRNFMQLIHDDSLTFKEDIQKAQVSGQGDSLHEHIANLAGSPAIKKGILQTVKVVDELVKVMGRHKPENIVIEMARENQTTQKGQKNSRERMKRIEEGIKELGSQILKEHPVENTQLQNEKLYLYYLQNGRDMYVDQELDINRLSDYDVDHIVPQSFLKDDSIDNKVLTRSDKARGKSDNVPSEEVVKKMKNYWRQLLNAKLITQRKFDNLTKAERGGLSELDKAGFIKRQLVETRQITKHVAQILDSRMNTKYDENDKLIREVKVITLKSKLVSDFRKDFQFYKVREINNYHHAHDAYLNAVVGTALIKKYPKLESEFVYGDYKVYDVRKMIAKSEQEIGKATAKYFFYSNIMNFFKTEITLANGEIRKRPLIETNGETGEIVWDKGRDFATVRKVLSMPQVNIVKKTEVQTGGFSKESILPKRNSDKLIARKKDWDPKKYGGFDSPTVAYSVLVVAKVEKGKSKKLKSVKELLGITIMERSSFEKNPIDFLEAKGYKEVKKDLIIKLPKYSLFELENGRKRMLASAGELQKGNELALPSKYVNFLYLASHYEKLKGSPEDNEQKQLFVEQHKHYLDEIIEQISEFSKRVILADANLDKVLSAYNKHRDKPIREQAENIIHLFTLTNLGAPAAFKYFDTTIDRKRYTSTKEVLDATLIHQSITGLYETRIDLSQLGGDGGGGGGGSEAAAKGGMNPLQLLQPLPAEIKGTKLLAHWNSGATITCIPESFLEDEQPIKKTLIKTIHGEKQQNVYYVTFKVKGRKVEAEVIASPYEYILLSPTDVPWLTQQPLQLTILVPLQEYQEKILSKTALPEDQKQQLKTLFVKYDNLWQHWENQVGHRKIRPHNIATGDYPPRPQKQYPINPKAKPSIQIVIDDLLKQGVLTPQNSTMNTPVYPVPKPDGRWRMVLDYREVNKTIPLTAAQNQHSAGILATIVRQKYKTTLDLANGFWAHPITPESYWLTAFTWQGKQYCWTRLPQGFLNSPALFTADVVDLLKEIPNVQVYVDDIYLSHDDPKEHVQQLEKVFQILLQAGYVVSLKKSEIGQKTVEFLGFNITKEGRGLTDTFKTKLLNITPPKDLKQLQSILGLLNFARNFIPNFAELVQPLYNLIASAKGKYIEWSEENTKQLNMVIEALNTASNLEERLPEQRLVIKVNTSPSAGYVRYYNETGKKPIMYLNYVFSKAELKFSMLEKLLTTMHKALIKAMDLAMGQEILVYSPIVSMTKIQKTPLPERKALPIRWITWMTYLEDPRIQFHYDKTLPELKHIPDVYTSSQSPVKHPSQYEGVFYTDGSAIKSPDPTKSNNAGMGIVHATYKPEYQVLNQWSIPLGNHTAQMAEIAAVEFACKKALKIPGPVLVITDSFYVAESANKELPYWKSNGFVNNKKKPLKHISKWKSIAECLSMKPDITIQHEKGISLQIPVFILKGNALADKLATQGSYVVNAGKRTADGSEFEKRTADGSEFESPKKKAKVE

SEQ ID NO: 6913 - protein, 2176 aa, synthetic construct
MPAAKRVKLDGGDKKYSIGLDIGTNSVGWAVITDEYKVPSKKFKVLGNTDRHSIKKNLIGALLFDSGETAEATRLKRTARRRYTRRKNRICYLQEIFSNEMAKVDDSFFHRLEESFLVEEDKKHERHPIFGNIVDEVAYHEKYPTIYHLRKKLVDSTDKADLRLIYLALAHMIKFRGHFLIEGDLNPDNSDVDKLFIQLVQTYNQLFEENPINASGVDAKAILSARLSKSRRLENLIAQLPGEKKNGLFGNLIALSLGLTPNFKSNFDLAEDAKLQLSKDTYDDDLDNLLAQIGDQYADLFLAAKNLSDAILLSDILRVNTEITKAPLSASMIKRYDEHHQDLTLLKALVRQQLPEKYKEIFFDQSKNGYAGYIDGGASQEEFYKFIKPILEKMDGTEELLVKLNREDLLRKQRTFDNGSIPHQIHLGELHAILRRQEDFYPFLKDNREKIEKILTFRIPYYVGPLARGNSRFAWMTRKSEETITPWNFEEVVDKGASAQSFIERMTNFDKNLPNEKVLPKHSLLYEYFTVYNELTKVKYVTEGMRKPAFLSGEQKKAIVDLLFKTNRKVTVKQLKEDYFKKIECFDSVEISGVEDRFNASLGTYHDLLKIIKDKDFLDNEENEDILEDIVLTLTLFEDREMIEERLKTYAHLFDDKVMKQLKRRRYTGWGRLSRKLINGIRDKQSGKTILDFLKSDGFANRNFMQLIHDDSLTFKEDIQKAQVSGQGDSLHEHIANLAGSPAIKKGILQTVKVVDELVKVMGRHKPENIVIEMARENQTTQKGQKNSRERMKRIEEGIKELGSQILKEHPVENTQLQNEKLYLYYLQNGRDMYVDQELDINRLSDYDVDHIVPQSFLKDDSIDNKVLTRSDKARGKSDNVPSEEVVKKMKNYWRQLLNAKLITQRKFDNLTKAERGGLSELDKAGFIKRQLVETRQITKHVAQILDSRMNTKYDENDKLIREVKVITLKSKLVSDFRKDFQFYKVREINNYHHAHDAYLNAVVGTALIKKYPKLESEFVYGDYKVYDVRKMIAKSEQEIGKATAKYFFYSNIMNFFKTEITLANGEIRKRPLIETNGETGEIVWDKGRDFATVRKVLSMPQVNIVKKTEVQTGGFSKESILPKRNSDKLIARKKDWDPKKYGGFDSPTVAYSVLVVAKVEKGKSKKLKSVKELLGITIMERSSFEKNPIDFLEAKGYKEVKKDLIIKLPKYSLFELENGRKRMLASAGELQKGNELALPSKYVNFLYLASHYEKLKGSPEDNEQKQLFVEQHKHYLDEIIEQISEFSKRVILADANLDKVLSAYNKHRDKPIREQAENIIHLFTLTNLGAPAAFKYFDTTIDRKRYTSTKEVLDATLIHQSITGLYETRIDLSQLGGDGGGGGGGSEAAAKGGMNPLQLLQPLPAEIKGTKLLAHWNSGATITCIPESFLEDEQPIKKTLIKTIHGEKQQNVYYVTFKVKGRKVEAEVIASPYEYILLSPTDVPWLTQQPLQLTILVPLQEYQEKILSKTALPEDQKQQLKTLFVKYDNLWQHWENQVGHRKIRPHNIATGDYPPRPQKQYPINPKAKPSIQIVIDDLLKQGVLTPQNSTMNTPVYPVPKPDGRWRMVLDYREVNKTIPLTAAQNQHSAGILATIVRQKYKTTLDLANGFWAHPITPESYWLTAFTWQGKQYCWTRLPQGFLNSPALFNADVVDLLKEIPNVQVYVDDIYLSHDDPKEHVQQLEKVFQILLQAGYVVSLKKSEIGQKTVEFLGFNITKEGRGLTDTFKTKLLNITPPKDLKQLQSILGKLNFARNFIPNFAELVQPLYNLIAPAKGKYIEWSEENTKQLNMVIEALNTASNLEERLPEQRLVIKVNTSPSAGYVRYYNETGKKPIMYLNYVFSKAELKFSMLEKLLTTMHKALIKAMDLAMGQEILVYSPIVSMTKIQKTPLPERKALPIRWITWMTYLEDPRIQFHYDKTLPELKHIPDVYTSSQSPVKHPSQYEGVFYTDGSAIKSPDPTKSNNAGMGIVHATYKPEYQVLNQWSIPLGNHTAQMAEIAAVEFACKKALKIPGPVLVITDSFYVAESANKELPYWKSNGFVNNKKKPLKHISKWKSIAECLSMKPDITIQHEKGISLQIPVFILKGNALADKLATQGSYVVNAGKRTADGSEFEKRTADGSEFESPKKKAKVE

SEQ ID NO: 6914 - protein, 2218 aa, synthetic construct
MPAAKRVKLDGGDKKYSIGLDIGTNSVGWAVITDEYKVPSKKFKVLGNTDRHSIKKNLIGALLFDSGETAEATRLKRTARRRYTRRKNRICYLQEIFSNEMAKVDDSFFHRLEESFLVEEDKKHERHPIFGNIVDEVAYHEKYPTIYHLRKKLVDSTDKADLRLIYLALAHMIKFRGHFLIEGDLNPDNSDVDKLFIQLVQTYNQLFEENPINASGVDAKAILSARLSKSRRLENLIAQLPGEKKNGLFGNLIALSLGLTPNFKSNFDLAEDAKLQLSKDTYDDDLDNLLAQIGDQYADLFLAAKNLSDAILLSDILRVNTEITKAPLSASMIKRYDEHHQDLTLLKALVRQQLPEKYKEIFFDQSKNGYAGYIDGGASQEEFYKFIKPILEKMDGTEELLVKLNREDLLRKQRTFDNGSIPHQIHLGELHAILRRQEDFYPFLKDNREKIEKILTFRIPYYVGPLARGNSRFAWMTRKSEETITPWNFEEVVDKGASAQSFIERMTNFDKNLPNEKVLPKHSLLYEYFTVYNELTKVKYVTEGMRKPAFLSGEQKKAIVDLLFKTNRKVTVKQLKEDYFKKIECFDSVEISGVEDRFNASLGTYHDLLKIIKDKDFLDNEENEDILEDIVLTLTLFEDREMIEERLKTYAHLFDDKVMKQLKRRRYTGWGRLSRKLINGIRDKQSGKTILDFLKSDGFANRNFMQLIHDDSLTFKEDIQKAQVSGQGDSLHEHIANLAGSPAIKKGILQTVKVVDELVKVMGRHKPENIVIEMARENQTTQKGQKNSRERMKRIEEGIKELGSQILKEHPVENTQLQNEKLYLYYLQNGRDMYVDQELDINRLSDYDVDHIVPQSFLKDDSIDNKVLTRSDKARGKSDNVPSEEVVKKMKNYWRQLLNAKLITQRKFDNLTKAERGGLSELDKAGFIKRQLVETRQITKHVAQILDSRMNTKYDENDKLIREVKVITLKSKLVSDFRKDFQFYKVREINNYHHAHDAYLNAVVGTALIKKYPKLESEFVYGDYKVYDVRKMIAKSEQEIGKATAKYFFYSNIMNFFKTEITLANGEIRKRPLIETNGETGEIVWDKGRDFATVRKVLSMPQVNIVKKTEVQTGGFSKESILPKRNSDKLIARKKDWDPKKYGGFDSPTVAYSVLVVAKVEKGKSKKLKSVKELLGITIMERSSFEKNPIDFLEAKGYKEVKKDLIIKLPKYSLFELENGRKRMLASAGELQKGNELALPSKYVNFLYLASHYEKLKGSPEDNEQKQLFVEQHKHYLDEIIEQISEFSKRVILADANLDKVLSAYNKHRDKPIREQAENIIHLFTLTNLGAPAAFKYFDTTIDRKRYTSTKEVLDATLIHQSITGLYETRIDLSQLGGDGGGGGGGSEAAAKGGTLGDQGSRGSDPLPEPRVTLTVEGIPTEFLVNTGAEHSVLTKPMGKMGSKRTVVAGATGSKVYPWTTKRLLKIGQKQVTHSFLVIPECPAPLLGRDLLTKLKAQIQFSTEGPQVTWEDRPAMCLVLNLEEEYRLHEKPVPPSIDPSWLQLFPMVWAEKAGMGLANQVPPVVVELKSDASPVAVRQYPMSKEAREGIRPHIQRFLDLGILVPCQSPWNTPLLPVKKPGTNDYRPVQDLREVNKRVQDIHPTVPNPYNLLSSLPPSHTWYSVLDLKDAFFCLKLHPNSQPLFAFEWRDPEKGNTGQLTWTRLPQGFKNSPTLFDEALHRDLASFRALNPQVVMLQYVDDLLVAAPTYRDCKEGTRRLLQELSKLGYRVSAKKAQLCREEVTYLGYLLKGGKRWLTPARKATVMKIPTPTTPRQVREFLGTAGFCRLWIPGFASLAAPLYPLTREKVPFTWTEAHQEAFGRIKEALLSAPALALPDLTKPFALYVDEKEGVARGVLTQTLGPWRRPVAYLSKKLDPVASGWPTCLKAIAAVALLLKDADKLTLGQNVLVIAPHNLESIVRQPPDRWMTNARMTHYQSLLLNERVSFAPPAILNPATLLPVESDDTPIHICSEILAEETGTRPDLRDQPLPGVPAWYTDGSSFIMDGRRQAGAAIVDNKRTVWASNLPEGTSAQKAELIALTQALRLAEGKSINIYTDSRYAFATAHVHGAIYKQRGLLTSAGKDIKNKEEILALLEAIHLPKRVAIIHCPGHQRGTDPVATGNRKADEAAKQAAQSTRILTETTKNAGKRTADGSEFEKRTADGSEFESPKKKAKVE

SEQ ID NO: 6915 - protein, 2127 aa, synthetic construct
MPAAKRVKLDGGDKKYSIGLDIGTNSVGWAVITDEYKVPSKKFKVLGNTDRHSIKKNLIGALLFDSGETAEATRLKRTARRRYTRRKNRICYLQEIFSNEMAKVDDSFFHRLEESFLVEEDKKHERHPIFGNIVDEVAYHEKYPTIYHLRKKLVDSTDKADLRLIYLALAHMIKFRGHFLIEGDLNPDNSDVDKLFIQLVQTYNQLFEENPINASGVDAKAILSARLSKSRRLENLIAQLPGEKKNGLFGNLIALSLGLTPNFKSNFDLAEDAKLQLSKDTYDDDLDNLLAQIGDQYADLFLAAKNLSDAILLSDILRVNTEITKAPLSASMIKRYDEHHQDLTLLKALVRQQLPEKYKEIFFDQSKNGYAGYIDGGASQEEFYKFIKPILEKMDGTEELLVKLNREDLLRKQRTFDNGSIPHQIHLGELHAILRRQEDFYPFLKDNREKIEKILTFRIPYYVGPLARGNSRFAWMTRKSEETITPWNFEEVVDKGASAQSFIERMTNFDKNLPNEKVLPKHSLLYEYFTVYNELTKVKYVTEGMRKPAFLSGEQKKAIVDLLFKTNRKVTVKQLKEDYFKKIECFDSVEISGVEDRFNASLGTYHDLLKIIKDKDFLDNEENEDILEDIVLTLTLFEDREMIEERLKTYAHLFDDKVMKQLKRRRYTGWGRLSRKLINGIRDKQSGKTILDFLKSDGFANRNFMQLIHDDSLTFKEDIQKAQVSGQGDSLHEHIANLAGSPAIKKGILQTVKVVDELVKVMGRHKPENIVIEMARENQTTQKGQKNSRERMKRIEEGIKELGSQILKEHPVENTQLQNEKLYLYYLQNGRDMYVDQELDINRLSDYDVDHIVPQSFLKDDSIDNKVLTRSDKARGKSDNVPSEEVVKKMKNYWRQLLNAKLITQRKFDNLTKAERGGLSELDKAGFIKRQLVETRQITKHVAQILDSRMNTKYDENDKLIREVKVITLKSKLVSDFRKDFQFYKVREINNYHHAHDAYLNAVVGTALIKKYPKLESEFVYGDYKVYDVRKMIAKSEQEIGKATAKYFFYSNIMNFFKTEITLANGEIRKRPLIETNGETGEIVWDKGRDFATVRKVLSMPQVNIVKKTEVQTGGFSKESILPKRNSDKLIARKKDWDPKKYGGFDSPTVAYSVLVVAKVEKGKSKKLKSVKELLGITIMERSSFEKNPIDFLEAKGYKEVKKDLIIKLPKYSLFELENGRKRMLASAGELQKGNELALPSKYVNFLYLASHYEKLKGSPEDNEQKQLFVEQHKHYLDEIIEQISEFSKRVILADANLDKVLSAYNKHRDKPIREQAENIIHLFTLTNLGAPAAFKYFDTTIDRKRYTSTKEVLDATLIHQSITGLYETRIDLSQLGGDGGGGGGGSEAAAKGGLLGRDLLTKLKAQIQFSTEGPQVTWEDRPAMCLVLNLEEEYRLHEKPVPPSIDPSWLQLFPMVWAEKAGMGLANQVPPVVVELKSDASPVAVRQYPMSKEAREGIRPHIQRFLDLGILVPCQSPWNTPLLPVKKPGTNDYRPVQDLREVNKRVQDIHPTVPNPYNLLSSLPPSHTWYSVLDLKDAFFCLKLHPNSQPLFAFEWRDPEKGNTGQLTWTRLPQGFKNSPTLFNEALHRDLASFRALNPQVVMLQYVDDLLVAAPTYRDCKEGTRRLLQELSKLGYRVSAKKAQLCREEVTYLGYLLKGGKRWLTPARKATVMKIPTPTTPRQVREFLGTAGFCRLWIPGFASLAAPLYPLTRPKVPFTWTEAHQEAFGRIKEALLSAPALALPDLTKPFALYVDEKEGVARGVLTQTLGPWRRPVAYLSKKLDPVASGWPTCLKAIAAVALLLKDADKLTLGQNVLVIAPHNLESIVRQPPDRWMTNARMTHYQSLLLNERVSFAPPAILNPATLLPVESDDTPIHICSEILAEETGTRPDLRDQPLPGVPAWYTDGSSFIMDGRRQAGAAIVDNKRTVWASNLPEGTSAQKAELIALTQALRLAEGKSINIYTDSRYAFATAHVHGAIYKQRGWLTSAGKDIKNKEEILALLEAIHLPKRVAIIHCPGHQRGTDPVATGNRKADEAAKQAAQSTRILTETTKNAGKRTADGSEFEKRTADGSEFESPKKKAKVE

SEQ ID NO: 6916 - protein, 2218 aa, synthetic construct
MPAAKRVKLDGGDKKYSIGLDIGTNSVGWAVITDEYKVPSKKFKVLGNTDRHSIKKNLIGALLFDSGETAEATRLKRTARRRYTRRKNRICYLQEIFSNEMAKVDDSFFHRLEESFLVEEDKKHERHPIFGNIVDEVAYHEKYPTIYHLRKKLVDSTDKADLRLIYLALAHMIKFRGHFLIEGDLNPDNSDVDKLFIQLVQTYNQLFEENPINASGVDAKAILSARLSKSRRLENLIAQLPGEKKNGLFGNLIALSLGLTPNFKSNFDLAEDAKLQLSKDTYDDDLDNLLAQIGDQYADLFLAAKNLSDAILLSDILRVNTEITKAPLSASMIKRYDEHHQDLTLLKALVRQQLPEKYKEIFFDQSKNGYAGYIDGGASQEEFYKFIKPILEKMDGTEELLVKLNREDLLRKQRTFDNGSIPHQIHLGELHAILRRQEDFYPFLKDNREKIEKILTFRIPYYVGPLARGNSRFAWMTRKSEETITPWNFEEVVDKGASAQSFIERMTNFDKNLPNEKVLPKHSLLYEYFTVYNELTKVKYVTEGMRKPAFLSGEQKKAIVDLLFKTNRKVTVKQLKEDYFKKIECFDSVEISGVEDRFNASLGTYHDLLKIIKDKDFLDNEENEDILEDIVLTLTLFEDREMIEERLKTYAHLFDDKVMKQLKRRRYTGWGRLSRKLINGIRDKQSGKTILDFLKSDGFANRNFMQLIHDDSLTFKEDIQKAQVSGQGDSLHEHIANLAGSPAIKKGILQTVKVVDELVKVMGRHKPENIVIEMARENQTTQKGQKNSRERMKRIEEGIKELGSQILKEHPVENTQLQNEKLYLYYLQNGRDMYVDQELDINRLSDYDVDHIVPQSFLKDDSIDNKVLTRSDKARGKSDNVPSEEVVKKMKNYWRQLLNAKLITQRKFDNLTKAERGGLSELDKAGFIKRQLVETRQITKHVAQILDSRMNTKYDENDKLIREVKVITLKSKLVSDFRKDFQFYKVREINNYHHAHDAYLNAVVGTALIKKYPKLESEFVYGDYKVYDVRKMIAKSEQEIGKATAKYFFYSNIMNFFKTEITLANGEIRKRPLIETNGETGEIVWDKGRDFATVRKVLSMPQVNIVKKTEVQTGGFSKESILPKRNSDKLIARKKDWDPKKYGGFDSPTVAYSVLVVAKVEKGKSKKLKSVKELLGITIMERSSFEKNPIDFLEAKGYKEVKKDLIIKLPKYSLFELENGRKRMLASAGELQKGNELALPSKYVNFLYLASHYEKLKGSPEDNEQKQLFVEQHKHYLDEIIEQISEFSKRVILADANLDKVLSAYNKHRDKPIREQAENIIHLFTLTNLGAPAAFKYFDTTIDRKRYTSTKEVLDATLIHQSITGLYETRIDLSQLGGDGGGGGGGSEAAAKGGTLGDQGSRGSDPLPEPRVTLTVEGIPTEFLVNTGAEHSVLTKPMGKMGSKRTVVAGATGSKVYPWTTKRLLKIGQKQVTHSFLVIPECPAPLLGRDLLTKLKAQIQFSTEGPQVTWEDRPAMCLVLNLEEEYRLHEKPVPPSIDPSWLQLFPMVWAEKAGMGLANQVPPVVVELKSDASPVAVRQYPMSKEAREGIRPHIQRFLDLGILVPCQSPWNTPLLPVKKPGTNDYRPVQDLREVNKRVQDIHPTVPNPYNLLSSLPPSHTWYSVLDLKDAFFCLKLHPNSQPLFAFEWRDPEKGNTGQLTWTRLPQGFKNSPTLFNEALHRDLASFRALNPQVVMLQYVDDLLVAAPTYRDCKEGTRRLLQELSKLGYRVSAKKAQLCREEVTYLGYLLKGGKRWLTPARKATVMKIPTPTTPRQVREFLGTAGFCRLWIPGFASLAAPLYPLTRPKVPFTWTEAHQEAFGRIKEALLSAPALALPDLTKPFALYVDEKEGVARGVLTQTLGPWRRPVAYLSKKLDPVASGWPTCLKAIAAVALLLKDADKLTLGQNVLVIAPHNLESIVRQPPDRWMTNARMTHYQSLLLNERVSFAPPAILNPATLLPVESDDTPIHICSEILAEETGTRPDLRDQPLPGVPAWYTDGSSFIMDGRRQAGAAIVDNKRTVWASNLPEGTSAQKAELIALTQALRLAEGKSINIYTDSRYAFATAHVHGAIYKQRGWLTSAGKDIKNKEEILALLEAIHLPKRVAIIHCPGHQRGTDPVATGNRKADEAAKQAAQSTRILTETTKNAGKRTADGSEFEKRTADGSEFESPKKKAKVE

SEQ ID NO: 6917 - protein, 2096 aa, synthetic construct
MPAAKRVKLDGGDKKYSIGLDIGTNSVGWAVITDEYKVPSKKFKVLGNTDRHSIKKNLIGALLFDSGETAEATRLKRTARRRYTRRKNRICYLQEIFSNEMAKVDDSFFHRLEESFLVEEDKKHERHPIFGNIVDEVAYHEKYPTIYHLRKKLVDSTDKADLRLIYLALAHMIKFRGHFLIEGDLNPDNSDVDKLFIQLVQTYNQLFEENPINASGVDAKAILSARLSKSRRLENLIAQLPGEKKNGLFGNLIALSLGLTPNFKSNFDLAEDAKLQLSKDTYDDDLDNLLAQIGDQYADLFLAAKNLSDAILLSDILRVNTEITKAPLSASMIKRYDEHHQDLTLLKALVRQQLPEKYKEIFFDQSKNGYAGYIDGGASQEEFYKFIKPILEKMDGTEELLVKLNREDLLRKQRTFDNGSIPHQIHLGELHAILRRQEDFYPFLKDNREKIEKILTFRIPYYVGPLARGNSRFAWMTRKSEETITPWNFEEVVDKGASAQSFIERMTNFDKNLPNEKVLPKHSLLYEYFTVYNELTKVKYVTEGMRKPAFLSGEQKKAIVDLLFKTNRKVTVKQLKEDYFKKIECFDSVEISGVEDRFNASLGTYHDLLKIIKDKDFLDNEENEDILEDIVLTLTLFEDREMIEERLKTYAHLFDDKVMKQLKRRRYTGWGRLSRKLINGIRDKQSGKTILDFLKSDGFANRNFMQLIHDDSLTFKEDIQKAQVSGQGDSLHEHIANLAGSPAIKKGILQTVKVVDELVKVMGRHKPENIVIEMARENQTTQKGQKNSRERMKRIEEGIKELGSQILKEHPVENTQLQNEKLYLYYLQNGRDMYVDQELDINRLSDYDVDHIVPQSFLKDDSIDNKVLTRSDKARGKSDNVPSEEVVKKMKNYWRQLLNAKLITQRKFDNLTKAERGGLSELDKAGFIKRQLVETRQITKHVAQILDSRMNTKYDENDKLIREVKVITLKSKLVSDFRKDFQFYKVREINNYHHAHDAYLNAVVGTALIKKYPKLESEFVYGDYKVYDVRKMIAKSEQEIGKATAKYFFYSNIMNFFKTEITLANGEIRKRPLIETNGETGEIVWDKGRDFATVRKVLSMPQVNIVKKTEVQTGGFSKESILPKRNSDKLIARKKDWDPKKYGGFDSPTVAYSVLVVAKVEKGKSKKLKSVKELLGITIMERSSFEKNPIDFLEAKGYKEVKKDLIIKLPKYSLFELENGRKRMLASAGELQKGNELALPSKYVNFLYLASHYEKLKGSPEDNEQKQLFVEQHKHYLDEIIEQISEFSKRVILADANLDKVLSAYNKHRDKPIREQAENIIHLFTLTNLGAPAAFKYFDTTIDRKRYTSTKEVLDATLIHQSITGLYETRIDLSQLGGDGGGGGGGSEAAAKGGTLNLEDEYRLYETSAEPEVSPGSTWLSDFPQAWAETGGMGLAVRQAPLIIPLKATSTPVSIKQYPMSQEAKLGIKPHIQRLLDQGILVPCQSPWNTPLLPVKKPGTNDYRPVQDLREVNKRVEDIHPTVPNPYNLLSGLPPSHRWYTVLDLKDAFFCLRLHPTSQPLFAFEWRDPGMGISGQLTWTRLPQGFKNSPTLFNEALHRDLADFRIQHPDLILLQYVDDILLAATSELDCQQGTRALLLTLGNLGYRASAKKAQLCQKQVKYLGYLLKEGQRWLTEARKETVMGQPTPKTPRQLREFLGTAGFCRLWIPGFAEMAAPLYPLTKPGTLFNWGPDQQKAYQEIKQALLTAPALGLPDLTKPFELFVDEKQGYAKGVLTQKLGPWRRPVAYLSKKLDPVAAGWPPCLRMVAAIAVLRKDAGKLTMGQPLVILAPHAVEALVKQPPDRWLSNARMTHYQAMLLDTDRVQFGPVVALNPATLLPLPEEGAPHDCLEILAETHGTRPDLTDQPIPDADHTWYTDGSSFLQEGQRKAGAAVTTETEVIWARALPAGTSAQRAELIALTQALKMAEGKRLNVYTDSRYAFATAHIHGEIYRRRGWLTSEGREIKNKSEILALLKALFLPKRLSIIHCLGHQKGDSAEARGNRLADQAAREAAIKTPPDTSTLLAGKRTADGSEFEKRTADGSEFESPKKKAKVE

SEQ ID NO: 6918 - protein, 2096 aa, synthetic construct
MPAAKRVKLDGGDKKYSIGLDIGTNSVGWAVITDEYKVPSKKFKVLGNTDRHSIKKNLIGALLFDSGETAEATRLKRTARRRYTRRKNRICYLQEIFSNEMAKVDDSFFHRLEESFLVEEDKKHERHPIFGNIVDEVAYHEKYPTIYHLRKKLVDSTDKADLRLIYLALAHMIKFRGHFLIEGDLNPDNSDVDKLFIQLVQTYNQLFEENPINASGVDAKAILSARLSKSRRLENLIAQLPGEKKNGLFGNLIALSLGLTPNFKSNFDLAEDAKLQLSKDTYDDDLDNLLAQIGDQYADLFLAAKNLSDAILLSDILRVNTEITKAPLSASMIKRYDEHHQDLTLLKALVRQQLPEKYKEIFFDQSKNGYAGYIDGGASQEEFYKFIKPILEKMDGTEELLVKLNREDLLRKQRTFDNGSIPHQIHLGELHAILRRQEDFYPFLKDNREKIEKILTFRIPYYVGPLARGNSRFAWMTRKSEETITPWNFEEVVDKGASAQSFIERMTNFDKNLPNEKVLPKHSLLYEYFTVYNELTKVKYVTEGMRKPAFLSGEQKKAIVDLLFKTNRKVTVKQLKEDYFKKIECFDSVEISGVEDRFNASLGTYHDLLKIIKDKDFLDNEENEDILEDIVLTLTLFEDREMIEERLKTYAHLFDDKVMKQLKRRRYTGWGRLSRKLINGIRDKQSGKTILDFLKSDGFANRNFMQLIHDDSLTFKEDIQKAQVSGQGDSLHEHIANLAGSPAIKKGILQTVKVVDELVKVMGRHKPENIVIEMARENQTTQKGQKNSRERMKRIEEGIKELGSQILKEHPVENTQLQNEKLYLYYLQNGRDMYVDQELDINRLSDYDVDHIVPQSFLKDDSIDNKVLTRSDKARGKSDNVPSEEVVKKMKNYWRQLLNAKLITQRKFDNLTKAERGGLSELDKAGFIKRQLVETRQITKHVAQILDSRMNTKYDENDKLIREVKVITLKSKLVSDFRKDFQFYKVREINNYHHAHDAYLNAVVGTALIKKYPKLESEFVYGDYKVYDVRKMIAKSEQEIGKATAKYFFYSNIMNFFKTEITLANGEIRKRPLIETNGETGEIVWDKGRDFATVRKVLSMPQVNIVKKTEVQTGGFSKESILPKRNSDKLIARKKDWDPKKYGGFDSPTVAYSVLVVAKVEKGKSKKLKSVKELLGITIMERSSFEKNPIDFLEAKGYKEVKKDLIIKLPKYSLFELENGRKRMLASAGELQKGNELALPSKYVNFLYLASHYEKLKGSPEDNEQKQLFVEQHKHYLDEIIEQISEFSKRVILADANLDKVLSAYNKHRDKPIREQAENIIHLFTLTNLGAPAAFKYFDTTIDRKRYTSTKEVLDATLIHQSITGLYETRIDLSQLGGDGGGGGGGSEAAAKGGTLNIEDEYRLHETSKGPDVPLGSTWLSDFPQAWAETGGMGLAFRQAPLIISLKATSTPVSIKQYPMSQEARLGIKPHIQRLLDQGILVPCQSPWNTPLLPVKKPGTNDYRPVQDLREVNKRVEDIHPTVPNPYNLLSGLPPSHQWYTVLDLKDAFFCLRLHPTSQSLFAFEWKDPEMGISGQLTWTRLPQGFKNSPTLFDEALHRDLADFRIQHPDLILLQYVDDLLLAATSELDCQQGTRALLQTLGDLGYRASAKKAQICQKQVKYLGYLLKEGQRWLTEARKETVMGQPTPKTPRQLREFLGTAGLCRLWIPGFAEMAAPLYPLTKTGTLFKWGPDQQKAYQEIKQALLTAPALGLPDLTKPFELFVDEKQGYAKGVLTQKLGPWRRPVAYLSKKLDPVAAGWPPCLRMVAAIAVLTKDVGKLTMGQPLVILAPHAVEALVKQPPDRWLSNARMTHYQALLLDTDRVQFGPIVALNPATLLPLPEEGLQHDCLDILAEAHGTRPDLTDQPLPDADHTWYTDGSSFLQEGQRRAGAAVTTETEVIWAKALPAGTSAQRAELIALTQALKMAAGKKLNVYTDSRYAFATAHIHGEIYRRRGLLTSEGKEIKNKDEILALLKALFLPKRLSIIHCPGHQKGNHAEARGNRMADQAAREVATRETPETSTLLAGKRTADGSEFEKRTADGSEFESPKKKAKVE

SEQ ID NO: 6919 - protein, 2096 aa, synthetic construct
MPAAKRVKLDGGDKKYSIGLDIGTNSVGWAVITDEYKVPSKKFKVLGNTDRHSIKKNLIGALLFDSGETAEATRLKRTARRRYTRRKNRICYLQEIFSNEMAKVDDSFFHRLEESFLVEEDKKHERHPIFGNIVDEVAYHEKYPTIYHLRKKLVDSTDKADLRLIYLALAHMIKFRGHFLIEGDLNPDNSDVDKLFIQLVQTYNQLFEENPINASGVDAKAILSARLSKSRRLENLIAQLPGEKKNGLFGNLIALSLGLTPNFKSNFDLAEDAKLQLSKDTYDDDLDNLLAQIGDQYADLFLAAKNLSDAILLSDILRVNTEITKAPLSASMIKRYDEHHQDLTLLKALVRQQLPEKYKEIFFDQSKNGYAGYIDGGASQEEFYKFIKPILEKMDGTEELLVKLNREDLLRKQRTFDNGSIPHQIHLGELHAILRRQEDFYPFLKDNREKIEKILTFRIPYYVGPLARGNSRFAWMTRKSEETITPWNFEEVVDKGASAQSFIERMTNFDKNLPNEKVLPKHSLLYEYFTVYNELTKVKYVTEGMRKPAFLSGEQKKAIVDLLFKTNRKVTVKQLKEDYFKKIECFDSVEISGVEDRFNASLGTYHDLLKIIKDKDFLDNEENEDILEDIVLTLTLFEDREMIEERLKTYAHLFDDKVMKQLKRRRYTGWGRLSRKLINGIRDKQSGKTILDFLKSDGFANRNFMQLIHDDSLTFKEDIQKAQVSGQGDSLHEHIANLAGSPAIKKGILQTVKVVDELVKVMGRHKPENIVIEMARENQTTQKGQKNSRERMKRIEEGIKELGSQILKEHPVENTQLQNEKLYLYYLQNGRDMYVDQELDINRLSDYDVDHIVPQSFLKDDSIDNKVLTRSDKARGKSDNVPSEEVVKKMKNYWRQLLNAKLITQRKFDNLTKAERGGLSELDKAGFIKRQLVETRQITKHVAQILDSRMNTKYDENDKLIREVKVITLKSKLVSDFRKDFQFYKVREINNYHHAHDAYLNAVVGTALIKKYPKLESEFVYGDYKVYDVRKMIAKSEQEIGKATAKYFFYSNIMNFFKTEITLANGEIRKRPLIETNGETGEIVWDKGRDFATVRKVLSMPQVNIVKKTEVQTGGFSKESILPKRNSDKLIARKKDWDPKKYGGFDSPTVAYSVLVVAKVEKGKSKKLKSVKELLGITIMERSSFEKNPIDFLEAKGYKEVKKDLIIKLPKYSLFELENGRKRMLASAGELQKGNELALPSKYVNFLYLASHYEKLKGSPEDNEQKQLFVEQHKHYLDEIIEQISEFSKRVILADANLDKVLSAYNKHRDKPIREQAENIIHLFTLTNLGAPAAFKYFDTTIDRKRYTSTKEVLDATLIHQSITGLYETRIDLSQLGGDGGGGGGGSEAAAKGGTLNIEDEYRLHETSKGPDVPLGSTWLSDFPQAWAETGGMGLAVRQAPLIIPLKATSTPVSIKQYPMSQEARLGIKPHIQRLLDQGILVPCQSPWNTPLLPVKKPGTNDYRPVQDLREVNKRVEDIHPTVPNPYNLLSGLPPSHQWYTVLDLKDAFFCLRLHPTSQSLFAFEWRDPEMGISGQLTWTRLPQGFKNSPTLFNEALHRDLADFRIQHPDLILLQYVDDLLLAATSELDCQQGTRALLQTLGDLGYRASAKKAQICQKQVKYLGYLLKEGQRWLTEARKETVMGQPTPKTPRQLREFLGTAGFCRLWIPGFAEMAAPLYPLTKPGTLFEWGPDQQKAYQEIKQALLTAPALGLPDLTKPFELFVDEKQGYAKGVLTQKLGPWRRPVAYLSKKLDPVAAGWPPCLRMVAAIAVLTKDAGKLTMGQPLVILAPHAVEALVKQPPDRWLSNARMTHYQALLLDTDRVQFGPIVALNPATLLPLPEEGLQHDCLDILAEAHGTRPDLTDQPLPDADHTWYTDGSSFLQEGQRKAGAAVTTETEVVWAKALPAGTSAQRAELIALTQALKMAEGKKLNVYTDSRYAFATAHIHGEIYRRRGWLTSEGKEIKNKDEILALLKALFLPKRLSIIHCPGHQKGNRAEARGNRMADQAAREVATRETPETSTLLAGKRTADGSEFEKRTADGSEFESPKKKAKVE

SEQ ID NO: 6920 - protein, 2090 aa, synthetic construct
MPAAKRVKLDGGDKKYSIGLDIGTNSVGWAVITDEYKVPSKKFKVLGNTDRHSIKKNLIGALLFDSGETAEATRLKRTARRRYTRRKNRICYLQEIFSNEMAKVDDSFFHRLEESFLVEEDKKHERHPIFGNIVDEVAYHEKYPTIYHLRKKLVDSTDKADLRLIYLALAHMIKFRGHFLIEGDLNPDNSDVDKLFIQLVQTYNQLFEENPINASGVDAKAILSARLSKSRRLENLIAQLPGEKKNGLFGNLIALSLGLTPNFKSNFDLAEDAKLQLSKDTYDDDLDNLLAQIGDQYADLFLAAKNLSDAILLSDILRVNTEITKAPLSASMIKRYDEHHQDLTLLKALVRQQLPEKYKEIFFDQSKNGYAGYIDGGASQEEFYKFIKPILEKMDGTEELLVKLNREDLLRKQRTFDNGSIPHQIHLGELHAILRRQEDFYPFLKDNREKIEKILTFRIPYYVGPLARGNSRFAWMTRKSEETITPWNFEEVVDKGASAQSFIERMTNFDKNLPNEKVLPKHSLLYEYFTVYNELTKVKYVTEGMRKPAFLSGEQKKAIVDLLFKTNRKVTVKQLKEDYFKKIECFDSVEISGVEDRFNASLGTYHDLLKIIKDKDFLDNEENEDILEDIVLTLTLFEDREMIEERLKTYAHLFDDKVMKQLKRRRYTGWGRLSRKLINGIRDKQSGKTILDFLKSDGFANRNFMQLIHDDSLTFKEDIQKAQVSGQGDSLHEHIANLAGSPAIKKGILQTVKVVDELVKVMGRHKPENIVIEMARENQTTQKGQKNSRERMKRIEEGIKELGSQILKEHPVENTQLQNEKLYLYYLQNGRDMYVDQELDINRLSDYDVDHIVPQSFLKDDSIDNKVLTRSDKARGKSDNVPSEEVVKKMKNYWRQLLNAKLITQRKFDNLTKAERGGLSELDKAGFIKRQLVETRQITKHVAQILDSRMNTKYDENDKLIREVKVITLKSKLVSDFRKDFQFYKVREINNYHHAHDAYLNAVVGTALIKKYPKLESEFVYGDYKVYDVRKMIAKSEQEIGKATAKYFFYSNIMNFFKTEITLANGEIRKRPLIETNGETGEIVWDKGRDFATVRKVLSMPQVNIVKKTEVQTGGFSKESILPKRNSDKLIARKKDWDPKKYGGFDSPTVAYSVLVVAKVEKGKSKKLKSVKELLGITIMERSSFEKNPIDFLEAKGYKEVKKDLIIKLPKYSLFELENGRKRMLASAGELQKGNELALPSKYVNFLYLASHYEKLKGSPEDNEQKQLFVEQHKHYLDEIIEQISEFSKRVILADANLDKVLSAYNKHRDKPIREQAENIIHLFTLTNLGAPAAFKYFDTTIDRKRYTSTKEVLDATLIHQSITGLYETRIDLSQLGGDGGGGGGGSEAAAKGGTLQLDDEYRLYSPLVKPDQNIQFWLEQFPQAWAETAGMGLAKQVPPQVIQLKASATPVSVRQYPLSKEAQEGIRPHVQRLIQQGILVPVQSPWNTPLLPVRKPGTNDYRPVQDLREVNKRVQDIHPTVPNPYNLLCALPPQRSWYTVLDLKDAFFCLRLHPTSQPLFAFEWRDPGTGRTGQLTWTRLPQGFKNSPTIFDEALHRDLANFRIQHPQVTLLQYVDDLLLAGATKQDCLEGTKALLLELSDLGYRASAKKAQICRREVTYLGYSLRDGQRWLTEARKKTVVQIPAPTTAKQVREFLGTAGFCRLWIPGFATLAAPLYPLTKEKGEFSWAPEHQKAFDAIKKALLSAPALALPDVTKPFTLYVDERKGVARGVLTQTLGPWRRPVAYLSKKLDPVASGWPVCLKAIAAVAILVKDADKLTLGQNITVIAPHALENIVRQPPDRWMTNARMTHYQSLLLTERVTFAPPAALNPATLLPEETDEPVTHDCHQLLIEETGVRKDLTDIPLTGEVLTWFTDGSSYVVEGKRMAGAAVVDGTRTIWASSLPEGTSAQKAELMALTQALRLAEGKSINIYTDSRYAFATAHVHGAIYKQRGLLTSAGREIKNKEEILSLLEALHLPKRLAIIHCPGHQKAKDPISRGNQMADRVAKQAAQGVNLLAGKRTADGSEFEKRTADGSEFESPKKKAKVE

SEQ ID NO: 6921 - protein, 2087 aa, synthetic construct
MPAAKRVKLDGGDKKYSIGLDIGTNSVGWAVITDEYKVPSKKFKVLGNTDRHSIKKNLIGALLFDSGETAEATRLKRTARRRYTRRKNRICYLQEIFSNEMAKVDDSFFHRLEESFLVEEDKKHERHPIFGNIVDEVAYHEKYPTIYHLRKKLVDSTDKADLRLIYLALAHMIKFRGHFLIEGDLNPDNSDVDKLFIQLVQTYNQLFEENPINASGVDAKAILSARLSKSRRLENLIAQLPGEKKNGLFGNLIALSLGLTPNFKSNFDLAEDAKLQLSKDTYDDDLDNLLAQIGDQYADLFLAAKNLSDAILLSDILRVNTEITKAPLSASMIKRYDEHHQDLTLLKALVRQQLPEKYKEIFFDQSKNGYAGYIDGGASQEEFYKFIKPILEKMDGTEELLVKLNREDLLRKQRTFDNGSIPHQIHLGELHAILRRQEDFYPFLKDNREKIEKILTFRIPYYVGPLARGNSRFAWMTRKSEETITPWNFEEVVDKGASAQSFIERMTNFDKNLPNEKVLPKHSLLYEYFTVYNELTKVKYVTEGMRKPAFLSGEQKKAIVDLLFKTNRKVTVKQLKEDYFKKIECFDSVEISGVEDRFNASLGTYHDLLKIIKDKDFLDNEENEDILEDIVLTLTLFEDREMIEERLKTYAHLFDDKVMKQLKRRRYTGWGRLSRKLINGIRDKQSGKTILDFLKSDGFANRNFMQLIHDDSLTFKEDIQKAQVSGQGDSLHEHIANLAGSPAIKKGILQTVKVVDELVKVMGRHKPENIVIEMARENQTTQKGQKNSRERMKRIEEGIKELGSQILKEHPVENTQLQNEKLYLYYLQNGRDMYVDQELDINRLSDYDVDHIVPQSFLKDDSIDNKVLTRSDKARGKSDNVPSEEVVKKMKNYWRQLLNAKLITQRKFDNLTKAERGGLSELDKAGFIKRQLVETRQITKHVAQILDSRMNTKYDENDKLIREVKVITLKSKLVSDFRKDFQFYKVREINNYHHAHDAYLNAVVGTALIKKYPKLESEFVYGDYKVYDVRKMIAKSEQEIGKATAKYFFYSNIMNFFKTEITLANGEIRKRPLIETNGETGEIVWDKGRDFATVRKVLSMPQVNIVKKTEVQTGGFSKESILPKRNSDKLIARKKDWDPKKYGGFDSPTVAYSVLVVAKVEKGKSKKLKSVKELLGITIMERSSFEKNPIDFLEAKGYKEVKKDLIIKLPKYSLFELENGRKRMLASAGELQKGNELALPSKYVNFLYLASHYEKLKGSPEDNEQKQLFVEQHKHYLDEIIEQISEFSKRVILADANLDKVLSAYNKHRDKPIREQAENIIHLFTLTNLGAPAAFKYFDTTIDRKRYTSTKEVLDATLIHQSITGLYETRIDLSQLGGDGGGGGGGSEAAAKGGVPWLMKKPLQLTVLVPLHEYQERLLQQTALPKEQKELLQKLFLKYDALWQHWENQVGHRRIKPHNIATGTLAPRPQKQYPINPKAKPSIQIVIDDLLKQGVLIQQNSTMNTPVYPVPKPDGKWRMVLDYREVNKTIPLIAAQNQHSAGILSSIYRGKYKTTLDLTNGFWAHPITPESYWLTAFTWQGKQYCWTRLPQGFLNSPALFTADVVDLLKEIPNVQAYVDDIYISHDDPQEHLEQLEKIFSILLNAGYVVSLKKSEIAQREVEFLGFNITKEGRGLTDTFKQKLLNITPPKDLKQLQSILGLLNFARNFIPNYSELVKPLYTIVANANGKFISWTEDNSNQLQHIISVLNQADNLEERNPETRLIIKVNSSPSAGYIRYYNEGSKRPIMYVNYIFSKAEAKFTQTEKLLTTMHKGLIKAMDLAMGQEILVYSPIVSMTKIQRTPLPERKALPVRWITWMTYLEDPRIQFHYDKSLPELQQIPNVTEDVIAKTKHPSEFAMVFYTDGSAIKHPDVNKSHSAGMGIAQVQFIPEYKIVHQWSIPLGDHTAQLAEIAAVEFACKKALKISGPVLIVTDSFYVAESANKELPYWKSNGFLNNKKKPLRHVSKWKSIAECLQLKPDIIIMHEKGHQQPMTTLHTEGNNLADKLATQGSYVVHAGKRTADGSEFEKRTADGSEFESPKKKAKVE

SEQ ID NO: 6922 - protein, 2087 aa, synthetic construct
MPAAKRVKLDGGDKKYSIGLDIGTNSVGWAVITDEYKVPSKKFKVLGNTDRHSIKKNLIGALLFDSGETAEATRLKRTARRRYTRRKNRICYLQEIFSNEMAKVDDSFFHRLEESFLVEEDKKHERHPIFGNIVDEVAYHEKYPTIYHLRKKLVDSTDKADLRLIYLALAHMIKFRGHFLIEGDLNPDNSDVDKLFIQLVQTYNQLFEENPINASGVDAKAILSARLSKSRRLENLIAQLPGEKKNGLFGNLIALSLGLTPNFKSNFDLAEDAKLQLSKDTYDDDLDNLLAQIGDQYADLFLAAKNLSDAILLSDILRVNTEITKAPLSASMIKRYDEHHQDLTLLKALVRQQLPEKYKEIFFDQSKNGYAGYIDGGASQEEFYKFIKPILEKMDGTEELLVKLNREDLLRKQRTFDNGSIPHQIHLGELHAILRRQEDFYPFLKDNREKIEKILTFRIPYYVGPLARGNSRFAWMTRKSEETITPWNFEEVVDKGASAQSFIERMTNFDKNLPNEKVLPKHSLLYEYFTVYNELTKVKYVTEGMRKPAFLSGEQKKAIVDLLFKTNRKVTVKQLKEDYFKKIECFDSVEISGVEDRFNASLGTYHDLLKIIKDKDFLDNEENEDILEDIVLTLTLFEDREMIEERLKTYAHLFDDKVMKQLKRRRYTGWGRLSRKLINGIRDKQSGKTILDFLKSDGFANRNFMQLIHDDSLTFKEDIQKAQVSGQGDSLHEHIANLAGSPAIKKGILQTVKVVDELVKVMGRHKPENIVIEMARENQTTQKGQKNSRERMKRIEEGIKELGSQILKEHPVENTQLQNEKLYLYYLQNGRDMYVDQELDINRLSDYDVDHIVPQSFLKDDSIDNKVLTRSDKARGKSDNVPSEEVVKKMKNYWRQLLNAKLITQRKFDNLTKAERGGLSELDKAGFIKRQLVETRQITKHVAQILDSRMNTKYDENDKLIREVKVITLKSKLVSDFRKDFQFYKVREINNYHHAHDAYLNAVVGTALIKKYPKLESEFVYGDYKVYDVRKMIAKSEQEIGKATAKYFFYSNIMNFFKTEITLANGEIRKRPLIETNGETGEIVWDKGRDFATVRKVLSMPQVNIVKKTEVQTGGFSKESILPKRNSDKLIARKKDWDPKKYGGFDSPTVAYSVLVVAKVEKGKSKKLKSVKELLGITIMERSSFEKNPIDFLEAKGYKEVKKDLIIKLPKYSLFELENGRKRMLASAGELQKGNELALPSKYVNFLYLASHYEKLKGSPEDNEQKQLFVEQHKHYLDEIIEQISEFSKRVILADANLDKVLSAYNKHRDKPIREQAENIIHLFTLTNLGAPAAFKYFDTTIDRKRYTSTKEVLDATLIHQSITGLYETRIDLSQLGGDGGGGGGGSEAAAKGGVPWLMKKPLQLTVLVPLHEYQERLLQQTALPKEQKELLQKLFLKYDALWQHWENQVGHRRIKPHNIATGTLAPRPQKQYPINPKAKPSIQIVIDDLLKQGVLIQQNSTMNTPVYPVPKPDGKWRMVLDYREVNKTIPLIAAQNQHSAGILSSIYRGKYKTTLDLTNGFWAHPITPESYWLTAFTWQGKQYCWTRLPQGFLNSPALFNADVVDLLKEIPNVQAYVDDIYISHDDPQEHLEQLEKIFSILLNAGYVVSLKKSEIAQREVEFLGFNITKEGRGLTDTFKQKLLNITPPKDLKQLQSILGLLNFARNFIPNYSELVKPLYTIVAPANGKFISWTEDNSNQLQHIISVLNQADNLEERNPETRLIIKVNSSPSAGYIRYYNEGSKRPIMYVNYIFSKAEAKFTQTEKLLTTMHKGLIKAMDLAMGQEILVYSPIVSMTKIQRTPLPERKALPVRWITWMTYLEDPRIQFHYDKSLPELQQIPNVTEDVIAKTKHPSEFAMVFYTDGSAIKHPDVNKSHSAGMGIAQVQFIPEYKIVHQWSIPLGDHTAQLAEIAAVEFACKKALKISGPVLIVTDSFYVAESANKELPYWKSNGFLNNKKKPLRHVSKWKSIAECLQLKPDIIIMHEKGHQQPMTTLHTEGNNLADKLATQGSYVVHAGKRTADGSEFEKRTADGSEFESPKKKAKVE

SEQ ID NO: 6923 - protein, 2087 aa, synthetic construct
MPAAKRVKLDGGDKKYSIGLDIGTNSVGWAVITDEYKVPSKKFKVLGNTDRHSIKKNLIGALLFDSGETAEATRLKRTARRRYTRRKNRICYLQEIFSNEMAKVDDSFFHRLEESFLVEEDKKHERHPIFGNIVDEVAYHEKYPTIYHLRKKLVDSTDKADLRLIYLALAHMIKFRGHFLIEGDLNPDNSDVDKLFIQLVQTYNQLFEENPINASGVDAKAILSARLSKSRRLENLIAQLPGEKKNGLFGNLIALSLGLTPNFKSNFDLAEDAKLQLSKDTYDDDLDNLLAQIGDQYADLFLAAKNLSDAILLSDILRVNTEITKAPLSASMIKRYDEHHQDLTLLKALVRQQLPEKYKEIFFDQSKNGYAGYIDGGASQEEFYKFIKPILEKMDGTEELLVKLNREDLLRKQRTFDNGSIPHQIHLGELHAILRRQEDFYPFLKDNREKIEKILTFRIPYYVGPLARGNSRFAWMTRKSEETITPWNFEEVVDKGASAQSFIERMTNFDKNLPNEKVLPKHSLLYEYFTVYNELTKVKYVTEGMRKPAFLSGEQKKAIVDLLFKTNRKVTVKQLKEDYFKKIECFDSVEISGVEDRFNASLGTYHDLLKIIKDKDFLDNEENEDILEDIVLTLTLFEDREMIEERLKTYAHLFDDKVMKQLKRRRYTGWGRLSRKLINGIRDKQSGKTILDFLKSDGFANRNFMQLIHDDSLTFKEDIQKAQVSGQGDSLHEHIANLAGSPAIKKGILQTVKVVDELVKVMGRHKPENIVIEMARENQTTQKGQKNSRERMKRIEEGIKELGSQILKEHPVENTQLQNEKLYLYYLQNGRDMYVDQELDINRLSDYDVDHIVPQSFLKDDSIDNKVLTRSDKARGKSDNVPSEEVVKKMKNYWRQLLNAKLITQRKFDNLTKAERGGLSELDKAGFIKRQLVETRQITKHVAQILDSRMNTKYDENDKLIREVKVITLKSKLVSDFRKDFQFYKVREINNYHHAHDAYLNAVVGTALIKKYPKLESEFVYGDYKVYDVRKMIAKSEQEIGKATAKYFFYSNIMNFFKTEITLANGEIRKRPLIETNGETGEIVWDKGRDFATVRKVLSMPQVNIVKKTEVQTGGFSKESILPKRNSDKLIARKKDWDPKKYGGFDSPTVAYSVLVVAKVEKGKSKKLKSVKELLGITIMERSSFEKNPIDFLEAKGYKEVKKDLIIKLPKYSLFELENGRKRMLASAGELQKGNELALPSKYVNFLYLASHYEKLKGSPEDNEQKQLFVEQHKHYLDEIIEQISEFSKRVILADANLDKVLSAYNKHRDKPIREQAENIIHLFTLTNLGAPAAFKYFDTTIDRKRYTSTKEVLDATLIHQSITGLYETRIDLSQLGGDGGGGGGGSEAAAKGGIPWLMKKPLQLTTLVPLQEYEERLLKQTMLTGSYKEKLQSLFLKYDALWQHWENQVGHRRIKPHHIATGTVNPRPQKQYPINPKAKASIQTVINDLLKQGVLIQQNSIMNTPVYPVPKPDGKWRMVLDYREVNKTIPLIAAQNQHSAGILSSIFRGKYKTTLDLSNGFWAHSITPESYWLTAFTWLGQQYCWTRLPQGFLNSPALFNADVVDLLKEVPNVQVYVDDIYISHDDPREHLEQLEKVFSLLLNAGYVVSLKKSEIAQHEVEFLGFNITKEGRGLTETFKQKLLNITPPRDLKQLQSILGKLNFARNFIPNFSELVKPLYNIIATAPGKYITWTTDNSQQLQNIISMLNSAENLEERNPEVRLIMKVNTSPSAGYIRFYNEFAKRPIMYLNYVYTKAEVKFTNTEKLLTTIHKGLIKALDLGMGQEILVYSPIVSMTKIQKTPLPERKALPIRWITWMSYLEDPRIQFHYDKTLPELQQVPTVTDDIIAKIKHPSEFSMVFYTDGSAIKHPNVNKSHNAGMGIAQVQFKPEFTVINTWSIPLGDHTAQLAEVAAVEFACKKALKIDGPVLIVTDSFYVAESVNKELPYWQSNGFFNNKKKPLKHVSKWKSIADCIQLKPDIIIIHEKGHQPTASTFHTEGNNLADKLATQGSYVVNAGKRTADGSEFEKRTADGSEFESPKKKAKVE

SEQ ID NO: 6924 - protein, 2094 aa, synthetic construct
MPAAKRVKLDGGDKKYSIGLDIGTNSVGWAVITDEYKVPSKKFKVLGNTDRHSIKKNLIGALLFDSGETAEATRLKRTARRRYTRRKNRICYLQEIFSNEMAKVDDSFFHRLEESFLVEEDKKHERHPIFGNIVDEVAYHEKYPTIYHLRKKLVDSTDKADLRLIYLALAHMIKFRGHFLIEGDLNPDNSDVDKLFIQLVQTYNQLFEENPINASGVDAKAILSARLSKSRRLENLIAQLPGEKKNGLFGNLIALSLGLTPNFKSNFDLAEDAKLQLSKDTYDDDLDNLLAQIGDQYADLFLAAKNLSDAILLSDILRVNTEITKAPLSASMIKRYDEHHQDLTLLKALVRQQLPEKYKEIFFDQSKNGYAGYIDGGASQEEFYKFIKPILEKMDGTEELLVKLNREDLLRKQRTFDNGSIPHQIHLGELHAILRRQEDFYPFLKDNREKIEKILTFRIPYYVGPLARGNSRFAWMTRKSEETITPWNFEEVVDKGASAQSFIERMTNFDKNLPNEKVLPKHSLLYEYFTVYNELTKVKYVTEGMRKPAFLSGEQKKAIVDLLFKTNRKVTVKQLKEDYFKKIECFDSVEISGVEDRFNASLGTYHDLLKIIKDKDFLDNEENEDILEDIVLTLTLFEDREMIEERLKTYAHLFDDKVMKQLKRRRYTGWGRLSRKLINGIRDKQSGKTILDFLKSDGFANRNFMQLIHDDSLTFKEDIQKAQVSGQGDSLHEHIANLAGSPAIKKGILQTVKVVDELVKVMGRHKPENIVIEMARENQTTQKGQKNSRERMKRIEEGIKELGSQILKEHPVENTQLQNEKLYLYYLQNGRDMYVDQELDINRLSDYDVDHIVPQSFLKDDSIDNKVLTRSDKARGKSDNVPSEEVVKKMKNYWRQLLNAKLITQRKFDNLTKAERGGLSELDKAGFIKRQLVETRQITKHVAQILDSRMNTKYDENDKLIREVKVITLKSKLVSDFRKDFQFYKVREINNYHHAHDAYLNAVVGTALIKKYPKLESEFVYGDYKVYDVRKMIAKSEQEIGKATAKYFFYSNIMNFFKTEITLANGEIRKRPLIETNGETGEIVWDKGRDFATVRKVLSMPQVNIVKKTEVQTGGFSKESILPKRNSDKLIARKKDWDPKKYGGFDSPTVAYSVLVVAKVEKGKSKKLKSVKELLGITIMERSSFEKNPIDFLEAKGYKEVKKDLIIKLPKYSLFELENGRKRMLASAGELQKGNELALPSKYVNFLYLASHYEKLKGSPEDNEQKQLFVEQHKHYLDEIIEQISEFSKRVILADANLDKVLSAYNKHRDKPIREQAENIIHLFTLTNLGAPAAFKYFDTTIDRKRYTSTKEVLDATLIHQSITGLYETRIDLSQLGGDGGGGGGGSEAAAKGGVLNLEEEYRLHEKPVPSSIDPSWLQLFPTVWAERAGMGLANQVPPVVVELRSGASPVAVRQYPMSKEAREGIRPHIQRFLDLGVLVPCQSPWNTPLLPVKKPGTNDYRPVQDLREINKRVQDIHPTVPNPYNLLSSLPPSHTWYSVLDLKDAFFCLKLHPNSQPLFAFEWRDPEKGNTGQLTWTRLPQGFKNSPTLFNEALHRDLAPFRALNPQVVLLQYVDDLLVAAPTYRDCKEGTQKLLQELSKLGYRVSAKKAQLCQKEVTYLGYLLKEGKRWLTPARKATVMKIPPPTTPRQVREFLGKAGFCRLFIPGFASLAAPLYPLTKPSIPFIWTEEHQKAFDRIKEALLSAPALALPDLTKPFTLYVDERAGVARGVLTQTLGPWRRPVAYLSKKLDPVASGWPTCLKAVAAVALLLKDADKLTLGQNVTVIASHSLESIVRQPPDRWMTNARMTHYQSLLLNERVSFAPPAVLNPATLLPVESEATPVHRCSEILAEETGTRRDLKDQPLPGVPAWYTDGSSFIAEGKRRAGAAIVDGKRTVWASSLPEGTSAQKAELVALTQALRLAEGKDINIYTDSRYAFATAHIHGAIYKQRGWLTSAGKDIKNKEEILALLEAIHLPKRVAIIHCPGHQKGNDPVATGNRRADEAAKQAALSTRVLAETTKPAGKRTADGSEFEKRTADGSEFESPKKKAKVE

SEQ ID NO: 6925 - protein, 2096 aa, synthetic construct; identical to SEQ ID NO: 4519

SEQ ID NO: 6926 - protein, 2095 aa, synthetic construct
MPAAKRVKLDGGDKKYSIGLDIGTNSVGWAVITDEYKVPSKKFKVLGNTDRHSIKKNLIGALLFDSGETAEATRLKRTARRRYTRRKNRICYLQEIFSNEMAKVDDSFFHRLEESFLVEEDKKHERHPIFGNIVDEVAYHEKYPTIYHLRKKLVDSTDKADLRLIYLALAHMIKFRGHFLIEGDLNPDNSDVDKLFIQLVQTYNQLFEENPINASGVDAKAILSARLSKSRRLENLIAQLPGEKKNGLFGNLIALSLGLTPNFKSNFDLAEDAKLQLSKDTYDDDLDNLLAQIGDQYADLFLAAKNLSDAILLSDILRVNTEITKAPLSASMIKRYDEHHQDLTLLKALVRQQLPEKYKEIFFDQSKNGYAGYIDGGASQEEFYKFIKPILEKMDGTEELLVKLNREDLLRKQRTFDNGSIPHQIHLGELHAILRRQEDFYPFLKDNREKIEKILTFRIPYYVGPLARGNSRFAWMTRKSEETITPWNFEEVVDKGASAQSFIERMTNFDKNLPNEKVLPKHSLLYEYFTVYNELTKVKYVTEGMRKPAFLSGEQKKAIVDLLFKTNRKVTVKQLKEDYFKKIECFDSVEISGVEDRFNASLGTYHDLLKIIKDKDFLDNEENEDILEDIVLTLTLFEDREMIEERLKTYAHLFDDKVMKQLKRRRYTGWGRLSRKLINGIRDKQSGKTILDFLKSDGFANRNFMQLIHDDSLTFKEDIQKAQVSGQGDSLHEHIANLAGSPAIKKGILQTVKVVDELVKVMGRHKPENIVIEMARENQTTQKGQKNSRERMKRIEEGIKELGSQILKEHPVENTQLQNEKLYLYYLQNGRDMYVDQELDINRLSDYDVDHIVPQSFLKDDSIDNKVLTRSDKARGKSDNVPSEEVVKKMKNYWRQLLNAKLITQRKFDNLTKAERGGLSELDKAGFIKRQLVETRQITKHVAQILDSRMNTKYDENDKLIREVKVITLKSKLVSDFRKDFQFYKVREINNYHHAHDAYLNAVVGTALIKKYPKLESEFVYGDYKVYDVRKMIAKSEQEIGKATAKYFFYSNIMNFFKTEITLANGEIRKRPLIETNGETGEIVWDKGRDFATVRKVLSMPQVNIVKKTEVQTGGFSKESILPKRNSDKLIARKKDWDPKKYGGFDSPTVAYSVLVVAKVEKGKSKKLKSVKELLGITIMERSSFEKNPIDFLEAKGYKEVKKDLIIKLPKYSLFELENGRKRMLASAGELQKGNELALPSKYVNFLYLASHYEKLKGSPEDNEQKQLFVEQHKHYLDEIIEQISEFSKRVILADANLDKVLSAYNKHRDKPIREQAENIIHLFTLTNLGAPAAFKYFDTTIDRKRYTSTKEVLDATLIHQSITGLYETRIDLSQLGGDGGGGGEAAAKGGSGGTLQLEEEYRLFEPESTQKQEMDIWLKNFPQAWAETGGMGTAHCQAPVLIQLKATATPISIRQYPMPHEAYQGIKPHIRRMLDQGILKPCQSPWNTPLLPVKKPGTEDYRPVQDLREVNKRVEDIHPTVPNPYNLLSTLPPSHPWYTVLDLKDAFFCLRLHSESQLLFAFEWRDPEIGLSGQLTWTRLPQGFKNSPTLFNEALHSDLADFRVRYPALVLLQYVDDLLLAAATRTECLEGTKALLETLGNKGYRASAKKAQICLQEVTYLGYSLKDGQRWLTKARKEAILSIPVPKNSRQVREFLGTAGYCRLWIPGFAELAAPLYPLTRPGTLFQWGTEQQLAFEDIKKALLSSPALGLPDITKPFELFIDENSGFAKGVLVQKLGPWKRPVAYLSKKLDTVASGWPPCLRMVAAIAILVKDAGKLTLGQPLTILTSHPVEALVRQPPNKWLSNARMTHYQAMLLDAERVHFGPTVSLNPATLLPLPSGGNHHDCLQILAETHGTRPDLTDQPLPDADLTWYTDGSSFIRNGEREAGAAVTTESEVIWAAPLPPGTSAQRAELIALTQALKMAEGKKLTVYTDSRYAFATTHVHGEIYRRRGWLTSEGKEIKNKNEILALLEALFLPKRLSIIHCPGHQKGDSPQAKGNRLADDTAKKAATETHSSLTVLPAGKRTADGSEFEKRTADGSEFESPKKKAKVE

SEQ ID NO: 6927 - protein, 2094 aa, synthetic construct
MPAAKRVKLDGGDKKYSIGLDIGTNSVGWAVITDEYKVPSKKFKVLGNTDRHSIKKNLIGALLFDSGETAEATRLKRTARRRYTRRKNRICYLQEIFSNEMAKVDDSFFHRLEESFLVEEDKKHERHPIFGNIVDEVAYHEKYPTIYHLRKKLVDSTDKADLRLIYLALAHMIKFRGHFLIEGDLNPDNSDVDKLFIQLVQTYNQLFEENPINASGVDAKAILSARLSKSRRLENLIAQLPGEKKNGLFGNLIALSLGLTPNFKSNFDLAEDAKLQLSKDTYDDDLDNLLAQIGDQYADLFLAAKNLSDAILLSDILRVNTEITKAPLSASMIKRYDEHHQDLTLLKALVRQQLPEKYKEIFFDQSKNGYAGYIDGGASQEEFYKFIKPILEKMDGTEELLVKLNREDLLRKQRTFDNGSIPHQIHLGELHAILRRQEDFYPFLKDNREKIEKILTFRIPYYVGPLARGNSRFAWMTRKSEETITPWNFEEVVDKGASAQSFIERMTNFDKNLPNEKVLPKHSLLYEYFTVYNELTKVKYVTEGMRKPAFLSGEQKKAIVDLLFKTNRKVTVKQLKEDYFKKIECFDSVEISGVEDRFNASLGTYHDLLKIIKDKDFLDNEENEDILEDIVLTLTLFEDREMIEERLKTYAHLFDDKVMKQLKRRRYTGWGRLSRKLINGIRDKQSGKTILDFLKSDGFANRNFMQLIHDDSLTFKEDIQKAQVSGQGDSLHEHIANLAGSPAIKKGILQTVKVVDELVKVMGRHKPENIVIEMARENQTTQKGQKNSRERMKRIEEGIKELGSQILKEHPVENTQLQNEKLYLYYLQNGRDMYVDQELDINRLSDYDVDHIVPQSFLKDDSIDNKVLTRSDKARGKSDNVPSEEVVKKMKNYWRQLLNAKLITQRKFDNLTKAERGGLSELDKAGFIKRQLVETRQITKHVAQILDSRMNTKYDENDKLIREVKVITLKSKLVSDFRKDFQFYKVREINNYHHAHDAYLNAVVGTALIKKYPKLESEFVYGDYKVYDVRKMIAKSEQEIGKATAKYFFYSNIMNFFKTEITLANGEIRKRPLIETNGETGEIVWDKGRDFATVRKVLSMPQVNIVKKTEVQTGGFSKESILPKRNSDKLIARKKDWDPKKYGGFDSPTVAYSVLVVAKVEKGKSKKLKSVKELLGITIMERSSFEKNPIDFLEAKGYKEVKKDLIIKLPKYSLFELENGRKRMLASAGELQKGNELALPSKYVNFLYLASHYEKLKGSPEDNEQKQLFVEQHKHYLDEIIEQISEFSKRVILADANLDKVLSAYNKHRDKPIREQAENIIHLFTLTNLGAPAAFKYFDTTIDRKRYTSTKEVLDATLIHQSITGLYETRIDLSQLGGDGGGGGEAAAKGGSGGVLNLEEEYRLHEKPVPSSIDPSWLQLFPTVWAERAGMGLANQVPPVVVELRSGASPVAVRQYPMSKEAREGIRPHIQKFLDLGVLVPCRSPWNTPLLPVKKPGTNDYRPVQDLREINKRVQDIHPTVPNPYNLLSSLPPSYTWYSVLDLKDAFFCLRLHPNSQPLFAFEWKDPEKGNTGQLTWTRLPQGFKNSPTLFNEALHRDLAPFRALNPQVVLLQYVDDLLVAAPTYEDCKKGTQKLLQELSKLGYRVSAKKAQLCQREVTYLGYLLKEGKRWLTPARKATVMKIPVPTTPRQVREFLGKAGFCRLFIPGFASLAAPLYPLTKPSIPFIWTEEHQQAFDHIKKALLSAPALALPDLTKPFTLYIDERAGVARGVLTQTLGPWRRPVAYLSKKLDPVASGWPTCLKAVAAVALLLKDADKLTLGQNVTVIASHSLESIVRQPPDRWMTNARMTHYQSLLLNERVSFAPPAVLNPATLLPVESEATPVHRCSEILAEETGTRRDLEDQPLPGVPTWYTDGSSFITEGKRRAGAPIVDGKRTVWASSLPEGTSAQKAELVALTQALRLAEGKNINIYTDSRYAFATAHIHGAIYKQRGWLTSAGKDIKNKEEILALLEAIHLPRRVAIIHCPGHQRGSNPVATGNRRADEAAKQAALSTRVLAGTTKPAGKRTADGSEFEKRTADGSEFESPKKKAKVE

SEQ ID NO: 6928 - protein, 2218 aa, synthetic construct
MPAAKRVKLDGGDKKYSIGLDIGTNSVGWAVITDEYKVPSKKFKVLGNTDRHSIKKNLIGALLFDSGETAEATRLKRTARRRYTRRKNRICYLQEIFSNEMAKVDDSFFHRLEESFLVEEDKKHERHPIFGNIVDEVAYHEKYPTIYHLRKKLVDSTDKADLRLIYLALAHMIKFRGHFLIEGDLNPDNSDVDKLFIQLVQTYNQLFEENPINASGVDAKAILSARLSKSRRLENLIAQLPGEKKNGLFGNLIALSLGLTPNFKSNFDLAEDAKLQLSKDTYDDDLDNLLAQIGDQYADLFLAAKNLSDAILLSDILRVNTEITKAPLSASMIKRYDEHHQDLTLLKALVRQQLPEKYKEIFFDQSKNGYAGYIDGGASQEEFYKFIKPILEKMDGTEELLVKLNREDLLRKQRTFDNGSIPHQIHLGELHAILRRQEDFYPFLKDNREKIEKILTFRIPYYVGPLARGNSRFAWMTRKSEETITPWNFEEVVDKGASAQSFIERMTNFDKNLPNEKVLPKHSLLYEYFTVYNELTKVKYVTEGMRKPAFLSGEQKKAIVDLLFKTNRKVTVKQLKEDYFKKIECFDSVEISGVEDRFNASLGTYHDLLKIIKDKDFLDNEENEDILEDIVLTLTLFEDREMIEERLKTYAHLFDDKVMKQLKRRRYTGWGRLSRKLINGIRDKQSGKTILDFLKSDGFANRNFMQLIHDDSLTFKEDIQKAQVSGQGDSLHEHIANLAGSPAIKKGILQTVKVVDELVKVMGRHKPENIVIEMARENQTTQKGQKNSRERMKRIEEGIKELGSQILKEHPVENTQLQNEKLYLYYLQNGRDMYVDQELDINRLSDYDVDHIVPQSFLKDDSIDNKVLTRSDKARGKSDNVPSEEVVKKMKNYWRQLLNAKLITQRKFDNLTKAERGGLSELDKAGFIKRQLVETRQITKHVAQILDSRMNTKYDENDKLIREVKVITLKSKLVSDFRKDFQFYKVREINNYHHAHDAYLNAVVGTALIKKYPKLESEFVYGDYKVYDVRKMIAKSEQEIGKATAKYFFYSNIMNFFKTEITLANGEIRKRPLIETNGETGEIVWDKGRDFATVRKVLSMPQVNIVKKTEVQTGGFSKESILPKRNSDKLIARKKDWDPKKYGGFDSPTVAYSVLVVAKVEKGKSKKLKSVKELLGITIMERSSFEKNPIDFLEAKGYKEVKKDLIIKLPKYSLFELENGRKRMLASAGELQKGNELALPSKYVNFLYLASHYEKLKGSPEDNEQKQLFVEQHKHYLDEIIEQISEFSKRVILADANLDKVLSAYNKHRDKPIREQAENIIHLFTLTNLGAPAAFKYFDTTIDRKRYTSTKEVLDATLIHQSITGLYETRIDLSQLGGDGGGGGEAAAKGGSGGTLGDQGSRGSDPLPEPRVTLTVEGIPTEFLVNTGAEHSVLTKPMGKMGSKRTVVAGATGSKVYPWTTKRLLKIGQKQVTHSFLVIPECPAPLLGRDLLTKLKAQIQFSTEGPQVTWEDRPAMCLVLNLEEEYRLHEKPVPPSIDPSWLQLFPMVWAEKAGMGLANQVPPVVVELKSDASPVAVRQYPMSKEAREGIRPHIQRFLDLGILVPCQSPWNTPLLPVKKPGTNDYRPVQDLREVNKRVQDIHPTVPNPYNLLSSLPPSHTWYSVLDLKDAFFCLKLHPNSQPLFAFEWRDPEKGNTGQLTWTRLPQGFKNSPTLFNEALHRDLASFRALNPQVVMLQYVDDLLVAAPTYRDCKEGTRRLLQELSKLGYRVSAKKAQLCREEVTYLGYLLKGGKRWLTPARKATVMKIPTPTTPRQVREFLGTAGFCRLWIPGFASLAAPLYPLTRPKVPFTWTEAHQEAFGRIKEALLSAPALALPDLTKPFALYVDEKEGVARGVLTQTLGPWRRPVAYLSKKLDPVASGWPTCLKAIAAVALLLKDADKLTLGQNVLVIAPHNLESIVRQPPDRWMTNARMTHYQSLLLNERVSFAPPAILNPATLLPVESDDTPIHICSEILAEETGTRPDLRDQPLPGVPAWYTDGSSFIMDGRRQAGAAIVDNKRTVWASNLPEGTSAQKAELIALTQALRLAEGKSINIYTDSRYAFATAHVHGAIYKQRGWLTSAGKDIKNKEEILALLEAIHLPKRVAIIHCPGHQRGTDPVATGNRKADEAAKQAAQSTRILTETTKNAGKRTADGSEFEKRTADGSEFESPKKKAKVE

SEQ ID NO: 6929 - protein, 2096 aa, synthetic construct
MPAAKRVKLDGGDKKYSIGLDIGTNSVGWAVITDEYKVPSKKFKVLGNTDRHSIKKNLIGALLFDSGETAEATRLKRTARRRYTRRKNRICYLQEIFSNEMAKVDDSFFHRLEESFLVEEDKKHERHPIFGNIVDEVAYHEKYPTIYHLRKKLVDSTDKADLRLIYLALAHMIKFRGHFLIEGDLNPDNSDVDKLFIQLVQTYNQLFEENPINASGVDAKAILSARLSKSRRLENLIAQLPGEKKNGLFGNLIALSLGLTPNFKSNFDLAEDAKLQLSKDTYDDDLDNLLAQIGDQYADLFLAAKNLSDAILLSDILRVNTEITKAPLSASMIKRYDEHHQDLTLLKALVRQQLPEKYKEIFFDQSKNGYAGYIDGGASQEEFYKFIKPILEKMDGTEELLVKLNREDLLRKQRTFDNGSIPHQIHLGELHAILRRQEDFYPFLKDNREKIEKILTFRIPYYVGPLARGNSRFAWMTRKSEETITPWNFEEVVDKGASAQSFIERMTNFDKNLPNEKVLPKHSLLYEYFTVYNELTKVKYVTEGMRKPAFLSGEQKKAIVDLLFKTNRKVTVKQLKEDYFKKIECFDSVEISGVEDRFNASLGTYHDLLKIIKDKDFLDNEENEDILEDIVLTLTLFEDREMIEERLKTYAHLFDDKVMKQLKRRRYTGWGRLSRKLINGIRDKQSGKTILDFLKSDGFANRNFMQLIHDDSLTFKEDIQKAQVSGQGDSLHEHIANLAGSPAIKKGILQTVKVVDELVKVMGRHKPENIVIEMARENQTTQKGQKNSRERMKRIEEGIKELGSQILKEHPVENTQLQNEKLYLYYLQNGRDMYVDQELDINRLSDYDVDHIVPQSFLKDDSIDNKVLTRSDKARGKSDNVPSEEVVKKMKNYWRQLLNAKLITQRKFDNLTKAERGGLSELDKAGFIKRQLVETRQITKHVAQILDSRMNTKYDENDKLIREVKVITLKSKLVSDFRKDFQFYKVREINNYHHAHDAYLNAVVGTALIKKYPKLESEFVYGDYKVYDVRKMIAKSEQEIGKATAKYFFYSNIMNFFKTEITLANGEIRKRPLIETNGETGEIVWDKGRDFATVRKVLSMPQVNIVKKTEVQTGGFSKESILPKRNSDKLIARKKDWDPKKYGGFDSPTVAYSVLVVAKVEKGKSKKLKSVKELLGITIMERSSFEKNPIDFLEAKGYKEVKKDLIIKLPKYSLFELENGRKRMLASAGELQKGNELALPSKYVNFLYLASHYEKLKGSPEDNEQKQLFVEQHKHYLDEIIEQISEFSKRVILADANLDKVLSAYNKHRDKPIREQAENIIHLFTLTNLGAPAAFKYFDTTIDRKRYTSTKEVLDATLIHQSITGLYETRIDLSQLGGDGGGGGEAAAKGGSGGTLNIEDEYRLHETSKGPDVPLGSTWLSDFPQAWAETGGMGLAFRQAPLIISLKATSTPVSIKQYPMSQEARLGIKPHIQRLLDQGILVPCQSPWNTPLLPVKKPGTNDYRPVQDLREVNKRVEDIHPTVPNPYNLLSGLPPSHQWYTVLDLKDAFFCLRLHPTSQSLFAFEWKDPEMGISGQLTWTRLPQGFKNSPTLFNEALHRDLADFRIQHPDLILLQYVDDLLLAATSELDCQQGTRALLQTLGDLGYRASAKKAQICQKQVKYLGYLLKEGQRWLTEARKETVMGQPTPKTPRQLREFLGKAGLCRLFIPGFAEMAAPLYPLTKPGTLFKWGPDQQKAYQEIKQALLTAPALGLPDLTKPFELFVDEKQGYAKGVLTQKLGPWRRPVAYLSKKLDPVAAGWPPCLRMVAAIAVLTKDVGKLTMGQPLVILAPHAVEALVKQPPDRWLSNARMTHYQALLLDTDRVQFGPIVALNPATLLPLPEEGLQHDCLDILAEAHGTRPDLTDQPLPDADHTWYTDGSSFLQEGQRRAGAAVTTETEVIWAKALPAGTSAQRAELIALTQALKMAAGKKLNVYTDSRYAFATAHIHGEIYRRRGWLTSEGKEIKNKDEILALLKALFLPKRLSIIHCPGHQKGNHAEARGNRMADQAAREVATRETPETSTLLAGKRTADGSEFEKRTADGSEFESPKKKAKVE

SEQ ID NO: 6930 - protein, 2096 aa, synthetic construct
MPAAKRVKLDGGDKKYSIGLDIGTNSVGWAVITDEYKVPSKKFKVLGNTDRHSIKKNLIGALLFDSGETAEATRLKRTARRRYTRRKNRICYLQEIFSNEMAKVDDSFFHRLEESFLVEEDKKHERHPIFGNIVDEVAYHEKYPTIYHLRKKLVDSTDKADLRLIYLALAHMIKFRGHFLIEGDLNPDNSDVDKLFIQLVQTYNQLFEENPINASGVDAKAILSARLSKSRRLENLIAQLPGEKKNGLFGNLIALSLGLTPNFKSNFDLAEDAKLQLSKDTYDDDLDNLLAQIGDQYADLFLAAKNLSDAILLSDILRVNTEITKAPLSASMIKRYDEHHQDLTLLKALVRQQLPEKYKEIFFDQSKNGYAGYIDGGASQEEFYKFIKPILEKMDGTEELLVKLNREDLLRKQRTFDNGSIPHQIHLGELHAILRRQEDFYPFLKDNREKIEKILTFRIPYYVGPLARGNSRFAWMTRKSEETITPWNFEEVVDKGASAQSFIERMTNFDKNLPNEKVLPKHSLLYEYFTVYNELTKVKYVTEGMRKPAFLSGEQKKAIVDLLFKTNRKVTVKQLKEDYFKKIECFDSVEISGVEDRFNASLGTYHDLLKIIKDKDFLDNEENEDILEDIVLTLTLFEDREMIEERLKTYAHLFDDKVMKQLKRRRYTGWGRLSRKLINGIRDKQSGKTILDFLKSDGFANRNFMQLIHDDSLTFKEDIQKAQVSGQGDSLHEHIANLAGSPAIKKGILQTVKVVDELVKVMGRHKPENIVIEMARENQTTQKGQKNSRERMKRIEEGIKELGSQILKEHPVENTQLQNEKLYLYYLQNGRDMYVDQELDINRLSDYDVDHIVPQSFLKDDSIDNKVLTRSDKARGKSDNVPSEEVVKKMKNYWRQLLNAKLITQRKFDNLTKAERGGLSELDKAGFIKRQLVETRQITKHVAQILDSRMNTKYDENDKLIREVKVITLKSKLVSDFRKDFQFYKVREINNYHHAHDAYLNAVVGTALIKKYPKLESEFVYGDYKVYDVRKMIAKSEQEIGKATAKYFFYSNIMNFFKTEITLANGEIRKRPLIETNGETGEIVWDKGRDFATVRKVLSMPQVNIVKKTEVQTGGFSKESILPKRNSDKLIARKKDWDPKKYGGFDSPTVAYSVLVVAKVEKGKSKKLKSVKELLGITIMERSSFEKNPIDFLEAKGYKEVKKDLIIKLPKYSLFELENGRKRMLASAGELQKGNELALPSKYVNFLYLASHYEKLKGSPEDNEQKQLFVEQHKHYLDEIIEQISEFSKRVILADANLDKVLSAYNKHRDKPIREQAENIIHLFTLTNLGAPAAFKYFDTTIDRKRYTSTKEVLDATLIHQSITGLYETRIDLSQLGGDGGGGGEAAAKGGSGGTLNIEDEYRLHETSKGPDVPLGSTWLSDFPQAWAETGGMGLAVRQAPLIIPLKATSTPVSIKQYPMSQEARLGIKPHIQRLLDQGILVPCQSPWNTPLLPVKKPGTNDYRPVQDLREVNKRVEDIHPTVPNPYNLLSGLPPSHQWYTVLDLKDAFFCLRLHPTSQSLFAFEWRDPEMGISGQLTWTRLPQGFKNSPTLFNEALHRDLADFRIQHPDLILLQYVDDLLLAATSELDCQQGTRALLQTLGDLGYRASAKKAQICQKQVKYLGYLLKEGQRWLTEARKETVMGQPTPKTPRQLREFLGTAGFCRLWIPGFAEMAAPLYPLTKPGTLFEWGPDQQKAYQEIKQALLTAPALGLPDLTKPFELFVDEKQGYAKGVLTQKLGPWRRPVAYLSKKLDPVAAGWPPCLRMVAAIAVLTKDAGKLTMGQPLVILAPHAVEALVKQPPDRWLSNARMTHYQALLLDTDRVQFGPIVALNPATLLPLPEEGLQHDCLDILAEAHGTRPDLTDQPLPDADHTWYTDGSSFLQEGQRKAGAAVTTETEVVWAKALPAGTSAQRAELIALTQALKMAEGKKLNVYTDSRYAFATAHIHGEIYRRRGWLTSEGKEIKNKDEILALLKALFLPKRLSIIHCPGHQKGNRAEARGNRMADQAAREVATRETPETSTLLAGKRTADGSEFEKRTADGSEFESPKKKAKVE

SEQ ID NO: 6931 - protein, 2090 aa, synthetic construct
MPAAKRVKLDGGDKKYSIGLDIGTNSVGWAVITDEYKVPSKKFKVLGNTDRHSIKKNLIGALLFDSGETAEATRLKRTARRRYTRRKNRICYLQEIFSNEMAKVDDSFFHRLEESFLVEEDKKHERHPIFGNIVDEVAYHEKYPTIYHLRKKLVDSTDKADLRLIYLALAHMIKFRGHFLIEGDLNPDNSDVDKLFIQLVQTYNQLFEENPINASGVDAKAILSARLSKSRRLENLIAQLPGEKKNGLFGNLIALSLGLTPNFKSNFDLAEDAKLQLSKDTYDDDLDNLLAQIGDQYADLFLAAKNLSDAILLSDILRVNTEITKAPLSASMIKRYDEHHQDLTLLKALVRQQLPEKYKEIFFDQSKNGYAGYIDGGASQEEFYKFIKPILEKMDGTEELLVKLNREDLLRKQRTFDNGSIPHQIHLGELHAILRRQEDFYPFLKDNREKIEKILTFRIPYYVGPLARGNSRFAWMTRKSEETITPWNFEEVVDKGASAQSFIERMTNFDKNLPNEKVLPKHSLLYEYFTVYNELTKVKYVTEGMRKPAFLSGEQKKAIVDLLFKTNRKVTVKQLKEDYFKKIECFDSVEISGVEDRFNASLGTYHDLLKIIKDKDFLDNEENEDILEDIVLTLTLFEDREMIEERLKTYAHLFDDKVMKQLKRRRYTGWGRLSRKLINGIRDKQSGKTILDFLKSDGFANRNFMQLIHDDSLTFKEDIQKAQVSGQGDSLHEHIANLAGSPAIKKGILQTVKVVDELVKVMGRHKPENIVIEMARENQTTQKGQKNSRERMKRIEEGIKELGSQILKEHPVENTQLQNEKLYLYYLQNGRDMYVDQELDINRLSDYDVDHIVPQSFLKDDSIDNKVLTRSDKARGKSDNVPSEEVVKKMKNYWRQLLNAKLITQRKFDNLTKAERGGLSELDKAGFIKRQLVETRQITKHVAQILDSRMNTKYDENDKLIREVKVITLKSKLVSDFRKDFQFYKVREINNYHHAHDAYLNAVVGTALIKKYPKLESEFVYGDYKVYDVRKMIAKSEQEIGKATAKYFFYSNIMNFFKTEITLANGEIRKRPLIETNGETGEIVWDKGRDFATVRKVLSMPQVNIVKKTEVQTGGFSKESILPKRNSDKLIARKKDWDPKKYGGFDSPTVAYSVLVVAKVEKGKSKKLKSVKELLGITIMERSSFEKNPIDFLEAKGYKEVKKDLIIKLPKYSLFELENGRKRMLASAGELQKGNELALPSKYVNFLYLASHYEKLKGSPEDNEQKQLFVEQHKHYLDEIIEQISEFSKRVILADANLDKVLSAYNKHRDKPIREQAENIIHLFTLTNLGAPAAFKYFDTTIDRKRYTSTKEVLDATLIHQSITGLYETRIDLSQLGGDGGGGGEAAAKGGSGGTLQLDDEYRLYSPLVKPDQNIQFWLEQFPQAWAETAGMGLAKQVPPQVIQLKASATPVSVRQYPLSKEAQEGIRPHVQRLIQQGILVPVQSPWNTPLLPVRKPGTNDYRPVQDLREVNKRVQDIHPTVPNPYNLLCALPPQRSWYTVLDLKDAFFCLRLHPTSQPLFAFEWRDPGTGRTGQLTWTRLPQGFKNSPTIFDEALHRDLANFRIQHPQVTLLQYVDDLLLAGATKQDCLEGTKALLLELSDLGYRASAKKAQICRREVTYLGYSLRDGQRWLTEARKKTVVQIPAPTTAKQVREFLGTAGFCRLWIPGFATLAAPLYPLTKEKGEFSWAPEHQKAFDAIKKALLSAPALALPDVTKPFTLYVDERKGVARGVLTQTLGPWRRPVAYLSKKLDPVASGWPVCLKAIAAVAILVKDADKLTLGQNITVIAPHALENIVRQPPDRWMTNARMTHYQSLLLTERVTFAPPAALNPATLLPEETDEPVTHDCHQLLIEETGVRKDLTDIPLTGEVLTWFTDGSSYVVEGKRMAGAAVVDGTRTIWASSLPEGTSAQKAELMALTQALRLAEGKSINIYTDSRYAFATAHVHGAIYKQRGLLTSAGREIKNKEEILSLLEALHLPKRLAIIHCPGHQKAKDPISRGNQMADRVAKQAAQGVNLLAGKRTADGSEFEKRTADGSEFESPKKKAKVE

SEQ ID NO: 6932 - protein, 2087 aa, synthetic construct
MPAAKRVKLDGGDKKYSIGLDIGTNSVGWAVITDEYKVPSKKFKVLGNTDRHSIKKNLIGALLFDSGETAEATRLKRTARRRYTRRKNRICYLQEIFSNEMAKVDDSFFHRLEESFLVEEDKKHERHPIFGNIVDEVAYHEKYPTIYHLRKKLVDSTDKADLRLIYLALAHMIKFRGHFLIEGDLNPDNSDVDKLFIQLVQTYNQLFEENPINASGVDAKAILSARLSKSRRLENLIAQLPGEKKNGLFGNLIALSLGLTPNFKSNFDLAEDAKLQLSKDTYDDDLDNLLAQIGDQYADLFLAAKNLSDAILLSDILRVNTEITKAPLSASMIKRYDEHHQDLTLLKALVRQQLPEKYKEIFFDQSKNGYAGYIDGGASQEEFYKFIKPILEKMDGTEELLVKLNREDLLRKQRTFDNGSIPHQIHLGELHAILRRQEDFYPFLKDNREKIEKILTFRIPYYVGPLARGNSRFAWMTRKSEETITPWNFEEVVDKGASAQSFIERMTNFDKNLPNEKVLPKHSLLYEYFTVYNELTKVKYVTEGMRKPAFLSGEQKKAIVDLLFKTNRKVTVKQLKEDYFKKIECFDSVEISGVEDRFNASLGTYHDLLKIIKDKDFLDNEENEDILEDIVLTLTLFEDREMIEERLKTYAHLFDDKVMKQLKRRRYTGWGRLSRKLINGIRDKQSGKTILDFLKSDGFANRNFMQLIHDDSLTFKEDIQKAQVSGQGDSLHEHIANLAGSPAIKKGILQTVKVVDELVKVMGRHKPENIVIEMARENQTTQKGQKNSRERMKRIEEGIKELGSQILKEHPVENTQLQNEKLYLYYLQNGRDMYVDQELDINRLSDYDVDHIVPQSFLKDDSIDNKVLTRSDKARGKSDNVPSEEVVKKMKNYWRQLLNAKLITQRKFDNLTKAERGGLSELDKAGFIKRQLVETRQITKHVAQILDSRMNTKYDENDKLIREVKVITLKSKLVSDFRKDFQFYKVREINNYHHAHDAYLNAVVGTALIKKYPKLESEFVYGDYKVYDVRKMIAKSEQEIGKATAKYFFYSNIMNFFKTEITLANGEIRKRPLIETNGETGEIVWDKGRDFATVRKVLSMPQVNIVKKTEVQTGGFSKESILPKRNSDKLIARKKDWDPKKYGGFDSPTVAYSVLVVAKVEKGKSKKLKSVKELLGITIMERSSFEKNPIDFLEAKGYKEVKKDLIIKLPKYSLFELENGRKRMLASAGELQKGNELALPSKYVNFLYLASHYEKLKGSPEDNEQKQLFVEQHKHYLDEIIEQISEFSKRVILADANLDKVLSAYNKHRDKPIREQAENIIHLFTLTNLGAPAAFKYFDTTIDRKRYTSTKEVLDATLIHQSITGLYETRIDLSQLGGDGGGGGEAAAKGGSGGIPWLMKKPLQLTTLVPLQEYEERLLKQTMLTGSYKEKLQSLFLKYDALWQHWENQVGHRRIKPHHIATGTVNPRPQKQYPINPKAKASIQTVINDLLKQGVLIQQNSIMNTPVYPVPKPDGKWRMVLDYREVNKTIPLIAAQNQHSAGILSSIFRGKYKTTLDLSNGFWAHSITPESYWLTAFTWLGQQYCWTRLPQGFLNSPALFNADVVDLLKEVPNVQVYVDDIYISHDDPREHLEQLEKVFSLLLNAGYVVSLKKSEIAQHEVEFLGFNITKEGRGLTETFKQKLLNITPPRDLKQLQSILGLLNFARNFIPNFSELVKPLYNIIATAPGKYITWTTDNSQQLQNIISMLNSAENLEERNPEVRLIMKVNTSPSAGYIRFYNEFAKRPIMYLNYVYTKAEVKFTNTEKLLTTIHKGLIKALDLGMGQEILVYSPIVSMTKIQKTPLPERKALPIRWITWMSYLEDPRIQFHYDKTLPELQQVPTVTDDIIAKIKHPSEFSMVFYTDGSAIKHPNVNKSHNAGMGIAQVQFKPEFTVINTWSIPLGDHTAQLAEVAAVEFACKKALKIDGPVLIVTDSFYVAESVNKELPYWQSNGFFNNKKKPLKHVSKWKSIADCIQLKPDIIIIHEKGHQPTASTFHTEGNNLADKLATQGSYVVNAGKRTADGSEFEKRTADGSEFESPKKKAKVE

SEQ ID NO: 6933 - protein, 2098 aa, synthetic construct
MPAAKRVKLDGGDKKYSIGLDIGTNSVGWAVITDEYKVPSKKFKVLGNTDRHSIKKNLIGALLFDSGETAEATRLKRTARRRYTRRKNRICYLQEIFSNEMAKVDDSFFHRLEESFLVEEDKKHERHPIFGNIVDEVAYHEKYPTIYHLRKKLVDSTDKADLRLIYLALAHMIKFRGHFLIEGDLNPDNSDVDKLFIQLVQTYNQLFEENPINASGVDAKAILSARLSKSRRLENLIAQLPGEKKNGLFGNLIALSLGLTPNFKSNFDLAEDAKLQLSKDTYDDDLDNLLAQIGDQYADLFLAAKNLSDAILLSDILRVNTEITKAPLSASMIKRYDEHHQDLTLLKALVRQQLPEKYKEIFFDQSKNGYAGYIDGGASQEEFYKFIKPILEKMDGTEELLVKLNREDLLRKQRTFDNGSIPHQIHLGELHAILRRQEDFYPFLKDNREKIEKILTFRIPYYVGPLARGNSRFAWMTRKSEETITPWNFEEVVDKGASAQSFIERMTNFDKNLPNEKVLPKHSLLYEYFTVYNELTKVKYVTEGMRKPAFLSGEQKKAIVDLLFKTNRKVTVKQLKEDYFKKIECFDSVEISGVEDRFNASLGTYHDLLKIIKDKDFLDNEENEDILEDIVLTLTLFEDREMIEERLKTYAHLFDDKVMKQLKRRRYTGWGRLSRKLINGIRDKQSGKTILDFLKSDGFANRNFMQLIHDDSLTFKEDIQKAQVSGQGDSLHEHIANLAGSPAIKKGILQTVKVVDELVKVMGRHKPENIVIEMARENQTTQKGQKNSRERMKRIEEGIKELGSQILKEHPVENTQLQNEKLYLYYLQNGRDMYVDQELDINRLSDYDVDHIVPQSFLKDDSIDNKVLTRSDKARGKSDNVPSEEVVKKMKNYWRQLLNAKLITQRKFDNLTKAERGGLSELDKAGFIKRQLVETRQITKHVAQILDSRMNTKYDENDKLIREVKVITLKSKLVSDFRKDFQFYKVREINNYHHAHDAYLNAVVGTALIKKYPKLESEFVYGDYKVYDVRKMIAKSEQEIGKATAKYFFYSNIMNFFKTEITLANGEIRKRPLIETNGETGEIVWDKGRDFATVRKVLSMPQVNIVKKTEVQTGGFSKESILPKRNSDKLIARKKDWDPKKYGGFDSPTVAYSVLVVAKVEKGKSKKLKSVKELLGITIMERSSFEKNPIDFLEAKGYKEVKKDLIIKLPKYSLFELENGRKRMLASAGELQKGNELALPSKYVNFLYLASHYEKLKGSPEDNEQKQLFVEQHKHYLDEIIEQISEFSKRVILADANLDKVLSAYNKHRDKPIREQAENIIHLFTLTNLGAPAAFKYFDTTIDRKRYTSTKEVLDATLIHQSITGLYETRIDLSQLGGDGGEAAAKGGSGGGGGTAPLEEEYRLFLEAPIQNVTLLEQWKREIPKVWAEINPPGLASTQAPIHVQLLSTALPVRVRQYPITLEAKRSLRETIRKFRAAGILRPVHSPWNTPLLPVRKSGTSEYRMVQDLREVNKRVETIHPTVPNPYTLLSLLPPDRIWYSVLDLKDAFFCIPLAPESQLIFAFEWADAEEGESGQLTWTRLPQGFKNSPTLFNEALNRDLQGFRLDHPSVSLLQYVDDLLIAADTQAACLSATRDLLMTLAELGYRVSGKKAQLCQEEVTYLGFKIHKGSRSLSNSRTQAILQIPVPKTKRQVREFLGTIGYCRLWIPGFAELAQPLYAATRPGNDPLVWGEKEEEAFQSLKLALTQPPALALPSLDKPFQLFVEETSGAAKGVLTQALGPWKRPVAYLSKRLDPVAAGWPRCLRAIAAAALLTREASKLTFGQDIEITSSHNLESLLRSPPDKWLTNARITQYQVLLLDPPRVRFKQTAALNPATLLPETDDTLPIHHCLDTLDSLTSTRPDLTDQPLAQAEATLFTDGSSYIRDGKRYAGAAVVTLDSVIWAEPLPIGTSAQKAELIALTKALEWSKDKSVNIYTDSRYAFATLHVHGMIYRERGWLTAGGKAIKNAPEILALLTAVWLPKRVAVMHCKGHQKDDAPTSTGNRRADEVAREVAIRPLSTQATISAGKRTADGSEFEKRTADGSEFESPKKKAKVE

SEQ ID NO: 6934 - protein, 2102 aa, synthetic construct
MPAAKRVKLDGGDKKYSIGLDIGTNSVGWAVITDEYKVPSKKFKVLGNTDRHSIKKNLIGALLFDSGETAEATRLKRTARRRYTRRKNRICYLQEIFSNEMAKVDDSFFHRLEESFLVEEDKKHERHPIFGNIVDEVAYHEKYPTIYHLRKKLVDSTDKADLRLIYLALAHMIKFRGHFLIEGDLNPDNSDVDKLFIQLVQTYNQLFEENPINASGVDAKAILSARLSKSRRLENLIAQLPGEKKNGLFGNLIALSLGLTPNFKSNFDLAEDAKLQLSKDTYDDDLDNLLAQIGDQYADLFLAAKNLSDAILLSDILRVNTEITKAPLSASMIKRYDEHHQDLTLLKALVRQQLPEKYKEIFFDQSKNGYAGYIDGGASQEEFYKFIKPILEKMDGTEELLVKLNREDLLRKQRTFDNGSIPHQIHLGELHAILRRQEDFYPFLKDNREKIEKILTFRIPYYVGPLARGNSRFAWMTRKSEETITPWNFEEVVDKGASAQSFIERMTNFDKNLPNEKVLPKHSLLYEYFTVYNELTKVKYVTEGMRKPAFLSGEQKKAIVDLLFKTNRKVTVKQLKEDYFKKIECFDSVEISGVEDRFNASLGTYHDLLKIIKDKDFLDNEENEDILEDIVLTLTLFEDREMIEERLKTYAHLFDDKVMKQLKRRRYTGWGRLSRKLINGIRDKQSGKTILDFLKSDGFANRNFMQLIHDDSLTFKEDIQKAQVSGQGDSLHEHIANLAGSPAIKKGILQTVKVVDELVKVMGRHKPENIVIEMARENQTTQKGQKNSRERMKRIEEGIKELGSQILKEHPVENTQLQNEKLYLYYLQNGRDMYVDQELDINRLSDYDVDHIVPQSFLKDDSIDNKVLTRSDKARGKSDNVPSEEVVKKMKNYWRQLLNAKLITQRKFDNLTKAERGGLSELDKAGFIKRQLVETRQITKHVAQILDSRMNTKYDENDKLIREVKVITLKSKLVSDFRKDFQFYKVREINNYHHAHDAYLNAVVGTALIKKYPKLESEFVYGDYKVYDVRKMIAKSEQEIGKATAKYFFYSNIMNFFKTEITLANGEIRKRPLIETNGETGEIVWDKGRDFATVRKVLSMPQVNIVKKTEVQTGGFSKESILPKRNSDKLIARKKDWDPKKYGGFDSPTVAYSVLVVAKVEKGKSKKLKSVKELLGITIMERSSFEKNPIDFLEAKGYKEVKKDLIIKLPKYSLFELENGRKRMLASAGELQKGNELALPSKYVNFLYLASHYEKLKGSPEDNEQKQLFVEQHKHYLDEIIEQISEFSKRVILADANLDKVLSAYNKHRDKPIREQAENIIHLFTLTNLGAPAAFKYFDTTIDRKRYTSTKEVLDATLIHQSITGLYETRIDLSQLGGDGGEAAAKGGSGGGGGTVSLQDEHRLFDIPVTTSLPDVWLQDFPQAWAETGGLGRAKCQAPIIIDLKPTAVPVSIKQYPMSLEAHMGIRQHIIKFLELGVLRPCRSPWNTPLLPVKKPGTQDYRPVQDLREINKRTVDIHPTVPNPYNLLSTLKPDYSWYTVLDLKDAFFCLPLAPQSQELFAFEWKDPERGISGQLTWTRLPQGFKNSPTLFDEALHRDLTDFRTQHPEVTLLQYVDDLLLAAPTKKACTQGTRHLLQELGEKGYRASAKKAQICQTKVTYLGYILSEGKRWLTPGRIETVARIPPPRNPREVREFLGTAGFCRLWIPGFAELAAPLYALTKESTPFTWQTEHQLAFEALKKALLSAPALGLPDTSKPFTLFLDERQGIAKGVLTQKLGPWKRPVAYLSKKLDPVAAGWPPCLRIMAATAMLVKDSAKLTLGQPLTVITPHTLEAIVRQPPDRWITNARLTHYQALLLDTDRVQFGPPVTLNPATLLPVPENQPSPHDCRQVLAETHGTREDLKDQELPDADHTWYTDGSSYLDSGTRRAGAAVVDGHNTIWAQSLPPGTSAQKAELIALTKALELSKGKKANIYTDSRYAFATAHTHGSIYERRGLLTSEGKEIKNKAEIIALLKALFLPQEVAIIHCPGHQKGQDPVAVGNRQADRVARQAAMAEVLTLATEPDNTSHITAGKRTADGSEFEKRTADGSEFESPKKKAKVE

SEQ ID NO: 6935 - protein, 2102 aa, synthetic construct
MPAAKRVKLDGGDKKYSIGLDIGTNSVGWAVITDEYKVPSKKFKVLGNTDRHSIKKNLIGALLFDSGETAEATRLKRTARRRYTRRKNRICYLQEIFSNEMAKVDDSFFHRLEESFLVEEDKKHERHPIFGNIVDEVAYHEKYPTIYHLRKKLVDSTDKADLRLIYLALAHMIKFRGHFLIEGDLNPDNSDVDKLFIQLVQTYNQLFEENPINASGVDAKAILSARLSKSRRLENLIAQLPGEKKNGLFGNLIALSLGLTPNFKSNFDLAEDAKLQLSKDTYDDDLDNLLAQIGDQYADLFLAAKNLSDAILLSDILRVNTEITKAPLSASMIKRYDEHHQDLTLLKALVRQQLPEKYKEIFFDQSKNGYAGYIDGGASQEEFYKFIKPILEKMDGTEELLVKLNREDLLRKQRTFDNGSIPHQIHLGELHAILRRQEDFYPFLKDNREKIEKILTFRIPYYVGPLARGNSRFAWMTRKSEETITPWNFEEVVDKGASAQSFIERMTNFDKNLPNEKVLPKHSLLYEYFTVYNELTKVKYVTEGMRKPAFLSGEQKKAIVDLLFKTNRKVTVKQLKEDYFKKIECFDSVEISGVEDRFNASLGTYHDLLKIIKDKDFLDNEENEDILEDIVLTLTLFEDREMIEERLKTYAHLFDDKVMKQLKRRRYTGWGRLSRKLINGIRDKQSGKTILDFLKSDGFANRNFMQLIHDDSLTFKEDIQKAQVSGQGDSLHEHIANLAGSPAIKKGILQTVKVVDELVKVMGRHKPENIVIEMARENQTTQKGQKNSRERMKRIEEGIKELGSQILKEHPVENTQLQNEKLYLYYLQNGRDMYVDQELDINRLSDYDVDHIVPQSFLKDDSIDNKVLTRSDKARGKSDNVPSEEVVKKMKNYWRQLLNAKLITQRKFDNLTKAERGGLSELDKAGFIKRQLVETRQITKHVAQILDSRMNTKYDENDKLIREVKVITLKSKLVSDFRKDFQFYKVREINNYHHAHDAYLNAVVGTALIKKYPKLESEFVYGDYKVYDVRKMIAKSEQEIGKATAKYFFYSNIMNFFKTEITLANGEIRKRPLIETNGETGEIVWDKGRDFATVRKVLSMPQVNIVKKTEVQTGGFSKESILPKRNSDKLIARKKDWDPKKYGGFDSPTVAYSVLVVAKVEKGKSKKLKSVKELLGITIMERSSFEKNPIDFLEAKGYKEVKKDLIIKLPKYSLFELENGRKRMLASAGELQKGNELALPSKYVNFLYLASHYEKLKGSPEDNEQKQLFVEQHKHYLDEIIEQISEFSKRVILADANLDKVLSAYNKHRDKPIREQAENIIHLFTLTNLGAPAAFKYFDTTIDRKRYTSTKEVLDATLIHQSITGLYETRIDLSQLGGDGGEAAAKGGSGGGGGTVSLQDEHRLFDIPVTTSLPDVWLQDFPQAWAETGGLGRAKCQAPIIIDLKPTAVPVSIKQYPMSLEAHMGIRQHIIKFLELGVLRPCRSPWNTPLLPVKKPGTQDYRPVQDLREINKRTVDIHPTVPNPYNLLSTLKPDYSWYTVLDLKDAFFCLPLAPQSQELFAFEWKDPERGISGQLTWTRLPQGFKNSPTLFNEALHRDLTDFRTQHPEVTLLQYVDDLLLAAPTKKACTQGTRHLLQELGEKGYRASAKKAQICQTKVTYLGYILSEGKRWLTPGRIETVARIPPPRNPREVREFLGTAGFCRLWIPGFAELAAPLYALTKPSTPFTWQTEHQLAFEALKKALLSAPALGLPDTSKPFTLFLDERQGIAKGVLTQKLGPWKRPVAYLSKKLDPVAAGWPPCLRIMAATAMLVKDSAKLTLGQPLTVITPHTLEAIVRQPPDRWITNARLTHYQALLLDTDRVQFGPPVTLNPATLLPVPENQPSPHDCRQVLAETHGTREDLKDQELPDADHTWYTDGSSYLDSGTRRAGAAVVDGHNTIWAQSLPPGTSAQKAELIALTKALELSKGKKANIYTDSRYAFATAHTHGSIYERRGWLTSEGKEIKNKAEIIALLKALFLPQEVAIIHCPGHQKGQDPVAVGNRQADRVARQAAMAEVLTLATEPDNTSHITAGKRTADGSEFEKRTADGSEFESPKKKAKVE

SEQ ID NO: 6936 - protein, 2087 aa, synthetic construct
MPAAKRVKLDGGDKKYSIGLDIGTNSVGWAVITDEYKVPSKKFKVLGNTDRHSIKKNLIGALLFDSGETAEATRLKRTARRRYTRRKNRICYLQEIFSNEMAKVDDSFFHRLEESFLVEEDKKHERHPIFGNIVDEVAYHEKYPTIYHLRKKLVDSTDKADLRLIYLALAHMIKFRGHFLIEGDLNPDNSDVDKLFIQLVQTYNQLFEENPINASGVDAKAILSARLSKSRRLENLIAQLPGEKKNGLFGNLIALSLGLTPNFKSNFDLAEDAKLQLSKDTYDDDLDNLLAQIGDQYADLFLAAKNLSDAILLSDILRVNTEITKAPLSASMIKRYDEHHQDLTLLKALVRQQLPEKYKEIFFDQSKNGYAGYIDGGASQEEFYKFIKPILEKMDGTEELLVKLNREDLLRKQRTFDNGSIPHQIHLGELHAILRRQEDFYPFLKDNREKIEKILTFRIPYYVGPLARGNSRFAWMTRKSEETITPWNFEEVVDKGASAQSFIERMTNFDKNLPNEKVLPKHSLLYEYFTVYNELTKVKYVTEGMRKPAFLSGEQKKAIVDLLFKTNRKVTVKQLKEDYFKKIECFDSVEISGVEDRFNASLGTYHDLLKIIKDKDFLDNEENEDILEDIVLTLTLFEDREMIEERLKTYAHLFDDKVMKQLKRRRYTGWGRLSRKLINGIRDKQSGKTILDFLKSDGFANRNFMQLIHDDSLTFKEDIQKAQVSGQGDSLHEHIANLAGSPAIKKGILQTVKVVDELVKVMGRHKPENIVIEMARENQTTQKGQKNSRERMKRIEEGIKELGSQILKEHPVENTQLQNEKLYLYYLQNGRDMYVDQELDINRLSDYDVDHIVPQSFLKDDSIDNKVLTRSDKARGKSDNVPSEEVVKKMKNYWRQLLNAKLITQRKFDNLTKAERGGLSELDKAGFIKRQLVETRQITKHVAQILDSRMNTKYDENDKLIREVKVITLKSKLVSDFRKDFQFYKVREINNYHHAHDAYLNAVVGTALIKKYPKLESEFVYGDYKVYDVRKMIAKSEQEIGKATAKYFFYSNIMNFFKTEITLANGEIRKRPLIETNGETGEIVWDKGRDFATVRKVLSMPQVNIVKKTEVQTGGFSKESILPKRNSDKLIARKKDWDPKKYGGFDSPTVAYSVLVVAKVEKGKSKKLKSVKELLGITIMERSSFEKNPIDFLEAKGYKEVKKDLIIKLPKYSLFELENGRKRMLASAGELQKGNELALPSKYVNFLYLASHYEKLKGSPEDNEQKQLFVEQHKHYLDEIIEQISEFSKRVILADANLDKVLSAYNKHRDKPIREQAENIIHLFTLTNLGAPAAFKYFDTTIDRKRYTSTKEVLDATLIHQSITGLYETRIDLSQLGGDGGEAAAKGGSGGGGGVPWILKKPLELTIKLDLEEQQGTLLNNSILSKKGKEELKQLFEKYSALWQSWENQVGHRRIRPHKIATGTVKPTPQKQYHINPKAKPDIQIVINDLLKQGVLIQKESTMNTPVYPVPKPNGRWRMVLDYRAVNKVTPLIAVQNQHSYGILGSLFKGRYKTTIDLSNGFWAHPIVPEDYWITAFTWQGKQYCWTVLPQGFLNSPGLFTGDVVDLLQGIPNVEVYVDDVYISHDSEKEHLEYLDILFNRLKEAGYIISLKKSNIANSIVDFLGFQITNEGRGLTDTFKEKLENITAPTTLKQLQSILGLLNFARNFIPDFTELIAPLYALIPKSTKNYVPWQIEHSTTLETLITKLNGAEYLQGRKGDKTLIMKVNASYTTGYIRYYNEGEKKPISYVSIVFSKTELKFTELEKLLTTVHKGLLKALDLSMGQNIHVYSPIVSMQNIQKTPQTAKKALASRWLSWLSYLEDPRIRFFYDPQMPALKDLPAVDTGKDNKKHPSNFQHIFYTDGSAITSPTKEGHLNAGMGIVYFINKDGNLQKQQEWSISLGNHTAQFAEIAAFEFALKKCLPLGGNILVVTDSNYVAKAYNEELDVWASNGFVNNRKKPLKHISKWKSVADLKRLRPDVVVTHEPGHQKLDSSPHAYGNNLADQLATQASFKVHAGKRTADGSEFEKRTADGSEFESPKKKAKVE

SEQ ID NO: 6937 - protein, 2173 aa, synthetic construct
MPAAKRVKLDGGDKKYSIGLDIGTNSVGWAVITDEYKVPSKKFKVLGNTDRHSIKKNLIGALLFDSGETAEATRLKRTARRRYTRRKNRICYLQEIFSNEMAKVDDSFFHRLEESFLVEEDKKHERHPIFGNIVDEVAYHEKYPTIYHLRKKLVDSTDKADLRLIYLALAHMIKFRGHFLIEGDLNPDNSDVDKLFIQLVQTYNQLFEENPINASGVDAKAILSARLSKSRRLENLIAQLPGEKKNGLFGNLIALSLGLTPNFKSNFDLAEDAKLQLSKDTYDDDLDNLLAQIGDQYADLFLAAKNLSDAILLSDILRVNTEITKAPLSASMIKRYDEHHQDLTLLKALVRQQLPEKYKEIFFDQSKNGYAGYIDGGASQEEFYKFIKPILEKMDGTEELLVKLNREDLLRKQRTFDNGSIPHQIHLGELHAILRRQEDFYPFLKDNREKIEKILTFRIPYYVGPLARGNSRFAWMTRKSEETITPWNFEEVVDKGASAQSFIERMTNFDKNLPNEKVLPKHSLLYEYFTVYNELTKVKYVTEGMRKPAFLSGEQKKAIVDLLFKTNRKVTVKQLKEDYFKKIECFDSVEISGVEDRFNASLGTYHDLLKIIKDKDFLDNEENEDILEDIVLTLTLFEDREMIEERLKTYAHLFDDKVMKQLKRRRYTGWGRLSRKLINGIRDKQSGKTILDFLKSDGFANRNFMQLIHDDSLTFKEDIQKAQVSGQGDSLHEHIANLAGSPAIKKGILQTVKVVDELVKVMGRHKPENIVIEMARENQTTQKGQKNSRERMKRIEEGIKELGSQILKEHPVENTQLQNEKLYLYYLQNGRDMYVDQELDINRLSDYDVDHIVPQSFLKDDSIDNKVLTRSDKARGKSDNVPSEEVVKKMKNYWRQLLNAKLITQRKFDNLTKAERGGLSELDKAGFIKRQLVETRQITKHVAQILDSRMNTKYDENDKLIREVKVITLKSKLVSDFRKDFQFYKVREINNYHHAHDAYLNAVVGTALIKKYPKLESEFVYGDYKVYDVRKMIAKSEQEIGKATAKYFFYSNIMNFFKTEITLANGEIRKRPLIETNGETGEIVWDKGRDFATVRKVLSMPQVNIVKKTEVQTGGFSKESILPKRNSDKLIARKKDWDPKKYGGFDSPTVAYSVLVVAKVEKGKSKKLKSVKELLGITIMERSSFEKNPIDFLEAKGYKEVKKDLIIKLPKYSLFELENGRKRMLASAGELQKGNELALPSKYVNFLYLASHYEKLKGSPEDNEQKQLFVEQHKHYLDEIIEQISEFSKRVILADANLDKVLSAYNKHRDKPIREQAENIIHLFTLTNLGAPAAFKYFDTTIDRKRYTSTKEVLDATLIHQSITGLYETRIDLSQLGGDGGEAAAKGGSGGGGGMDLLKPLTVERKGVKIKGYWNSQADITCVPKDLLQGEEPVRQQNVTTIHGTQEGDVYYVNLKIDGRRINTEVIGTTLDYAIITPGDVPWILKKPLELTIKLDLEEQQGTLLNNSILSKKGKEELKQLFEKYSALWQSWENQVGHRRIRPHKIATGTVKPTPQKQYHINPKAKPDIQIVINDLLKQGVLIQKESTMNTPVYPVPKPNGRWRMVLDYRAVNKVTPLIAVQNQHSYGILGSLFKGRYKTTIDLSNGFWAHPIVPEDYWITAFTWQGKQYCWTVLPQGFLNSPGLFNGDVVDLLQGIPNVEVYVDDVYISHDSEKEHLEYLDILFNRLKEAGYIISLKKSNIANSIVDFLGFQITNEGRGLTDTFKEKLENITAPTTLKQLQSILGKLNFARNFIPDFTELIAPLYALIPKSPKNYVPWQIEHSTTLETLITKLNGAEYLQGRKGDKTLIMKVNASYTTGYIRYYNEGEKKPISYVSIVFSKTELKFTELEKLLTTVHKGLLKALDLSMGQNIHVYSPIVSMQNIQKTPQTAKKALASRWLSWLSYLEDPRIRFFYDPQMPALKDLPAVDTGKDNKKHPSNFQHIFYTDGSAITSPTKEGHLNAGMGIVYFINKDGNLQKQQEWSISLGNHTAQFAEIAAFEFALKKCLPLGGNILVVTDSNYVAKAYNEELDVWASNGFVNNRKKPLKHISKWKSVADLKRLRPDVVVTHEPGHQKLDSSPHAYGNNLADQLATQASFKVHAGKRTADGSEFEKRTADGSEFESPKKKAKVE

SEQ ID NO: 6938 - protein, 2095 aa, synthetic construct
MPAAKRVKLDGGDKKYSIGLDIGTNSVGWAVITDEYKVPSKKFKVLGNTDRHSIKKNLIGALLFDSGETAEATRLKRTARRRYTRRKNRICYLQEIFSNEMAKVDDSFFHRLEESFLVEEDKKHERHPIFGNIVDEVAYHEKYPTIYHLRKKLVDSTDKADLRLIYLALAHMIKFRGHFLIEGDLNPDNSDVDKLFIQLVQTYNQLFEENPINASGVDAKAILSARLSKSRRLENLIAQLPGEKKNGLFGNLIALSLGLTPNFKSNFDLAEDAKLQLSKDTYDDDLDNLLAQIGDQYADLFLAAKNLSDAILLSDILRVNTEITKAPLSASMIKRYDEHHQDLTLLKALVRQQLPEKYKEIFFDQSKNGYAGYIDGGASQEEFYKFIKPILEKMDGTEELLVKLNREDLLRKQRTFDNGSIPHQIHLGELHAILRRQEDFYPFLKDNREKIEKILTFRIPYYVGPLARGNSRFAWMTRKSEETITPWNFEEVVDKGASAQSFIERMTNFDKNLPNEKVLPKHSLLYEYFTVYNELTKVKYVTEGMRKPAFLSGEQKKAIVDLLFKTNRKVTVKQLKEDYFKKIECFDSVEISGVEDRFNASLGTYHDLLKIIKDKDFLDNEENEDILEDIVLTLTLFEDREMIEERLKTYAHLFDDKVMKQLKRRRYTGWGRLSRKLINGIRDKQSGKTILDFLKSDGFANRNFMQLIHDDSLTFKEDIQKAQVSGQGDSLHEHIANLAGSPAIKKGILQTVKVVDELVKVMGRHKPENIVIEMARENQTTQKGQKNSRERMKRIEEGIKELGSQILKEHPVENTQLQNEKLYLYYLQNGRDMYVDQELDINRLSDYDVDHIVPQSFLKDDSIDNKVLTRSDKARGKSDNVPSEEVVKKMKNYWRQLLNAKLITQRKFDNLTKAERGGLSELDKAGFIKRQLVETRQITKHVAQILDSRMNTKYDENDKLIREVKVITLKSKLVSDFRKDFQFYKVREINNYHHAHDAYLNAVVGTALIKKYPKLESEFVYGDYKVYDVRKMIAKSEQEIGKATAKYFFYSNIMNFFKTEITLANGEIRKRPLIETNGETGEIVWDKGRDFATVRKVLSMPQVNIVKKTEVQTGGFSKESILPKRNSDKLIARKKDWDPKKYGGFDSPTVAYSVLVVAKVEKGKSKKLKSVKELLGITIMERSSFEKNPIDFLEAKGYKEVKKDLIIKLPKYSLFELENGRKRMLASAGELQKGNELALPSKYVNFLYLASHYEKLKGSPEDNEQKQLFVEQHKHYLDEIIEQISEFSKRVILADANLDKVLSAYNKHRDKPIREQAENIIHLFTLTNLGAPAAFKYFDTTIDRKRYTSTKEVLDATLIHQSITGLYETRIDLSQLGGDGGEAAAKGGSGGGGGTLQLEEEYRLFEPESTQKQEMDIWLKNFPQAWAETGGMGTAHCQAPVLIQLKATATPISIRQYPMPHEAYQGIKPHIRRMLDQGILKPCQSPWNTPLLPVKKPGTEDYRPVQDLREVNKRVEDIHPTVPNPYNLLSTLPPSHPWYTVLDLKDAFFCLRLHSESQLLFAFEWRDPEIGLSGQLTWTRLPQGFKNSPTLFNEALHSDLADFRVRYPALVLLQYVDDLLLAAATRTECLEGTKALLETLGNKGYRASAKKAQICLQEVTYLGYSLKDGQRWLTKARKEAILSIPVPKNSRQVREFLGTAGYCRLWIPGFAELAAPLYPLTRPGTLFQWGTEQQLAFEDIKKALLSSPALGLPDITKPFELFIDENSGFAKGVLVQKLGPWKRPVAYLSKKLDTVASGWPPCLRMVAAIAILVKDAGKLTLGQPLTILTSHPVEALVRQPPNKWLSNARMTHYQAMLLDAERVHFGPTVSLNPATLLPLPSGGNHHDCLQILAETHGTRPDLTDQPLPDADLTWYTDGSSFIRNGEREAGAAVTTESEVIWAAPLPPGTSAQRAELIALTQALKMAEGKKLTVYTDSRYAFATTHVHGEIYRRRGWLTSEGKEIKNKNEILALLEALFLPKRLSIIHCPGHQKGDSPQAKGNRLADDTAKKAATETHSSLTVLPAGKRTADGSEFEKRTADGSEFESPKKKAKVE

SEQ ID NO: 6939 - protein, 2176 aa, synthetic construct
MPAAKRVKLDGGDKKYSIGLDIGTNSVGWAVITDEYKVPSKKFKVLGNTDRHSIKKNLIGALLFDSGETAEATRLKRTARRRYTRRKNRICYLQEIFSNEMAKVDDSFFHRLEESFLVEEDKKHERHPIFGNIVDEVAYHEKYPTIYHLRKKLVDSTDKADLRLIYLALAHMIKFRGHFLIEGDLNPDNSDVDKLFIQLVQTYNQLFEENPINASGVDAKAILSARLSKSRRLENLIAQLPGEKKNGLFGNLIALSLGLTPNFKSNFDLAEDAKLQLSKDTYDDDLDNLLAQIGDQYADLFLAAKNLSDAILLSDILRVNTEITKAPLSASMIKRYDEHHQDLTLLKALVRQQLPEKYKEIFFDQSKNGYAGYIDGGASQEEFYKFIKPILEKMDGTEELLVKLNREDLLRKQRTFDNGSIPHQIHLGELHAILRRQEDFYPFLKDNREKIEKILTFRIPYYVGPLARGNSRFAWMTRKSEETITPWNFEEVVDKGASAQSFIERMTNFDKNLPNEKVLPKHSLLYEYFTVYNELTKVKYVTEGMRKPAFLSGEQKKAIVDLLFKTNRKVTVKQLKEDYFKKIECFDSVEISGVEDRFNASLGTYHDLLKIIKDKDFLDNEENEDILEDIVLTLTLFEDREMIEERLKTYAHLFDDKVMKQLKRRRYTGWGRLSRKLINGIRDKQSGKTILDFLKSDGFANRNFMQLIHDDSLTFKEDIQKAQVSGQGDSLHEHIANLAGSPAIKKGILQTVKVVDELVKVMGRHKPENIVIEMARENQTTQKGQKNSRERMKRIEEGIKELGSQILKEHPVENTQLQNEKLYLYYLQNGRDMYVDQELDINRLSDYDVDHIVPQSFLKDDSIDNKVLTRSDKARGKSDNVPSEEVVKKMKNYWRQLLNAKLITQRKFDNLTKAERGGLSELDKAGFIKRQLVETRQITKHVAQILDSRMNTKYDENDKLIREVKVITLKSKLVSDFRKDFQFYKVREINNYHHAHDAYLNAVVGTALIKKYPKLESEFVYGDYKVYDVRKMIAKSEQEIGKATAKYFFYSNIMNFFKTEITLANGEIRKRPLIETNGETGEIVWDKGRDFATVRKVLSMPQVNIVKKTEVQTGGFSKESILPKRNSDKLIARKKDWDPKKYGGFDSPTVAYSVLVVAKVEKGKSKKLKSVKELLGITIMERSSFEKNPIDFLEAKGYKEVKKDLIIKLPKYSLFELENGRKRMLASAGELQKGNELALPSKYVNFLYLASHYEKLKGSPEDNEQKQLFVEQHKHYLDEIIEQISEFSKRVILADANLDKVLSAYNKHRDKPIREQAENIIHLFTLTNLGAPAAFKYFDTTIDRKRYTSTKEVLDATLIHQSITGLYETRIDLSQLGGDGGEAAAKGGSGGGGGMNPLQLLQPLPAEIKGTKLLAHWNSGATITCIPESFLEDEQPIKKTLIKTIHGEKQQNVYYVTFKVKGRKVEAEVIASPYEYILLSPTDVPWLTQQPLQLTILVPLQEYQEKILSKTALPEDQKQQLKTLFVKYDNLWQHWENQVGHRKIRPHNIATGDYPPRPQKQYPINPKAKPSIQIVIDDLLKQGVLTPQNSTMNTPVYPVPKPDGRWRMVLDYREVNKTIPLTAAQNQHSAGILATIVRQKYKTTLDLANGFWAHPITPESYWLTAFTWQGKQYCWTRLPQGFLNSPALFNADVVDLLKEIPNVQVYVDDIYLSHDDPKEHVQQLEKVFQILLQAGYVVSLKKSEIGQKTVEFLGFNITKEGRGLTDTFKTKLLNITPPKDLKQLQSILGKLNFARNFIPNFAELVQPLYNLIAPAKGKYIEWSEENTKQLNMVIEALNTASNLEERLPEQRLVIKVNTSPSAGYVRYYNETGKKPIMYLNYVFSKAELKFSMLEKLLTTMHKALIKAMDLAMGQEILVYSPIVSMTKIQKTPLPERKALPIRWITWMTYLEDPRIQFHYDKTLPELKHIPDVYTSSQSPVKHPSQYEGVFYTDGSAIKSPDPTKSNNAGMGIVHATYKPEYQVLNQWSIPLGNHTAQMAEIAAVEFACKKALKIPGPVLVITDSFYVAESANKELPYWKSNGFVNNKKKPLKHISKWKSIAECLSMKPDITIQHEKGISLQIPVFILKGNALADKLATQGSYVVNAGKRTADGSEFEKRTADGSEFESPKKKAKVE

SEQ ID NO: 6940 - protein, 2094 aa, synthetic construct
MPAAKRVKLDGGDKKYSIGLDIGTNSVGWAVITDEYKVPSKKFKVLGNTDRHSIKKNLIGALLFDSGETAEATRLKRTARRRYTRRKNRICYLQEIFSNEMAKVDDSFFHRLEESFLVEEDKKHERHPIFGNIVDEVAYHEKYPTIYHLRKKLVDSTDKADLRLIYLALAHMIKFRGHFLIEGDLNPDNSDVDKLFIQLVQTYNQLFEENPINASGVDAKAILSARLSKSRRLENLIAQLPGEKKNGLFGNLIALSLGLTPNFKSNFDLAEDAKLQLSKDTYDDDLDNLLAQIGDQYADLFLAAKNLSDAILLSDILRVNTEITKAPLSASMIKRYDEHHQDLTLLKALVRQQLPEKYKEIFFDQSKNGYAGYIDGGASQEEFYKFIKPILEKMDGTEELLVKLNREDLLRKQRTFDNGSIPHQIHLGELHAILRRQEDFYPFLKDNREKIEKILTFRIPYYVGPLARGNSRFAWMTRKSEETITPWNFEEVVDKGASAQSFIERMTNFDKNLPNEKVLPKHSLLYEYFTVYNELTKVKYVTEGMRKPAFLSGEQKKAIVDLLFKTNRKVTVKQLKEDYFKKIECFDSVEISGVEDRFNASLGTYHDLLKIIKDKDFLDNEENEDILEDIVLTLTLFEDREMIEERLKTYAHLFDDKVMKQLKRRRYTGWGRLSRKLINGIRDKQSGKTILDFLKSDGFANRNFMQLIHDDSLTFKEDIQKAQVSGQGDSLHEHIANLAGSPAIKKGILQTVKVVDELVKVMGRHKPENIVIEMARENQTTQKGQKNSRERMKRIEEGIKELGSQILKEHPVENTQLQNEKLYLYYLQNGRDMYVDQELDINRLSDYDVDHIVPQSFLKDDSIDNKVLTRSDKARGKSDNVPSEEVVKKMKNYWRQLLNAKLITQRKFDNLTKAERGGLSELDKAGFIKRQLVETRQITKHVAQILDSRMNTKYDENDKLIREVKVITLKSKLVSDFRKDFQFYKVREINNYHHAHDAYLNAVVGTALIKKYPKLESEFVYGDYKVYDVRKMIAKSEQEIGKATAKYFFYSNIMNFFKTEITLANGEIRKRPLIETNGETGEIVWDKGRDFATVRKVLSMPQVNIVKKTEVQTGGFSKESILPKRNSDKLIARKKDWDPKKYGGFDSPTVAYSVLVVAKVEKGKSKKLKSVKELLGITIMERSSFEKNPIDFLEAKGYKEVKKDLIIKLPKYSLFELENGRKRMLASAGELQKGNELALPSKYVNFLYLASHYEKLKGSPEDNEQKQLFVEQHKHYLDEIIEQISEFSKRVILADANLDKVLSAYNKHRDKPIREQAENIIHLFTLTNLGAPAAFKYFDTTIDRKRYTSTKEVLDATLIHQSITGLYETRIDLSQLGGDGGEAAAKGGSGGGGGVLNLEEEYRLHEKPVPSSIDPSWLQLFPTVWAERAGMGLANQVPPVVVELRSGASPVAVRQYPMSKEAREGIRPHIQKFLDLGVLVPCRSPWNTPLLPVKKPGTNDYRPVQDLREINKRVQDIHPTVPNPYNLLSSLPPSYTWYSVLDLKDAFFCLRLHPNSQPLFAFEWKDPEKGNTGQLTWTRLPQGFKNSPTLFNEALHRDLAPFRALNPQVVLLQYVDDLLVAAPTYEDCKKGTQKLLQELSKLGYRVSAKKAQLCQREVTYLGYLLKEGKRWLTPARKATVMKIPVPTTPRQVREFLGKAGFCRLFIPGFASLAAPLYPLTKPSIPFIWTEEHQQAFDHIKKALLSAPALALPDLTKPFTLYIDERAGVARGVLTQTLGPWRRPVAYLSKKLDPVASGWPTCLKAVAAVALLLKDADKLTLGQNVTVIASHSLESIVRQPPDRWMTNARMTHYQSLLLNERVSFAPPAVLNPATLLPVESEATPVHRCSEILAEETGTRRDLEDQPLPGVPTWYTDGSSFITEGKRRAGAPIVDGKRTVWASSLPEGTSAQKAELVALTQALRLAEGKNINIYTDSRYAFATAHIHGAIYKQRGWLTSAGKDIKNKEEILALLEAIHLPRRVAIIHCPGHQRGSNPVATGNRRADEAAKQAALSTRVLAGTTKPAGKRTADGSEFEKRTADGSEFESPKKKAKVE

SEQ ID NO: 6941 - protein, 2218 aa, synthetic construct
MPAAKRVKLDGGDKKYSIGLDIGTNSVGWAVITDEYKVPSKKFKVLGNTDRHSIKKNLIGALLFDSGETAEATRLKRTARRRYTRRKNRICYLQEIFSNEMAKVDDSFFHRLEESFLVEEDKKHERHPIFGNIVDEVAYHEKYPTIYHLRKKLVDSTDKADLRLIYLALAHMIKFRGHFLIEGDLNPDNSDVDKLFIQLVQTYNQLFEENPINASGVDAKAILSARLSKSRRLENLIAQLPGEKKNGLFGNLIALSLGLTPNFKSNFDLAEDAKLQLSKDTYDDDLDNLLAQIGDQYADLFLAAKNLSDAILLSDILRVNTEITKAPLSASMIKRYDEHHQDLTLLKALVRQQLPEKYKEIFFDQSKNGYAGYIDGGASQEEFYKFIKPILEKMDGTEELLVKLNREDLLRKQRTFDNGSIPHQIHLGELHAILRRQEDFYPFLKDNREKIEKILTFRIPYYVGPLARGNSRFAWMTRKSEETITPWNFEEVVDKGASAQSFIERMTNFDKNLPNEKVLPKHSLLYEYFTVYNELTKVKYVTEGMRKPAFLSGEQKKAIVDLLFKTNRKVTVKQLKEDYFKKIECFDSVEISGVEDRFNASLGTYHDLLKIIKDKDFLDNEENEDILEDIVLTLTLFEDREMIEERLKTYAHLFDDKVMKQLKRRRYTGWGRLSRKLINGIRDKQSGKTILDFLKSDGFANRNFMQLIHDDSLTFKEDIQKAQVSGQGDSLHEHIANLAGSPAIKKGILQTVKVVDELVKVMGRHKPENIVIEMARENQTTQKGQKNSRERMKRIEEGIKELGSQILKEHPVENTQLQNEKLYLYYLQNGRDMYVDQELDINRLSDYDVDHIVPQSFLKDDSIDNKVLTRSDKARGKSDNVPSEEVVKKMKNYWRQLLNAKLITQRKFDNLTKAERGGLSELDKAGFIKRQLVETRQITKHVAQILDSRMNTKYDENDKLIREVKVITLKSKLVSDFRKDFQFYKVREINNYHHAHDAYLNAVVGTALIKKYPKLESEFVYGDYKVYDVRKMIAKSEQEIGKATAKYFFYSNIMNFFKTEITLANGEIRKRPLIETNGETGEIVWDKGRDFATVRKVLSMPQVNIVKKTEVQTGGFSKESILPKRNSDKLIARKKDWDPKKYGGFDSPTVAYSVLVVAKVEKGKSKKLKSVKELLGITIMERSSFEKNPIDFLEAKGYKEVKKDLIIKLPKYSLFELENGRKRMLASAGELQKGNELALPSKYVNFLYLASHYEKLKGSPEDNEQKQLFVEQHKHYLDEIIEQISEFSKRVILADANLDKVLSAYNKHRDKPIREQAENIIHLFTLTNLGAPAAFKYFDTTIDRKRYTSTKEVLDATLIHQSITGLYETRIDLSQLGGDGGEAAAKGGSGGGGGTLGDQGSRGSDPLPEPRVTLTVEGIPTEFLVNTGAEHSVLTKPMGKMGSKRTVVAGATGSKVYPWTTKRLLKIGQKQVTHSFLVIPECPAPLLGRDLLTKLKAQIQFSTEGPQVTWEDRPAMCLVLNLEEEYRLHEKPVPPSIDPSWLQLFPMVWAEKAGMGLANQVPPVVVELKSDASPVAVRQYPMSKEAREGIRPHIQRFLDLGILVPCQSPWNTPLLPVKKPGTNDYRPVQDLREVNKRVQDIHPTVPNPYNLLSSLPPSHTWYSVLDLKDAFFCLKLHPNSQPLFAFEWRDPEKGNTGQLTWTRLPQGFKNSPTLFDEALHRDLASFRALNPQVVMLQYVDDLLVAAPTYRDCKEGTRRLLQELSKLGYRVSAKKAQLCREEVTYLGYLLKGGKRWLTPARKATVMKIPTPTTPRQVREFLGTAGFCRLWIPGFASLAAPLYPLTREKVPFTWTEAHQEAFGRIKEALLSAPALALPDLTKPFALYVDEKEGVARGVLTQTLGPWRRPVAYLSKKLDPVASGWPTCLKAIAAVALLLKDADKLTLGQNVLVIAPHNLESIVRQPPDRWMTNARMTHYQSLLLNERVSFAPPAILNPATLLPVESDDTPIHICSEILAEETGTRPDLRDQPLPGVPAWYTDGSSFIMDGRRQAGAAIVDNKRTVWASNLPEGTSAQKAELIALTQALRLAEGKSINIYTDSRYAFATAHVHGAIYKQRGLLTSAGKDIKNKEEILALLEAIHLPKRVAIIHCPGHQRGTDPVATGNRKADEAAKQAAQSTRILTETTKNAGKRTADGSEFEKRTADGSEFESPKKKAKVE

SEQ ID NO: 6942 - protein, 2127 aa, synthetic construct
MPAAKRVKLDGGDKKYSIGLDIGTNSVGWAVITDEYKVPSKKFKVLGNTDRHSIKKNLIGALLFDSGETAEATRLKRTARRRYTRRKNRICYLQEIFSNEMAKVDDSFFHRLEESFLVEEDKKHERHPIFGNIVDEVAYHEKYPTIYHLRKKLVDSTDKADLRLIYLALAHMIKFRGHFLIEGDLNPDNSDVDKLFIQLVQTYNQLFEENPINASGVDAKAILSARLSKSRRLENLIAQLPGEKKNGLFGNLIALSLGLTPNFKSNFDLAEDAKLQLSKDTYDDDLDNLLAQIGDQYADLFLAAKNLSDAILLSDILRVNTEITKAPLSASMIKRYDEHHQDLTLLKALVRQQLPEKYKEIFFDQSKNGYAGYIDGGASQEEFYKFIKPILEKMDGTEELLVKLNREDLLRKQRTFDNGSIPHQIHLGELHAILRRQEDFYPFLKDNREKIEKILTFRIPYYVGPLARGNSRFAWMTRKSEETITPWNFEEVVDKGASAQSFIERMTNFDKNLPNEKVLPKHSLLYEYFTVYNELTKVKYVTEGMRKPAFLSGEQKKAIVDLLFKTNRKVTVKQLKEDYFKKIECFDSVEISGVEDRFNASLGTYHDLLKIIKDKDFLDNEENEDILEDIVLTLTLFEDREMIEERLKTYAHLFDDKVMKQLKRRRYTGWGRLSRKLINGIRDKQSGKTILDFLKSDGFANRNFMQLIHDDSLTFKEDIQKAQVSGQGDSLHEHIANLAGSPAIKKGILQTVKVVDELVKVMGRHKPENIVIEMARENQTTQKGQKNSRERMKRIEEGIKELGSQILKEHPVENTQLQNEKLYLYYLQNGRDMYVDQELDINRLSDYDVDHIVPQSFLKDDSIDNKVLTRSDKARGKSDNVPSEEVVKKMKNYWRQLLNAKLITQRKFDNLTKAERGGLSELDKAGFIKRQLVETRQITKHVAQILDSRMNTKYDENDKLIREVKVITLKSKLVSDFRKDFQFYKVREINNYHHAHDAYLNAVVGTALIKKYPKLESEFVYGDYKVYDVRKMIAKSEQEIGKATAKYFFYSNIMNFFKTEITLANGEIRKRPLIETNGETGEIVWDKGRDFATVRKVLSMPQVNIVKKTEVQTGGFSKESILPKRNSDKLIARKKDWDPKKYGGFDSPTVAYSVLVVAKVEKGKSKKLKSVKELLGITIMERSSFEKNPIDFLEAKGYKEVKKDLIIKLPKYSLFELENGRKRMLASAGELQKGNELALPSKYVNFLYLASHYEKLKGSPEDNEQKQLFVEQHKHYLDEIIEQISEFSKRVILADANLDKVLSAYNKHRDKPIREQAENIIHLFTLTNLGAPAAFKYFDTTIDRKRYTSTKEVLDATLIHQSITGLYETRIDLSQLGGDGGEAAAKGGSGGGGGLLGRDLLTKLKAQIQFSTEGPQVTWEDRPAMCLVLNLEEEYRLHEKPVPPSIDPSWLQLFPMVWAEKAGMGLANQVPPVVVELKSDASPVAVRQYPMSKEAREGIRPHIQRFLDLGILVPCQSPWNTPLLPVKKPGTNDYRPVQDLREVNKRVQDIHPTVPNPYNLLSSLPPSHTWYSVLDLKDAFFCLKLHPNSQPLFAFEWRDPEKGNTGQLTWTRLPQGFKNSPTLFNEALHRDLASFRALNPQVVMLQYVDDLLVAAPTYRDCKEGTRRLLQELSKLGYRVSAKKAQLCREEVTYLGYLLKGGKRWLTPARKATVMKIPTPTTPRQVREFLGTAGFCRLWIPGFASLAAPLYPLTRPKVPFTWTEAHQEAFGRIKEALLSAPALALPDLTKPFALYVDEKEGVARGVLTQTLGPWRRPVAYLSKKLDPVASGWPTCLKAIAAVALLLKDADKLTLGQNVLVIAPHNLESIVRQPPDRWMTNARMTHYQSLLLNERVSFAPPAILNPATLLPVESDDTPIHICSEILAEETGTRPDLRDQPLPGVPAWYTDGSSFIMDGRRQAGAAIVDNKRTVWASNLPEGTSAQKAELIALTQALRLAEGKSINIYTDSRYAFATAHVHGAIYKQRGWLTSAGKDIKNKEEILALLEAIHLPKRVAIIHCPGHQRGTDPVATGNRKADEAAKQAAQSTRILTETTKNAGKRTADGSEFEKRTADGSEFESPKKKAKVE

SEQ ID NO: 6943 - protein, 2127 aa, synthetic construct
MPAAKRVKLDGGDKKYSIGLDIGTNSVGWAVITDEYKVPSKKFKVLGNTDRHSIKKNLIGALLFDSGETAEATRLKRTARRRYTRRKNRICYLQEIFSNEMAKVDDSFFHRLEESFLVEEDKKHERHPIFGNIVDEVAYHEKYPTIYHLRKKLVDSTDKADLRLIYLALAHMIKFRGHFLIEGDLNPDNSDVDKLFIQLVQTYNQLFEENPINASGVDAKAILSARLSKSRRLENLIAQLPGEKKNGLFGNLIALSLGLTPNFKSNFDLAEDAKLQLSKDTYDDDLDNLLAQIGDQYADLFLAAKNLSDAILLSDILRVNTEITKAPLSASMIKRYDEHHQDLTLLKALVRQQLPEKYKEIFFDQSKNGYAGYIDGGASQEEFYKFIKPILEKMDGTEELLVKLNREDLLRKQRTFDNGSIPHQIHLGELHAILRRQEDFYPFLKDNREKIEKILTFRIPYYVGPLARGNSRFAWMTRKSEETITPWNFEEVVDKGASAQSFIERMTNFDKNLPNEKVLPKHSLLYEYFTVYNELTKVKYVTEGMRKPAFLSGEQKKAIVDLLFKTNRKVTVKQLKEDYFKKIECFDSVEISGVEDRFNASLGTYHDLLKIIKDKDFLDNEENEDILEDIVLTLTLFEDREMIEERLKTYAHLFDDKVMKQLKRRRYTGWGRLSRKLINGIRDKQSGKTILDFLKSDGFANRNFMQLIHDDSLTFKEDIQKAQVSGQGDSLHEHIANLAGSPAIKKGILQTVKVVDELVKVMGRHKPENIVIEMARENQTTQKGQKNSRERMKRIEEGIKELGSQILKEHPVENTQLQNEKLYLYYLQNGRDMYVDQELDINRLSDYDVDHIVPQSFLKDDSIDNKVLTRSDKARGKSDNVPSEEVVKKMKNYWRQLLNAKLITQRKFDNLTKAERGGLSELDKAGFIKRQLVETRQITKHVAQILDSRMNTKYDENDKLIREVKVITLKSKLVSDFRKDFQFYKVREINNYHHAHDAYLNAVVGTALIKKYPKLESEFVYGDYKVYDVRKMIAKSEQEIGKATAKYFFYSNIMNFFKTEITLANGEIRKRPLIETNGETGEIVWDKGRDFATVRKVLSMPQVNIVKKTEVQTGGFSKESILPKRNSDKLIARKKDWDPKKYGGFDSPTVAYSVLVVAKVEKGKSKKLKSVKELLGITIMERSSFEKNPIDFLEAKGYKEVKKDLIIKLPKYSLFELENGRKRMLASAGELQKGNELALPSKYVNFLYLASHYEKLKGSPEDNEQKQLFVEQHKHYLDEIIEQISEFSKRVILADANLDKVLSAYNKHRDKPIREQAENIIHLFTLTNLGAPAAFKYFDTTIDRKRYTSTKEVLDATLIHQSITGLYETRIDLSQLGGDGGEAAAKGGSGGGGGLLGRDLLTKLKAQIQFSTEGPQVTWEDRPAMCLVLNLEEEYRLHEKPVPPSIDPSWLQLFPMVWAEKAGMGLANQVPPVVVELKSDASPVAVRQYPMSKEAREGIRPHIQRFLDLGILVPCQSPWNTPLLPVKKPGTNDYRPVQDLREVNKRVQDIHPTVPNPYNLLSSLPPSHTWYSVLDLKDAFFCLKLHPNSQPLFAFEWRDPEKGNTGQLTWTRLPQGFKNSPTLFNEALHRDLASFRALNPQVVMLQYVDDLLVAAPTYRDCKEGTRRLLQELSKLGYRVSAKKAQLCREEVTYLGYLLKGGKRWLTPARKATVMKIPTPTTPRQVREFLGKAGFCRLFIPGFASLAAPLYPLTRPKVPFTWTEAHQEAFGRIKEALLSAPALALPDLTKPFALYVDEKEGVARGVLTQTLGPWRRPVAYLSKKLDPVASGWPTCLKAIAAVALLLKDADKLTLGQNVLVIAPHNLESIVRQPPDRWMTNARMTHYQSLLLNERVSFAPPAILNPATLLPVESDDTPIHICSEILAEETGTRPDLRDQPLPGVPAWYTDGSSFIMDGRRQAGAAIVDNKRTVWASNLPEGTSAQKAELIALTQALRLAEGKSINIYTDSRYAFATAHVHGAIYKQRGWLTSAGKDIKNKEEILALLEAIHLPKRVAIIHCPGHQRGTDPVATGNRKADEAAKQAAQSTRILTETTKNAGKRTADGSEFEKRTADGSEFESPKKKAKVE

SEQ ID NO: 6944 - protein, 2218 aa, synthetic construct
MPAAKRVKLDGGDKKYSIGLDIGTNSVGWAVITDEYKVPSKKFKVLGNTDRHSIKKNLIGALLFDSGETAEATRLKRTARRRYTRRKNRICYLQEIFSNEMAKVDDSFFHRLEESFLVEEDKKHERHPIFGNIVDEVAYHEKYPTIYHLRKKLVDSTDKADLRLIYLALAHMIKFRGHFLIEGDLNPDNSDVDKLFIQLVQTYNQLFEENPINASGVDAKAILSARLSKSRRLENLIAQLPGEKKNGLFGNLIALSLGLTPNFKSNFDLAEDAKLQLSKDTYDDDLDNLLAQIGDQYADLFLAAKNLSDAILLSDILRVNTEITKAPLSASMIKRYDEHHQDLTLLKALVRQQLPEKYKEIFFDQSKNGYAGYIDGGASQEEFYKFIKPILEKMDGTEELLVKLNREDLLRKQRTFDNGSIPHQIHLGELHAILRRQEDFYPFLKDNREKIEKILTFRIPYYVGPLARGNSRFAWMTRKSEETITPWNFEEVVDKGASAQSFIERMTNFDKNLPNEKVLPKHSLLYEYFTVYNELTKVKYVTEGMRKPAFLSGEQKKAIVDLLFKTNRKVTVKQLKEDYFKKIECFDSVEISGVEDRFNASLGTYHDLLKIIKDKDFLDNEENEDILEDIVLTLTLFEDREMIEERLKTYAHLFDDKVMKQLKRRRYTGWGRLSRKLINGIRDKQSGKTILDFLKSDGFANRNFMQLIHDDSLTFKEDIQKAQVSGQGDSLHEHIANLAGSPAIKKGILQTVKVVDELVKVMGRHKPENIVIEMARENQTTQKGQKNSRERMKRIEEGIKELGSQILKEHPVENTQLQNEKLYLYYLQNGRDMYVDQELDINRLSDYDVDHIVPQSFLKDDSIDNKVLTRSDKARGKSDNVPSEEVVKKMKNYWRQLLNAKLITQRKFDNLTKAERGGLSELDKAGFIKRQLVETRQITKHVAQILDSRMNTKYDENDKLIREVKVITLKSKLVSDFRKDFQFYKVREINNYHHAHDAYLNAVVGTALIKKYPKLESEFVYGDYKVYDVRKMIAKSEQEIGKATAKYFFYSNIMNFFKTEITLANGEIRKRPLIETNGETGEIVWDKGRDFATVRKVLSMPQVNIVKKTEVQTGGFSKESILPKRNSDKLIARKKDWDPKKYGGFDSPTVAYSVLVVAKVEKGKSKKLKSVKELLGITIMERSSFEKNPIDFLEAKGYKEVKKDLIIKLPKYSLFELENGRKRMLASAGELQKGNELALPSKYVNFLYLASHYEKLKGSPEDNEQKQLFVEQHKHYLDEIIEQISEFSKRVILADANLDKVLSAYNKHRDKPIREQAENIIHLFTLTNLGAPAAFKYFDTTIDRKRYTSTKEVLDATLIHQSITGLYETRIDLSQLGGDGGEAAAKGGSGGGGGTLGDQGSRGSDPLPEPRVTLTVEGIPTEFLVNTGAEHSVLTKPMGKMGSKRTVVAGATGSKVYPWTTKRLLKIGQKQVTHSFLVIPECPAPLLGRDLLTKLKAQIQFSTEGPQVTWEDRPAMCLVLNLEEEYRLHEKPVPPSIDPSWLQLFPMVWAEKAGMGLANQVPPVVVELKSDASPVAVRQYPMSKEAREGIRPHIQRFLDLGILVPCQSPWNTPLLPVKKPGTNDYRPVQDLREVNKRVQDIHPTVPNPYNLLSSLPPSHTWYSVLDLKDAFFCLKLHPNSQPLFAFEWRDPEKGNTGQLTWTRLPQGFKNSPTLFNEALHRDLASFRALNPQVVMLQYVDDLLVAAPTYRDCKEGTRRLLQELSKLGYRVSAKKAQLCREEVTYLGYLLKGGKRWLTPARKATVMKIPTPTTPRQVREFLGTAGFCRLWIPGFASLAAPLYPLTRPKVPFTWTEAHQEAFGRIKEALLSAPALALPDLTKPFALYVDEKEGVARGVLTQTLGPWRRPVAYLSKKLDPVASGWPTCLKAIAAVALLLKDADKLTLGQNVLVIAPHNLESIVRQPPDRWMTNARMTHYQSLLLNERVSFAPPAILNPATLLPVESDDTPIHICSEILAEETGTRPDLRDQPLPGVPAWYTDGSSFIMDGRRQAGAAIVDNKRTVWASNLPEGTSAQKAELIALTQALRLAEGKSINIYTDSRYAFATAHVHGAIYKQRGWLTSAGKDIKNKEEILALLEAIHLPKRVAIIHCPGHQRGTDPVATGNRKADEAAKQAAQSTRILTETTKNAGKRTADGSEFEKRTADGSEFESPKKKAKVE

SEQ ID NO: 6945 - protein, 2218 aa, synthetic construct
MPAAKRVKLDGGDKKYSIGLDIGTNSVGWAVITDEYKVPSKKFKVLGNTDRHSIKKNLIGALLFDSGETAEATRLKRTARRRYTRRKNRICYLQEIFSNEMAKVDDSFFHRLEESFLVEEDKKHERHPIFGNIVDEVAYHEKYPTIYHLRKKLVDSTDKADLRLIYLALAHMIKFRGHFLIEGDLNPDNSDVDKLFIQLVQTYNQLFEENPINASGVDAKAILSARLSKSRRLENLIAQLPGEKKNGLFGNLIALSLGLTPNFKSNFDLAEDAKLQLSKDTYDDDLDNLLAQIGDQYADLFLAAKNLSDAILLSDILRVNTEITKAPLSASMIKRYDEHHQDLTLLKALVRQQLPEKYKEIFFDQSKNGYAGYIDGGASQEEFYKFIKPILEKMDGTEELLVKLNREDLLRKQRTFDNGSIPHQIHLGELHAILRRQEDFYPFLKDNREKIEKILTFRIPYYVGPLARGNSRFAWMTRKSEETITPWNFEEVVDKGASAQSFIERMTNFDKNLPNEKVLPKHSLLYEYFTVYNELTKVKYVTEGMRKPAFLSGEQKKAIVDLLFKTNRKVTVKQLKEDYFKKIECFDSVEISGVEDRFNASLGTYHDLLKIIKDKDFLDNEENEDILEDIVLTLTLFEDREMIEERLKTYAHLFDDKVMKQLKRRRYTGWGRLSRKLINGIRDKQSGKTILDFLKSDGFANRNFMQLIHDDSLTFKEDIQKAQVSGQGDSLHEHIANLAGSPAIKKGILQTVKVVDELVKVMGRHKPENIVIEMARENQTTQKGQKNSRERMKRIEEGIKELGSQILKEHPVENTQLQNEKLYLYYLQNGRDMYVDQELDINRLSDYDVDHIVPQSFLKDDSIDNKVLTRSDKARGKSDNVPSEEVVKKMKNYWRQLLNAKLITQRKFDNLTKAERGGLSELDKAGFIKRQLVETRQITKHVAQILDSRMNTKYDENDKLIREVKVITLKSKLVSDFRKDFQFYKVREINNYHHAHDAYLNAVVGTALIKKYPKLESEFVYGDYKVYDVRKMIAKSEQEIGKATAKYFFYSNIMNFFKTEITLANGEIRKRPLIETNGETGEIVWDKGRDFATVRKVLSMPQVNIVKKTEVQTGGFSKESILPKRNSDKLIARKKDWDPKKYGGFDSPTVAYSVLVVAKVEKGKSKKLKSVKELLGITIMERSSFEKNPIDFLEAKGYKEVKKDLIIKLPKYSLFELENGRKRMLASAGELQKGNELALPSKYVNFLYLASHYEKLKGSPEDNEQKQLFVEQHKHYLDEIIEQISEFSKRVILADANLDKVLSAYNKHRDKPIREQAENIIHLFTLTNLGAPAAFKYFDTTIDRKRYTSTKEVLDATLIHQSITGLYETRIDLSQLGGDGGEAAAKGGSGGGGGTLGDQGSRGSDPLPEPRVTLTVEGIPTEFLVNTGAEHSVLTKPMGKMGSKRTVVAGATGSKVYPWTTKRLLKIGQKQVTHSFLVIPECPAPLLGRDLLTKLKAQIQFSTEGPQVTWEDRPAMCLVLNLEEEYRLHEKPVPPSIDPSWLQLFPMVWAEKAGMGLANQVPPVVVELKSDASPVAVRQYPMSKEAREGIRPHIQRFLDLGILVPCQSPWNTPLLPVKKPGTNDYRPVQDLREVNKRVQDIHPTVPNPYNLLSSLPPSHTWYSVLDLKDAFFCLKLHPNSQPLFAFEWRDPEKGNTGQLTWTRLPQGFKNSPTLFNEALHRDLASFRALNPQVVMLQYVDDLLVAAPTYRDCKEGTRRLLQELSKLGYRVSAKKAQLCREEVTYLGYLLKGGKRWLTPARKATVMKIPTPTTPRQVREFLGKAGFCRLFIPGFASLAAPLYPLTRPKVPFTWTEAHQEAFGRIKEALLSAPALALPDLTKPFALYVDEKEGVARGVLTQTLGPWRRPVAYLSKKLDPVASGWPTCLKAIAAVALLLKDADKLTLGQNVLVIAPHNLESIVRQPPDRWMTNARMTHYQSLLLNERVSFAPPAILNPATLLPVESDDTPIHICSEILAEETGTRPDLRDQPLPGVPAWYTDGSSFIMDGRRQAGAAIVDNKRTVWASNLPEGTSAQKAELIALTQALRLAEGKSINIYTDSRYAFATAHVHGAIYKQRGWLTSAGKDIKNKEEILALLEAIHLPKRVAIIHCPGHQRGTDPVATGNRKADEAAKQAAQSTRILTETTKNAGKRTADGSEFEKRTADGSEFESPKKKAKVE

SEQ ID NO: 6946 - protein, 2096 aa, synthetic construct
MPAAKRVKLDGGDKKYSIGLDIGTNSVGWAVITDEYKVPSKKFKVLGNTDRHSIKKNLIGALLFDSGETAEATRLKRTARRRYTRRKNRICYLQEIFSNEMAKVDDSFFHRLEESFLVEEDKKHERHPIFGNIVDEVAYHEKYPTIYHLRKKLVDSTDKADLRLIYLALAHMIKFRGHFLIEGDLNPDNSDVDKLFIQLVQTYNQLFEENPINASGVDAKAILSARLSKSRRLENLIAQLPGEKKNGLFGNLIALSLGLTPNFKSNFDLAEDAKLQLSKDTYDDDLDNLLAQIGDQYADLFLAAKNLSDAILLSDILRVNTEITKAPLSASMIKRYDEHHQDLTLLKALVRQQLPEKYKEIFFDQSKNGYAGYIDGGASQEEFYKFIKPILEKMDGTEELLVKLNREDLLRKQRTFDNGSIPHQIHLGELHAILRRQEDFYPFLKDNREKIEKILTFRIPYYVGPLARGNSRFAWMTRKSEETITPWNFEEVVDKGASAQSFIERMTNFDKNLPNEKVLPKHSLLYEYFTVYNELTKVKYVTEGMRKPAFLSGEQKKAIVDLLFKTNRKVTVKQLKEDYFKKIECFDSVEISGVEDRFNASLGTYHDLLKIIKDKDFLDNEENEDILEDIVLTLTLFEDREMIEERLKTYAHLFDDKVMKQLKRRRYTGWGRLSRKLINGIRDKQSGKTILDFLKSDGFANRNFMQLIHDDSLTFKEDIQKAQVSGQGDSLHEHIANLAGSPAIKKGILQTVKVVDELVKVMGRHKPENIVIEMARENQTTQKGQKNSRERMKRIEEGIKELGSQILKEHPVENTQLQNEKLYLYYLQNGRDMYVDQELDINRLSDYDVDHIVPQSFLKDDSIDNKVLTRSDKARGKSDNVPSEEVVKKMKNYWRQLLNAKLITQRKFDNLTKAERGGLSELDKAGFIKRQLVETRQITKHVAQILDSRMNTKYDENDKLIREVKVITLKSKLVSDFRKDFQFYKVREINNYHHAHDAYLNAVVGTALIKKYPKLESEFVYGDYKVYDVRKMIAKSEQEIGKATAKYFFYSNIMNFFKTEITLANGEIRKRPLIETNGETGEIVWDKGRDFATVRKVLSMPQVNIVKKTEVQTGGFSKESILPKRNSDKLIARKKDWDPKKYGGFDSPTVAYSVLVVAKVEKGKSKKLKSVKELLGITIMERSSFEKNPIDFLEAKGYKEVKKDLIIKLPKYSLFELENGRKRMLASAGELQKGNELALPSKYVNFLYLASHYEKLKGSPEDNEQKQLFVEQHKHYLDEIIEQISEFSKRVILADANLDKVLSAYNKHRDKPIREQAENIIHLFTLTNLGAPAAFKYFDTTIDRKRYTSTKEVLDATLIHQSITGLYETRIDLSQLGGDGGEAAAKGGSGGGGGTLNLEDEYRLYETSAEPEVSPGSTWLSDFPQAWAETGGMGLAVRQAPLIIPLKATSTPVSIKQYPMSQEAKLGIKPHIQRLLDQGILVPCQSPWNTPLLPVKKPGTNDYRPVQDLREVNKRVEDIHPTVPNPYNLLSGLPPSHRWYTVLDLKDAFFCLRLHPTSQPLFAFEWRDPGMGISGQLTWTRLPQGFKNSPTLFNEALHRDLADFRIQHPDLILLQYVDDILLAATSELDCQQGTRALLLTLGNLGYRASAKKAQLCQKQVKYLGYLLKEGQRWLTEARKETVMGQPTPKTPRQLREFLGTAGFCRLWIPGFAEMAAPLYPLTKPGTLFNWGPDQQKAYQEIKQALLTAPALGLPDLTKPFELFVDEKQGYAKGVLTQKLGPWRRPVAYLSKKLDPVAAGWPPCLRMVAAIAVLRKDAGKLTMGQPLVILAPHAVEALVKQPPDRWLSNARMTHYQAMLLDTDRVQFGPVVALNPATLLPLPEEGAPHDCLEILAETHGTRPDLTDQPIPDADHTWYTDGSSFLQEGQRKAGAAVTTETEVIWARALPAGTSAQRAELIALTQALKMAEGKRLNVYTDSRYAFATAHIHGEIYRRRGWLTSEGREIKNKSEILALLKALFLPKRLSIIHCLGHQKGDSAEARGNRLADQAAREAAIKTPPDTSTLLAGKRTADGSEFEKRTADGSEFESPKKKAKVE

SEQ ID NO: 6947 - protein, 2096 aa, synthetic construct
MPAAKRVKLDGGDKKYSIGLDIGTNSVGWAVITDEYKVPSKKFKVLGNTDRHSIKKNLIGALLFDSGETAEATRLKRTARRRYTRRKNRICYLQEIFSNEMAKVDDSFFHRLEESFLVEEDKKHERHPIFGNIVDEVAYHEKYPTIYHLRKKLVDSTDKADLRLIYLALAHMIKFRGHFLIEGDLNPDNSDVDKLFIQLVQTYNQLFEENPINASGVDAKAILSARLSKSRRLENLIAQLPGEKKNGLFGNLIALSLGLTPNFKSNFDLAEDAKLQLSKDTYDDDLDNLLAQIGDQYADLFLAAKNLSDAILLSDILRVNTEITKAPLSASMIKRYDEHHQDLTLLKALVRQQLPEKYKEIFFDQSKNGYAGYIDGGASQEEFYKFIKPILEKMDGTEELLVKLNREDLLRKQRTFDNGSIPHQIHLGELHAILRRQEDFYPFLKDNREKIEKILTFRIPYYVGPLARGNSRFAWMTRKSEETITPWNFEEVVDKGASAQSFIERMTNFDKNLPNEKVLPKHSLLYEYFTVYNELTKVKYVTEGMRKPAFLSGEQKKAIVDLLFKTNRKVTVKQLKEDYFKKIECFDSVEISGVEDRFNASLGTYHDLLKIIKDKDFLDNEENEDILEDIVLTLTLFEDREMIEERLKTYAHLFDDKVMKQLKRRRYTGWGRLSRKLINGIRDKQSGKTILDFLKSDGFANRNFMQLIHDDSLTFKEDIQKAQVSGQGDSLHEHIANLAGSPAIKKGILQTVKVVDELVKVMGRHKPENIVIEMARENQTTQKGQKNSRERMKRIEEGIKELGSQILKEHPVENTQLQNEKLYLYYLQNGRDMYVDQELDINRLSDYDVDHIVPQSFLKDDSIDNKVLTRSDKARGKSDNVPSEEVVKKMKNYWRQLLNAKLITQRKFDNLTKAERGGLSELDKAGFIKRQLVETRQITKHVAQILDSRMNTKYDENDKLIREVKVITLKSKLVSDFRKDFQFYKVREINNYHHAHDAYLNAVVGTALIKKYPKLESEFVYGDYKVYDVRKMIAKSEQEIGKATAKYFFYSNIMNFFKTEITLANGEIRKRPLIETNGETGEIVWDKGRDFATVRKVLSMPQVNIVKKTEVQTGGFSKESILPKRNSDKLIARKKDWDPKKYGGFDSPTVAYSVLVVAKVEKGKSKKLKSVKELLGITIMERSSFEKNPIDFLEAKGYKEVKKDLIIKLPKYSLFELENGRKRMLASAGELQKGNELALPSKYVNFLYLASHYEKLKGSPEDNEQKQLFVEQHKHYLDEIIEQISEFSKRVILADANLDKVLSAYNKHRDKPIREQAENIIHLFTLTNLGAPAAFKYFDTTIDRKRYTSTKEVLDATLIHQSITGLYETRIDLSQLGGDGGEAAAKGGSGGGGGLGIEDEYRLHETSTEPDVSLGSTWLSDFPQAWAETGGMGLAVRQAPLIIPLKATSTPVSIQQYPMSHEARLGIKPHIQRLLDQGILVPCQSPWNTPLLPVKKPGTNDYRPVQDLREVNKRVEDIHPTVPNPYNLLSGLPPSHQWYTVLDLKDAFFCLRLHPTSQPLFAFEWRDPGMGISGQLTWTRLPQGFKNSPTLFNEALHRDLADFRIQHPDLILLQYVDDILLAATSELDCQQGTRALLQTLGDLGYRASAKKAQICQKQVKYLGYLLREGQRWLTEARKETVMGQPVPKTPRQLREFLGKAGFCRLFIPGFAEMAAPLYPLTKPGTLFSWGPDQQKAYQEIKQALLTAPALGLPDLTKPFELFVDEKQGYAKGVLTQKLGPWRRPVAYLSKKLDPVAAGWPPCLRMVAAIAVLTKDAGKLTMGQPLVILAPHAVEALVKQPPDRWLSNARMTHYQAMLLDTDRVQFGPVVALNPATLLPLPEEGAPHDCLEILAETHGTRPDLTDQPIPDADHTWYTDGSSFLQEGQRKAGAAVTTETEVIWAGALPAGTSAQRAELIALTQALKMAEGKRLNVYTDSRYAFATAHIHGEIYRRRGWLTSEGREIKNKSEILALLKALFLPKRLSIIHCLGHQKGDSAEARGNRLADQAAREAAIKTPPDTSTLLIAGKRTADGSEFEKRTADGSEFESPKKKAKVE

SEQ ID NO: 6948 - protein, 2096 aa, synthetic construct; identical to SEQ ID NO: 6947

SEQ ID NO: 6949 - protein, 2096 aa, synthetic construct
MPAAKRVKLDGGDKKYSIGLDIGTNSVGWAVITDEYKVPSKKFKVLGNTDRHSIKKNLIGALLFDSGETAEATRLKRTARRRYTRRKNRICYLQEIFSNEMAKVDDSFFHRLEESFLVEEDKKHERHPIFGNIVDEVAYHEKYPTIYHLRKKLVDSTDKADLRLIYLALAHMIKFRGHFLIEGDLNPDNSDVDKLFIQLVQTYNQLFEENPINASGVDAKAILSARLSKSRRLENLIAQLPGEKKNGLFGNLIALSLGLTPNFKSNFDLAEDAKLQLSKDTYDDDLDNLLAQIGDQYADLFLAAKNLSDAILLSDILRVNTEITKAPLSASMIKRYDEHHQDLTLLKALVRQQLPEKYKEIFFDQSKNGYAGYIDGGASQEEFYKFIKPILEKMDGTEELLVKLNREDLLRKQRTFDNGSIPHQIHLGELHAILRRQEDFYPFLKDNREKIEKILTFRIPYYVGPLARGNSRFAWMTRKSEETITPWNFEEVVDKGASAQSFIERMTNFDKNLPNEKVLPKHSLLYEYFTVYNELTKVKYVTEGMRKPAFLSGEQKKAIVDLLFKTNRKVTVKQLKEDYFKKIECFDSVEISGVEDRFNASLGTYHDLLKIIKDKDFLDNEENEDILEDIVLTLTLFEDREMIEERLKTYAHLFDDKVMKQLKRRRYTGWGRLSRKLINGIRDKQSGKTILDFLKSDGFANRNFMQLIHDDSLTFKEDIQKAQVSGQGDSLHEHIANLAGSPAIKKGILQTVKVVDELVKVMGRHKPENIVIEMARENQTTQKGQKNSRERMKRIEEGIKELGSQILKEHPVENTQLQNEKLYLYYLQNGRDMYVDQELDINRLSDYDVDHIVPQSFLKDDSIDNKVLTRSDKARGKSDNVPSEEVVKKMKNYWRQLLNAKLITQRKFDNLTKAERGGLSELDKAGFIKRQLVETRQITKHVAQILDSRMNTKYDENDKLIREVKVITLKSKLVSDFRKDFQFYKVREINNYHHAHDAYLNAVVGTALIKKYPKLESEFVYGDYKVYDVRKMIAKSEQEIGKATAKYFFYSNIMNFFKTEITLANGEIRKRPLIETNGETGEIVWDKGRDFATVRKVLSMPQVNIVKKTEVQTGGFSKESILPKRNSDKLIARKKDWDPKKYGGFDSPTVAYSVLVVAKVEKGKSKKLKSVKELLGITIMERSSFEKNPIDFLEAKGYKEVKKDLIIKLPKYSLFELENGRKRMLASAGELQKGNELALPSKYVNFLYLASHYEKLKGSPEDNEQKQLFVEQHKHYLDEIIEQISEFSKRVILADANLDKVLSAYNKHRDKPIREQAENIIHLFTLTNLGAPAAFKYFDTTIDRKRYTSTKEVLDATLIHQSITGLYETRIDLSQLGGDGGEAAAKGGSGGGGGTLNIEDEYRLHETSKEPDVSLGSTWLSDFPQAWAETGGMGLAVRQAPLIIPLKATSTPVSIKQYPMSQEARLGIKPHIQRLLDQGILVPCQSPWNTPLLPVKKPGTNDYRPVQDLREVNKRVEDIHPTVPNPYNLLSGLPPSHQWYTVLDLKDAFFCLRLHPTSQPLFAFEWRDPEMGISGQLTWTRLPQGFKNSPTLFNEALHRDLAGFRIQHPDLILLQYVDDLLLAATSELDCQQGTRALLQTLGDLGYRASAKKAQICQKQVKYLGYLLKEGQRWLTEARKETVMGQPIPKTPRQLREFLGTAGFCRLWIPGFAEMAAPLYPLTKPGTLFNWGPDQQKAFQEIKQALLTAPALGLPDLTKPFELFVDEKQGYAKGVLTQKLGPWRRPVAYLSKKLDPVAAGWPPCLRMVAAIAVLTKDAGKLTMGQPLVILAPHAVEALVKQPPDRWLSNARMTHYQALLLDTDRVQFGPVVALNPATLLPLPEEGLQHDCLDILAEAHGTRSDLMDQPLPDADHTWYTDGSSFLQEGQRKAGAAVTTETEVIWARALPAGTSAQRAELIALTQALKMAEGKKLNVYTDSRYAFATAHIHGEIYRRRGWLTSEGKEIKNKDEILALLKALFLPKRLSIIHCPGHQKGNSAEARGNRMADQAAREVATRETPETSTLLAGKRTADGSEFEKRTADGSEFESPKKKAKVE

SEQ ID NO: 6950 - protein, 2090 aa, synthetic construct
MPAAKRVKLDGGDKKYSIGLDIGTNSVGWAVITDEYKVPSKKFKVLGNTDRHSIKKNLIGALLFDSGETAEATRLKRTARRRYTRRKNRICYLQEIFSNEMAKVDDSFFHRLEESFLVEEDKKHERHPIFGNIVDEVAYHEKYPTIYHLRKKLVDSTDKADLRLIYLALAHMIKFRGHFLIEGDLNPDNSDVDKLFIQLVQTYNQLFEENPINASGVDAKAILSARLSKSRRLENLIAQLPGEKKNGLFGNLIALSLGLTPNFKSNFDLAEDAKLQLSKDTYDDDLDNLLAQIGDQYADLFLAAKNLSDAILLSDILRVNTEITKAPLSASMIKRYDEHHQDLTLLKALVRQQLPEKYKEIFFDQSKNGYAGYIDGGASQEEFYKFIKPILEKMDGTEELLVKLNREDLLRKQRTFDNGSIPHQIHLGELHAILRRQEDFYPFLKDNREKIEKILTFRIPYYVGPLARGNSRFAWMTRKSEETITPWNFEEVVDKGASAQSFIERMTNFDKNLPNEKVLPKHSLLYEYFTVYNELTKVKYVTEGMRKPAFLSGEQKKAIVDLLFKTNRKVTVKQLKEDYFKKIECFDSVEISGVEDRFNASLGTYHDLLKIIKDKDFLDNEENEDILEDIVLTLTLFEDREMIEERLKTYAHLFDDKVMKQLKRRRYTGWGRLSRKLINGIRDKQSGKTILDFLKSDGFANRNFMQLIHDDSLTFKEDIQKAQVSGQGDSLHEHIANLAGSPAIKKGILQTVKVVDELVKVMGRHKPENIVIEMARENQTTQKGQKNSRERMKRIEEGIKELGSQILKEHPVENTQLQNEKLYLYYLQNGRDMYVDQELDINRLSDYDVDHIVPQSFLKDDSIDNKVLTRSDKARGKSDNVPSEEVVKKMKNYWRQLLNAKLITQRKFDNLTKAERGGLSELDKAGFIKRQLVETRQITKHVAQILDSRMNTKYDENDKLIREVKVITLKSKLVSDFRKDFQFYKVREINNYHHAHDAYLNAVVGTALIKKYPKLESEFVYGDYKVYDVRKMIAKSEQEIGKATAKYFFYSNIMNFFKTEITLANGEIRKRPLIETNGETGEIVWDKGRDFATVRKVLSMPQVNIVKKTEVQTGGFSKESILPKRNSDKLIARKKDWDPKKYGGFDSPTVAYSVLVVAKVEKGKSKKLKSVKELLGITIMERSSFEKNPIDFLEAKGYKEVKKDLIIKLPKYSLFELENGRKRMLASAGELQKGNELALPSKYVNFLYLASHYEKLKGSPEDNEQKQLFVEQHKHYLDEIIEQISEFSKRVILADANLDKVLSAYNKHRDKPIREQAENIIHLFTLTNLGAPAAFKYFDTTIDRKRYTSTKEVLDATLIHQSITGLYETRIDLSQLGGDGGEAAAKGGSGGGGGTLQLDDEYRLYSPLVKPDQNIQFWLEQFPQAWAETAGMGLAKQVPPQVIQLKASATPVSVRQYPLSKEAQEGIRPHVQRLIQQGILVPVQSPWNTPLLPVRKPGTNDYRPVQDLREVNKRVQDIHPTVPNPYNLLCALPPQRSWYTVLDLKDAFFCLRLHPTSQPLFAFEWRDPGTGRTGQLTWTRLPQGFKNSPTIFDEALHRDLANFRIQHPQVTLLQYVDDLLLAGATKQDCLEGTKALLLELSDLGYRASAKKAQICRREVTYLGYSLRDGQRWLTEARKKTVVQIPAPTTAKQVREFLGTAGFCRLWIPGFATLAAPLYPLTKEKGEFSWAPEHQKAFDAIKKALLSAPALALPDVTKPFTLYVDERKGVARGVLTQTLGPWRRPVAYLSKKLDPVASGWPVCLKAIAAVAILVKDADKLTLGQNITVIAPHALENIVRQPPDRWMTNARMTHYQSLLLTERVTFAPPAALNPATLLPEETDEPVTHDCHQLLIEETGVRKDLTDIPLTGEVLTWFTDGSSYVVEGKRMAGAAVVDGTRTIWASSLPEGTSAQKAELMALTQALRLAEGKSINIYTDSRYAFATAHVHGAIYKQRGLLTSAGREIKNKEEILSLLEALHLPKRLAIIHCPGHQKAKDPISRGNQMADRVAKQAAQGVNLLAGKRTADGSEFEKRTADGSEFESPKKKAKVE

SEQ ID NO: 6951 - protein, 2087 aa, synthetic construct
MPAAKRVKLDGGDKKYSIGLDIGTNSVGWAVITDEYKVPSKKFKVLGNTDRHSIKKNLIGALLFDSGETAEATRLKRTARRRYTRRKNRICYLQEIFSNEMAKVDDSFFHRLEESFLVEEDKKHERHPIFGNIVDEVAYHEKYPTIYHLRKKLVDSTDKADLRLIYLALAHMIKFRGHFLIEGDLNPDNSDVDKLFIQLVQTYNQLFEENPINASGVDAKAILSARLSKSRRLENLIAQLPGEKKNGLFGNLIALSLGLTPNFKSNFDLAEDAKLQLSKDTYDDDLDNLLAQIGDQYADLFLAAKNLSDAILLSDILRVNTEITKAPLSASMIKRYDEHHQDLTLLKALVRQQLPEKYKEIFFDQSKNGYAGYIDGGASQEEFYKFIKPILEKMDGTEELLVKLNREDLLRKQRTFDNGSIPHQIHLGELHAILRRQEDFYPFLKDNREKIEKILTFRIPYYVGPLARGNSRFAWMTRKSEETITPWNFEEVVDKGASAQSFIERMTNFDKNLPNEKVLPKHSLLYEYFTVYNELTKVKYVTEGMRKPAFLSGEQKKAIVDLLFKTNRKVTVKQLKEDYFKKIECFDSVEISGVEDRFNASLGTYHDLLKIIKDKDFLDNEENEDILEDIVLTLTLFEDREMIEERLKTYAHLFDDKVMKQLKRRRYTGWGRLSRKLINGIRDKQSGKTILDFLKSDGFANRNFMQLIHDDSLTFKEDIQKAQVSGQGDSLHEHIANLAGSPAIKKGILQTVKVVDELVKVMGRHKPENIVIEMARENQTTQKGQKNSRERMKRIEEGIKELGSQILKEHPVENTQLQNEKLYLYYLQNGRDMYVDQELDINRLSDYDVDHIVPQSFLKDDSIDNKVLTRSDKARGKSDNVPSEEVVKKMKNYWRQLLNAKLITQRKFDNLTKAERGGLSELDKAGFIKRQLVETRQITKHVAQILDSRMNTKYDENDKLIREVKVITLKSKLVSDFRKDFQFYKVREINNYHHAHDAYLNAVVGTALIKKYPKLESEFVYGDYKVYDVRKMIAKSEQEIGKATAKYFFYSNIMNFFKTEITLANGEIRKRPLIETNGETGEIVWDKGRDFATVRKVLSMPQVNIVKKTEVQTGGFSKESILPKRNSDKLIARKKDWDPKKYGGFDSPTVAYSVLVVAKVEKGKSKKLKSVKELLGITIMERSSFEKNPIDFLEAKGYKEVKKDLIIKLPKYSLFELENGRKRMLASAGELQKGNELALPSKYVNFLYLASHYEKLKGSPEDNEQKQLFVEQHKHYLDEIIEQISEFSKRVILADANLDKVLSAYNKHRDKPIREQAENIIHLFTLTNLGAPAAFKYFDTTIDRKRYTSTKEVLDATLIHQSITGLYETRIDLSQLGGDGGEAAAKGGSGGGGGIPWLMKKPLQLTTLVPLQEYEERLLKQTMLTGSYKEKLQSLFLKYDALWQHWENQVGHRRIKPHHIATGTVNPRPQKQYPINPKAKASIQTVINDLLKQGVLIQQNSIMNTPVYPVPKPDGKWRMVLDYREVNKTIPLIAAQNQHSAGILSSIFRGKYKTTLDLSNGFWAHSITPESYWLTAFTWLGQQYCWTRLPQGFLNSPALFTADVVDLLKEVPNVQVYVDDIYISHDDPREHLEQLEKVFSLLLNAGYVVSLKKSEIAQHEVEFLGFNITKEGRGLTETFKQKLLNITPPRDLKQLQSILGLLNFARNFIPNFSELVKPLYNIIATANGKYITWTTDNSQQLQNIISMLNSAENLEERNPEVRLIMKVNTSPSAGYIRFYNEFAKRPIMYLNYVYTKAEVKFTNTEKLLTTIHKGLIKALDLGMGQEILVYSPIVSMTKIQKTPLPERKALPIRWITWMSYLEDPRIQFHYDKTLPELQQVPTVTDDIIAKIKHPSEFSMVFYTDGSAIKHPNVNKSHNAGMGIAQVQFKPEFTVINTWSIPLGDHTAQLAEVAAVEFACKKALKIDGPVLIVTDSFYVAESVNKELPYWQSNGFFNNKKKPLKHVSKWKSIADCIQLKPDIIIIHEKGHQPTASTFHTEGNNLADKLATQGSYVVNAGKRTADGSEFEKRTADGSEFESPKKKAKVE

SEQ ID NO: 6952 - protein, 2176 aa, synthetic construct
MPAAKRVKLDGGDKKYSIGLDIGTNSVGWAVITDEYKVPSKKFKVLGNTDRHSIKKNLIGALLFDSGETAEATRLKRTARRRYTRRKNRICYLQEIFSNEMAKVDDSFFHRLEESFLVEEDKKHERHPIFGNIVDEVAYHEKYPTIYHLRKKLVDSTDKADLRLIYLALAHMIKFRGHFLIEGDLNPDNSDVDKLFIQLVQTYNQLFEENPINASGVDAKAILSARLSKSRRLENLIAQLPGEKKNGLFGNLIALSLGLTPNFKSNFDLAEDAKLQLSKDTYDDDLDNLLAQIGDQYADLFLAAKNLSDAILLSDILRVNTEITKAPLSASMIKRYDEHHQDLTLLKALVRQQLPEKYKEIFFDQSKNGYAGYIDGGASQEEFYKFIKPILEKMDGTEELLVKLNREDLLRKQRTFDNGSIPHQIHLGELHAILRRQEDFYPFLKDNREKIEKILTFRIPYYVGPLARGNSRFAWMTRKSEETITPWNFEEVVDKGASAQSFIERMTNFDKNLPNEKVLPKHSLLYEYFTVYNELTKVKYVTEGMRKPAFLSGEQKKAIVDLLFKTNRKVTVKQLKEDYFKKIECFDSVEISGVEDRFNASLGTYHDLLKIIKDKDFLDNEENEDILEDIVLTLTLFEDREMIEERLKTYAHLFDDKVMKQLKRRRYTGWGRLSRKLINGIRDKQSGKTILDFLKSDGFANRNFMQLIHDDSLTFKEDIQKAQVSGQGDSLHEHIANLAGSPAIKKGILQTVKVVDELVKVMGRHKPENIVIEMARENQTTQKGQKNSRERMKRIEEGIKELGSQILKEHPVENTQLQNEKLYLYYLQNGRDMYVDQELDINRLSDYDVDHIVPQSFLKDDSIDNKVLTRSDKARGKSDNVPSEEVVKKMKNYWRQLLNAKLITQRKFDNLTKAERGGLSELDKAGFIKRQLVETRQITKHVAQILDSRMNTKYDENDKLIREVKVITLKSKLVSDFRKDFQFYKVREINNYHHAHDAYLNAVVGTALIKKYPKLESEFVYGDYKVYDVRKMIAKSEQEIGKATAKYFFYSNIMNFFKTEITLANGEIRKRPLIETNGETGEIVWDKGRDFATVRKVLSMPQVNIVKKTEVQTGGFSKESILPKRNSDKLIARKKDWDPKKYGGFDSPTVAYSVLVVAKVEKGKSKKLKSVKELLGITIMERSSFEKNPIDFLEAKGYKEVKKDLIIKLPKYSLFELENGRKRMLASAGELQKGNELALPSKYVNFLYLASHYEKLKGSPEDNEQKQLFVEQHKHYLDEIIEQISEFSKRVILADANLDKVLSAYNKHRDKPIREQAENIIHLFTLTNLGAPAAFKYFDTTIDRKRYTSTKEVLDATLIHQSITGLYETRIDLSQLGGDGGEAAAKGGSGGGGGMDPLQLLQPLEAEIKGTKLKAHWNSGATITCVPQAFLEEEVPIKNIWIKTIHGEKEQPVYYLTFKIQGRKVEAEVISSPYDYILVSPSDIPWLMKKPLQLTTLVPLQEYEERLLKQTMLTGSYKEKLQSLFLKYDALWQHWENQVGHRRIKPHHIATGTVNPRPQKQYPINPKAKASIQTVINDLLKQGVLIQQNSIMNTPVYPVPKPDGKWRMVLDYREVNKTIPLIAAQNQHSAGILSSIFRGKYKTTLDLSNGFWAHSITPESYWLTAFTWLGQQYCWTRLPQGFLNSPALFNADVVDLLKEVPNVQVYVDDIYISHDDPREHLEQLEKVFSLLLNAGYVVSLKKSEIAQHEVEFLGFNITKEGRGLTETFKQKLLNITPPRDLKQLQSILGKLNFARNFIPNFSELVKPLYNIIATAPGKYITWTTDNSQQLQNIISMLNSAENLEERNPEVRLIMKVNTSPSAGYIRFYNEFAKRPIMYLNYVYTKAEVKFTNTEKLLTTIHKGLIKALDLGMGQEILVYSPIVSMTKIQKTPLPERKALPIRWITWMSYLEDPRIQFHYDKTLPELQQVPTVTDDIIAKIKHPSEFSMVFYTDGSAIKHPNVNKSHNAGMGIAQVQFKPEFTVINTWSIPLGDHTAQLAEVAAVEFACKKALKIDGPVLIVTDSFYVAESVNKELPYWQSNGFFNNKKKPLKHVSKWKSIADCIQLKPDIIIIHEKGHQPTASTFHTEGNNLADKLATQGSYVVNAGKRTADGSEFEKRTADGSEFESPKKKAKVE

SEQ ID NO: 6953 - protein, 2094 aa, synthetic construct
MPAAKRVKLDGGDKKYSIGLDIGTNSVGWAVITDEYKVPSKKFKVLGNTDRHSIKKNLIGALLFDSGETAEATRLKRTARRRYTRRKNRICYLQEIFSNEMAKVDDSFFHRLEESFLVEEDKKHERHPIFGNIVDEVAYHEKYPTIYHLRKKLVDSTDKADLRLIYLALAHMIKFRGHFLIEGDLNPDNSDVDKLFIQLVQTYNQLFEENPINASGVDAKAILSARLSKSRRLENLIAQLPGEKKNGLFGNLIALSLGLTPNFKSNFDLAEDAKLQLSKDTYDDDLDNLLAQIGDQYADLFLAAKNLSDAILLSDILRVNTEITKAPLSASMIKRYDEHHQDLTLLKALVRQQLPEKYKEIFFDQSKNGYAGYIDGGASQEEFYKFIKPILEKMDGTEELLVKLNREDLLRKQRTFDNGSIPHQIHLGELHAILRRQEDFYPFLKDNREKIEKILTFRIPYYVGPLARGNSRFAWMTRKSEETITPWNFEEVVDKGASAQSFIERMTNFDKNLPNEKVLPKHSLLYEYFTVYNELTKVKYVTEGMRKPAFLSGEQKKAIVDLLFKTNRKVTVKQLKEDYFKKIECFDSVEISGVEDRFNASLGTYHDLLKIIKDKDFLDNEENEDILEDIVLTLTLFEDREMIEERLKTYAHLFDDKVMKQLKRRRYTGWGRLSRKLINGIRDKQSGKTILDFLKSDGFANRNFMQLIHDDSLTFKEDIQKAQVSGQGDSLHEHIANLAGSPAIKKGILQTVKVVDELVKVMGRHKPENIVIEMARENQTTQKGQKNSRERMKRIEEGIKELGSQILKEHPVENTQLQNEKLYLYYLQNGRDMYVDQELDINRLSDYDVDHIVPQSFLKDDSIDNKVLTRSDKARGKSDNVPSEEVVKKMKNYWRQLLNAKLITQRKFDNLTKAERGGLSELDKAGFIKRQLVETRQITKHVAQILDSRMNTKYDENDKLIREVKVITLKSKLVSDFRKDFQFYKVREINNYHHAHDAYLNAVVGTALIKKYPKLESEFVYGDYKVYDVRKMIAKSEQEIGKATAKYFFYSNIMNFFKTEITLANGEIRKRPLIETNGETGEIVWDKGRDFATVRKVLSMPQVNIVKKTEVQTGGFSKESILPKRNSDKLIARKKDWDPKKYGGFDSPTVAYSVLVVAKVEKGKSKKLKSVKELLGITIMERSSFEKNPIDFLEAKGYKEVKKDLIIKLPKYSLFELENGRKRMLASAGELQKGNELALPSKYVNFLYLASHYEKLKGSPEDNEQKQLFVEQHKHYLDEIIEQISEFSKRVILADANLDKVLSAYNKHRDKPIREQAENIIHLFTLTNLGAPAAFKYFDTTIDRKRYTSTKEVLDATLIHQSITGLYETRIDLSQLGGDGGEAAAKGGSGGGGGVLNLEEEYRLHEKPVPSSIDPSWLQLFPTVWAERAGMGLANQVPPVVVELRSGASPVAVRQYPMSKEAREGIRPHIQRFLDLGVLVPCQSPWNTPLLPVKKPGTNDYRPVQDLREINKRVQDIHPTVPNPYNLLSSLPPSHTWYSVLDLKDAFFCLKLHPNSQPLFAFEWRDPEKGNTGQLTWTRLPQGFKNSPTLFNEALHRDLAPFRALNPQVVLLQYVDDLLVAAPTYRDCKEGTQKLLQELSKLGYRVSAKKAQLCQKEVTYLGYLLKEGKRWLTPARKATVMKIPPPTTPRQVREFLGTAGFCRLWIPGFASLAAPLYPLTKPSIPFIWTEEHQKAFDRIKEALLSAPALALPDLTKPFTLYVDERAGVARGVLTQTLGPWRRPVAYLSKKLDPVASGWPTCLKAVAAVALLLKDADKLTLGQNVTVIASHSLESIVRQPPDRWMTNARMTHYQSLLLNERVSFAPPAVLNPATLLPVESEATPVHRCSEILAEETGTRRDLKDQPLPGVPAWYTDGSSFIAEGKRRAGAAIVDGKRTVWASSLPEGTSAQKAELVALTQALRLAEGKDINIYTDSRYAFATAHIHGAIYKQRGWLTSAGKDIKNKEEILALLEAIHLPKRVAIIHCPGHQKGNDPVATGNRRADEAAKQAALSTRVLAETTKPAGKRTADGSEFEKRTADGSEFESPKKKAKVE

SEQ ID NO: 6954 - protein, 2094 aa, synthetic construct
MPAAKRVKLDGGDKKYSIGLDIGTNSVGWAVITDEYKVPSKKFKVLGNTDRHSIKKNLIGALLFDSGETAEATRLKRTARRRYTRRKNRICYLQEIFSNEMAKVDDSFFHRLEESFLVEEDKKHERHPIFGNIVDEVAYHEKYPTIYHLRKKLVDSTDKADLRLIYLALAHMIKFRGHFLIEGDLNPDNSDVDKLFIQLVQTYNQLFEENPINASGVDAKAILSARLSKSRRLENLIAQLPGEKKNGLFGNLIALSLGLTPNFKSNFDLAEDAKLQLSKDTYDDDLDNLLAQIGDQYADLFLAAKNLSDAILLSDILRVNTEITKAPLSASMIKRYDEHHQDLTLLKALVRQQLPEKYKEIFFDQSKNGYAGYIDGGASQEEFYKFIKPILEKMDGTEELLVKLNREDLLRKQRTFDNGSIPHQIHLGELHAILRRQEDFYPFLKDNREKIEKILTFRIPYYVGPLARGNSRFAWMTRKSEETITPWNFEEVVDKGASAQSFIERMTNFDKNLPNEKVLPKHSLLYEYFTVYNELTKVKYVTEGMRKPAFLSGEQKKAIVDLLFKTNRKVTVKQLKEDYFKKIECFDSVEISGVEDRFNASLGTYHDLLKIIKDKDFLDNEENEDILEDIVLTLTLFEDREMIEERLKTYAHLFDDKVMKQLKRRRYTGWGRLSRKLINGIRDKQSGKTILDFLKSDGFANRNFMQLIHDDSLTFKEDIQKAQVSGQGDSLHEHIANLAGSPAIKKGILQTVKVVDELVKVMGRHKPENIVIEMARENQTTQKGQKNSRERMKRIEEGIKELGSQILKEHPVENTQLQNEKLYLYYLQNGRDMYVDQELDINRLSDYDVDHIVPQSFLKDDSIDNKVLTRSDKARGKSDNVPSEEVVKKMKNYWRQLLNAKLITQRKFDNLTKAERGGLSELDKAGFIKRQLVETRQITKHVAQILDSRMNTKYDENDKLIREVKVITLKSKLVSDFRKDFQFYKVREINNYHHAHDAYLNAVVGTALIKKYPKLESEFVYGDYKVYDVRKMIAKSEQEIGKATAKYFFYSNIMNFFKTEITLANGEIRKRPLIETNGETGEIVWDKGRDFATVRKVLSMPQVNIVKKTEVQTGGFSKESILPKRNSDKLIARKKDWDPKKYGGFDSPTVAYSVLVVAKVEKGKSKKLKSVKELLGITIMERSSFEKNPIDFLEAKGYKEVKKDLIIKLPKYSLFELENGRKRMLASAGELQKGNELALPSKYVNFLYLASHYEKLKGSPEDNEQKQLFVEQHKHYLDEIIEQISEFSKRVILADANLDKVLSAYNKHRDKPIREQAENIIHLFTLTNLGAPAAFKYFDTTIDRKRYTSTKEVLDATLIHQSITGLYETRIDLSQLGGDGGEAAAKGGSGGGGGVLNLEEEYRLHEKPVPSSIDPSWLQLFPTVWAERAGMGLANQVPPVVVELRSGASPVAVRQYPMSKEAREGIRPHIQRFLDLGVLVPCQSPWNTPLLPVKKPGTNDYRPVQDLREINKRVQDIHPTVPNPYNLLSSLPPSHTWYSVLDLKDAFFCLKLHPNSQPLFAFEWRDPEKGNTGQLTWTRLPQGFKNSPTLFNEALHRDLAPFRALNPQVVLLQYVDDLLVAAPTYRDCKEGTQKLLQELSKLGYRVSAKKAQLCQKEVTYLGYLLKEGKRWLTPARKATVMKIPPPTTPRQVREFLGKAGFCRLFIPGFASLAAPLYPLTKPSIPFIWTEEHQKAFDRIKEALLSAPALALPDLTKPFTLYVDERAGVARGVLTQTLGPWRRPVAYLSKKLDPVASGWPTCLKAVAAVALLLKDADKLTLGQNVTVIASHSLESIVRQPPDRWMTNARMTHYQSLLLNERVSFAPPAVLNPATLLPVESEATPVHRCSEILAEETGTRRDLKDQPLPGVPAWYTDGSSFIAEGKRRAGAAIVDGKRTVWASSLPEGTSAQKAELVALTQALRLAEGKDINIYTDSRYAFATAHIHGAIYKQRGWLTSAGKDIKNKEEILALLEAIHLPKRVAIIHCPGHQKGNDPVATGNRRADEAAKQAALSTRVLAETTKPAGKRTADGSEFEKRTADGSEFESPKKKAKVE

SEQ ID NO: 6955 - protein, 2096 aa, synthetic construct
MPAAKRVKLDGGDKKYSIGLDIGTNSVGWAVITDEYKVPSKKFKVLGNTDRHSIKKNLIGALLFDSGETAEATRLKRTARRRYTRRKNRICYLQEIFSNEMAKVDDSFFHRLEESFLVEEDKKHERHPIFGNIVDEVAYHEKYPTIYHLRKKLVDSTDKADLRLIYLALAHMIKFRGHFLIEGDLNPDNSDVDKLFIQLVQTYNQLFEENPINASGVDAKAILSARLSKSRRLENLIAQLPGEKKNGLFGNLIALSLGLTPNFKSNFDLAEDAKLQLSKDTYDDDLDNLLAQIGDQYADLFLAAKNLSDAILLSDILRVNTEITKAPLSASMIKRYDEHHQDLTLLKALVRQQLPEKYKEIFFDQSKNGYAGYIDGGASQEEFYKFIKPILEKMDGTEELLVKLNREDLLRKQRTFDNGSIPHQIHLGELHAILRRQEDFYPFLKDNREKIEKILTFRIPYYVGPLARGNSRFAWMTRKSEETITPWNFEEVVDKGASAQSFIERMTNFDKNLPNEKVLPKHSLLYEYFTVYNELTKVKYVTEGMRKPAFLSGEQKKAIVDLLFKTNRKVTVKQLKEDYFKKIECFDSVEISGVEDRFNASLGTYHDLLKIIKDKDFLDNEENEDILEDIVLTLTLFEDREMIEERLKTYAHLFDDKVMKQLKRRRYTGWGRLSRKLINGIRDKQSGKTILDFLKSDGFANRNFMQLIHDDSLTFKEDIQKAQVSGQGDSLHEHIANLAGSPAIKKGILQTVKVVDELVKVMGRHKPENIVIEMARENQTTQKGQKNSRERMKRIEEGIKELGSQILKEHPVENTQLQNEKLYLYYLQNGRDMYVDQELDINRLSDYDVDHIVPQSFLKDDSIDNKVLTRSDKARGKSDNVPSEEVVKKMKNYWRQLLNAKLITQRKFDNLTKAERGGLSELDKAGFIKRQLVETRQITKHVAQILDSRMNTKYDENDKLIREVKVITLKSKLVSDFRKDFQFYKVREINNYHHAHDAYLNAVVGTALIKKYPKLESEFVYGDYKVYDVRKMIAKSEQEIGKATAKYFFYSNIMNFFKTEITLANGEIRKRPLIETNGETGEIVWDKGRDFATVRKVLSMPQVNIVKKTEVQTGGFSKESILPKRNSDKLIARKKDWDPKKYGGFDSPTVAYSVLVVAKVEKGKSKKLKSVKELLGITIMERSSFEKNPIDFLEAKGYKEVKKDLIIKLPKYSLFELENGRKRMLASAGELQKGNELALPSKYVNFLYLASHYEKLKGSPEDNEQKQLFVEQHKHYLDEIIEQISEFSKRVILADANLDKVLSAYNKHRDKPIREQAENIIHLFTLTNLGAPAAFKYFDTTIDRKRYTSTKEVLDATLIHQSITGLYETRIDLSQLGGDGGEAAAKGGSGGGGGTLNIEDEYRLHETSKEPDVPLGSTWLSDFPQAWAETGGMGLAVRQAPLIIPLKATSTPVSIKQYPMSQEARLGIKPHIQRLLDQGILVPCQSPWNTPLLPVKKPGTNDYRPVQDLREVNKRVEDIHPTVPNPYNLLSGLPPSHQWYTVLDLKDAFFCLRLHPTSQPLFAFEWRDPEMGISGQLTWTRLPQGFKNSPTLFDEALHRDLADFRIQHPDLILLQYVDDLLLAATSEQDCQRGTRALLQTLGNLGYRASAKKAQICQKQVKYLGYLLKEGQRWLTEARKETVMGQPTPKTPRQLREFLGTAGFCRLWIPGFAEMAAPLYPLTKTGTLFNWGPDQQKAYQEIKQALLTAPALGLPDLTKPFELFVDEKQGYAKGVLTQKLGPWRRPVAYLSKKLDPVAAGWPPCLRMVAAIAVLTKDAGKLTMGQPLVILAPHAVEALVKQPPDRWLSNARMTHYQAMLLDTDRVQFGPVVALNPATLLPLPEKEAPHDCLEILAETHGTRPDLTDQPIPDADYTWYTDGSSFLQEGQRRAGAAVTTETEVIWARALPAGTSAQRAELIALTQALKMAEGKKLNVYTDSRYAFATAHVHGEIYRRRGLLTSEGREIKNKNEILALLKALFLPKRLSIIHCPGHQKGNSAEARGNRMADQAAREAAMKAVLETSTLLAGKRTADGSEFEKRTADGSEFESPKKKAKVE

SEQ ID NO: 6956 - protein, 2096 aa, synthetic construct
MPAAKRVKLDGGDKKYSIGLDIGTNSVGWAVITDEYKVPSKKFKVLGNTDRHSIKKNLIGALLFDSGETAEATRLKRTARRRYTRRKNRICYLQEIFSNEMAKVDDSFFHRLEESFLVEEDKKHERHPIFGNIVDEVAYHEKYPTIYHLRKKLVDSTDKADLRLIYLALAHMIKFRGHFLIEGDLNPDNSDVDKLFIQLVQTYNQLFEENPINASGVDAKAILSARLSKSRRLENLIAQLPGEKKNGLFGNLIALSLGLTPNFKSNFDLAEDAKLQLSKDTYDDDLDNLLAQIGDQYADLFLAAKNLSDAILLSDILRVNTEITKAPLSASMIKRYDEHHQDLTLLKALVRQQLPEKYKEIFFDQSKNGYAGYIDGGASQEEFYKFIKPILEKMDGTEELLVKLNREDLLRKQRTFDNGSIPHQIHLGELHAILRRQEDFYPFLKDNREKIEKILTFRIPYYVGPLARGNSRFAWMTRKSEETITPWNFEEVVDKGASAQSFIERMTNFDKNLPNEKVLPKHSLLYEYFTVYNELTKVKYVTEGMRKPAFLSGEQKKAIVDLLFKTNRKVTVKQLKEDYFKKIECFDSVEISGVEDRFNASLGTYHDLLKIIKDKDFLDNEENEDILEDIVLTLTLFEDREMIEERLKTYAHLFDDKVMKQLKRRRYTGWGRLSRKLINGIRDKQSGKTILDFLKSDGFANRNFMQLIHDDSLTFKEDIQKAQVSGQGDSLHEHIANLAGSPAIKKGILQTVKVVDELVKVMGRHKPENIVIEMARENQTTQKGQKNSRERMKRIEEGIKELGSQILKEHPVENTQLQNEKLYLYYLQNGRDMYVDQELDINRLSDYDVDHIVPQSFLKDDSIDNKVLTRSDKARGKSDNVPSEEVVKKMKNYWRQLLNAKLITQRKFDNLTKAERGGLSELDKAGFIKRQLVETRQITKHVAQILDSRMNTKYDENDKLIREVKVITLKSKLVSDFRKDFQFYKVREINNYHHAHDAYLNAVVGTALIKKYPKLESEFVYGDYKVYDVRKMIAKSEQEIGKATAKYFFYSNIMNFFKTEITLANGEIRKRPLIETNGETGEIVWDKGRDFATVRKVLSMPQVNIVKKTEVQTGGFSKESILPKRNSDKLIARKKDWDPKKYGGFDSPTVAYSVLVVAKVEKGKSKKLKSVKELLGITIMERSSFEKNPIDFLEAKGYKEVKKDLIIKLPKYSLFELENGRKRMLASAGELQKGNELALPSKYVNFLYLASHYEKLKGSPEDNEQKQLFVEQHKHYLDEIIEQISEFSKRVILADANLDKVLSAYNKHRDKPIREQAENIIHLFTLTNLGAPAAFKYFDTTIDRKRYTSTKEVLDATLIHQSITGLYETRIDLSQLGGDGGEAAAKGGSGGGGGTLNIEDEYRLHETSKEPDVPLGSTWLSDFPQAWAETGGMGLAVRQAPLIIPLKATSTPVSIKQYPMSQEARLGIKPHIQRLLDQGILVPCQSPWNTPLLPVKKPGTNDYRPVQDLREVNKRVEDIHPTVPNPYNLLSGLPPSHQWYTVLDLKDAFFCLRLHPTSQPLFAFEWRDPEMGISGQLTWTRLPQGFKNSPTLFNEALHRDLADFRIQHPDLILLQYVDDLLLAATSEQDCQRGTRALLQTLGNLGYRASAKKAQICQKQVKYLGYLLKEGQRWLTEARKETVMGQPTPKTPRQLREFLGTAGFCRLWIPGFAEMAAPLYPLTKPGTLFNWGPDQQKAYQEIKQALLTAPALGLPDLTKPFELFVDEKQGYAKGVLTQKLGPWRRPVAYLSKKLDPVAAGWPPCLRMVAAIAVLTKDAGKLTMGQPLVILAPHAVEALVKQPPDRWLSNARMTHYQAMLLDTDRVQFGPVVALNPATLLPLPEKEAPHDCLEILAETHGTRPDLTDQPIPDADYTWYTDGSSFLQEGQRRAGAAVTTETEVIWARALPAGTSAQRAELIALTQALKMAEGKKLNVYTDSRYAFATAHVHGEIYRRRGWLTSEGREIKNKNEILALLKALFLPKRLSIIHCPGHQKGNSAEARGNRMADQAAREAAMKAVLETSTLLAGKRTADGSEFEKRTADGSEFESPKKKAKVE

SEQ ID NO: 6957 - protein, 2102 aa, synthetic construct
MPAAKRVKLDGGDKKYSIGLDIGTNSVGWAVITDEYKVPSKKFKVLGNTDRHSIKKNLIGALLFDSGETAEATRLKRTARRRYTRRKNRICYLQEIFSNEMAKVDDSFFHRLEESFLVEEDKKHERHPIFGNIVDEVAYHEKYPTIYHLRKKLVDSTDKADLRLIYLALAHMIKFRGHFLIEGDLNPDNSDVDKLFIQLVQTYNQLFEENPINASGVDAKAILSARLSKSRRLENLIAQLPGEKKNGLFGNLIALSLGLTPNFKSNFDLAEDAKLQLSKDTYDDDLDNLLAQIGDQYADLFLAAKNLSDAILLSDILRVNTEITKAPLSASMIKRYDEHHQDLTLLKALVRQQLPEKYKEIFFDQSKNGYAGYIDGGASQEEFYKFIKPILEKMDGTEELLVKLNREDLLRKQRTFDNGSIPHQIHLGELHAILRRQEDFYPFLKDNREKIEKILTFRIPYYVGPLARGNSRFAWMTRKSEETITPWNFEEVVDKGASAQSFIERMTNFDKNLPNEKVLPKHSLLYEYFTVYNELTKVKYVTEGMRKPAFLSGEQKKAIVDLLFKTNRKVTVKQLKEDYFKKIECFDSVEISGVEDRFNASLGTYHDLLKIIKDKDFLDNEENEDILEDIVLTLTLFEDREMIEERLKTYAHLFDDKVMKQLKRRRYTGWGRLSRKLINGIRDKQSGKTILDFLKSDGFANRNFMQLIHDDSLTFKEDIQKAQVSGQGDSLHEHIANLAGSPAIKKGILQTVKVVDELVKVMGRHKPENIVIEMARENQTTQKGQKNSRERMKRIEEGIKELGSQILKEHPVENTQLQNEKLYLYYLQNGRDMYVDQELDINRLSDYDVDHIVPQSFLKDDSIDNKVLTRSDKARGKSDNVPSEEVVKKMKNYWRQLLNAKLITQRKFDNLTKAERGGLSELDKAGFIKRQLVETRQITKHVAQILDSRMNTKYDENDKLIREVKVITLKSKLVSDFRKDFQFYKVREINNYHHAHDAYLNAVVGTALIKKYPKLESEFVYGDYKVYDVRKMIAKSEQEIGKATAKYFFYSNIMNFFKTEITLANGEIRKRPLIETNGETGEIVWDKGRDFATVRKVLSMPQVNIVKKTEVQTGGFSKESILPKRNSDKLIARKKDWDPKKYGGFDSPTVAYSVLVVAKVEKGKSKKLKSVKELLGITIMERSSFEKNPIDFLEAKGYKEVKKDLIIKLPKYSLFELENGRKRMLASAGELQKGNELALPSKYVNFLYLASHYEKLKGSPEDNEQKQLFVEQHKHYLDEIIEQISEFSKRVILADANLDKVLSAYNKHRDKPIREQAENIIHLFTLTNLGAPAAFKYFDTTIDRKRYTSTKEVLDATLIHQSITGLYETRIDLSQLGGDGGEAAAKGGGGGSGGTVSLQDEHRLFDIPVTTSLPDVWLQDFPQAWAETGGLGRAKCQAPIIIDLKPTAVPVSIKQYPMSLEAHMGIRQHIIKFLELGVLRPCRSPWNTPLLPVKKPGTQDYRPVQDLREINKRTVDIHPTVPNPYNLLSTLKPDYSWYTVLDLKDAFFCLPLAPQSQELFAFEWKDPERGISGQLTWTRLPQGFKNSPTLFNEALHRDLTDFRTQHPEVTLLQYVDDLLLAAPTKKACTQGTRHLLQELGEKGYRASAKKAQICQTKVTYLGYILSEGKRWLTPGRIETVARIPPPRNPREVREFLGKAGFCRLFIPGFAELAAPLYALTKPSTPFTWQTEHQLAFEALKKALLSAPALGLPDTSKPFTLFLDERQGIAKGVLTQKLGPWKRPVAYLSKKLDPVAAGWPPCLRIMAATAMLVKDSAKLTLGQPLTVITPHTLEAIVRQPPDRWITNARLTHYQALLLDTDRVQFGPPVTLNPATLLPVPENQPSPHDCRQVLAETHGTREDLKDQELPDADHTWYTDGSSYLDSGTRRAGAAVVDGHNTIWAQSLPPGTSAQKAELIALTKALELSKGKKANIYTDSRYAFATAHTHGSIYERRGWLTSEGKEIKNKAEIIALLKALFLPQEVAIIHCPGHQKGQDPVAVGNRQADRVARQAAMAEVLTLATEPDNTSHITAGKRTADGSEFEKRTADGSEFESPKKKAKVE

SEQ ID NO: 6958 - protein, 2095 aa, synthetic construct
MPAAKRVKLDGGDKKYSIGLDIGTNSVGWAVITDEYKVPSKKFKVLGNTDRHSIKKNLIGALLFDSGETAEATRLKRTARRRYTRRKNRICYLQEIFSNEMAKVDDSFFHRLEESFLVEEDKKHERHPIFGNIVDEVAYHEKYPTIYHLRKKLVDSTDKADLRLIYLALAHMIKFRGHFLIEGDLNPDNSDVDKLFIQLVQTYNQLFEENPINASGVDAKAILSARLSKSRRLENLIAQLPGEKKNGLFGNLIALSLGLTPNFKSNFDLAEDAKLQLSKDTYDDDLDNLLAQIGDQYADLFLAAKNLSDAILLSDILRVNTEITKAPLSASMIKRYDEHHQDLTLLKALVRQQLPEKYKEIFFDQSKNGYAGYIDGGASQEEFYKFIKPILEKMDGTEELLVKLNREDLLRKQRTFDNGSIPHQIHLGELHAILRRQEDFYPFLKDNREKIEKILTFRIPYYVGPLARGNSRFAWMTRKSEETITPWNFEEVVDKGASAQSFIERMTNFDKNLPNEKVLPKHSLLYEYFTVYNELTKVKYVTEGMRKPAFLSGEQKKAIVDLLFKTNRKVTVKQLKEDYFKKIECFDSVEISGVEDRFNASLGTYHDLLKIIKDKDFLDNEENEDILEDIVLTLTLFEDREMIEERLKTYAHLFDDKVMKQLKRRRYTGWGRLSRKLINGIRDKQSGKTILDFLKSDGFANRNFMQLIHDDSLTFKEDIQKAQVSGQGDSLHEHIANLAGSPAIKKGILQTVKVVDELVKVMGRHKPENIVIEMARENQTTQKGQKNSRERMKRIEEGIKELGSQILKEHPVENTQLQNEKLYLYYLQNGRDMYVDQELDINRLSDYDVDHIVPQSFLKDDSIDNKVLTRSDKARGKSDNVPSEEVVKKMKNYWRQLLNAKLITQRKFDNLTKAERGGLSELDKAGFIKRQLVETRQITKHVAQILDSRMNTKYDENDKLIREVKVITLKSKLVSDFRKDFQFYKVREINNYHHAHDAYLNAVVGTALIKKYPKLESEFVYGDYKVYDVRKMIAKSEQEIGKATAKYFFYSNIMNFFKTEITLANGEIRKRPLIETNGETGEIVWDKGRDFATVRKVLSMPQVNIVKKTEVQTGGFSKESILPKRNSDKLIARKKDWDPKKYGGFDSPTVAYSVLVVAKVEKGKSKKLKSVKELLGITIMERSSFEKNPIDFLEAKGYKEVKKDLIIKLPKYSLFELENGRKRMLASAGELQKGNELALPSKYVNFLYLASHYEKLKGSPEDNEQKQLFVEQHKHYLDEIIEQISEFSKRVILADANLDKVLSAYNKHRDKPIREQAENIIHLFTLTNLGAPAAFKYFDTTIDRKRYTSTKEVLDATLIHQSITGLYETRIDLSQLGGDGGEAAAKGGGGGSGGTLQLEEEYRLFEPESTQKQEMDIWLKNFPQAWAETGGMGTAHCQAPVLIQLKATATPISIRQYPMPHEAYQGIKPHIRRMLDQGILKPCQSPWNTPLLPVKKPGTEDYRPVQDLREVNKRVEDIHPTVPNPYNLLSTLPPSHPWYTVLDLKDAFFCLRLHSESQLLFAFEWRDPEIGLSGQLTWTRLPQGFKNSPTLFNEALHSDLADFRVRYPALVLLQYVDDLLLAAATRTECLEGTKALLETLGNKGYRASAKKAQICLQEVTYLGYSLKDGQRWLTKARKEAILSIPVPKNSRQVREFLGTAGYCRLWIPGFAELAAPLYPLTRPGTLFQWGTEQQLAFEDIKKALLSSPALGLPDITKPFELFIDENSGFAKGVLVQKLGPWKRPVAYLSKKLDTVASGWPPCLRMVAAIAILVKDAGKLTLGQPLTILTSHPVEALVRQPPNKWLSNARMTHYQAMLLDAERVHFGPTVSLNPATLLPLPSGGNHHDCLQILAETHGTRPDLTDQPLPDADLTWYTDGSSFIRNGEREAGAAVTTESEVIWAAPLPPGTSAQRAELIALTQALKMAEGKKLTVYTDSRYAFATTHVHGEIYRRRGWLTSEGKEIKNKNEILALLEALFLPKRLSIIHCPGHQKGDSPQAKGNRLADDTAKKAATETHSSLTVLPAGKRTADGSEFEKRTADGSEFESPKKKAKVE

SEQ ID NO: 6959 - protein, 2087 aa, synthetic construct
MPAAKRVKLDGGDKKYSIGLDIGTNSVGWAVITDEYKVPSKKFKVLGNTDRHSIKKNLIGALLFDSGETAEATRLKRTARRRYTRRKNRICYLQEIFSNEMAKVDDSFFHRLEESFLVEEDKKHERHPIFGNIVDEVAYHEKYPTIYHLRKKLVDSTDKADLRLIYLALAHMIKFRGHFLIEGDLNPDNSDVDKLFIQLVQTYNQLFEENPINASGVDAKAILSARLSKSRRLENLIAQLPGEKKNGLFGNLIALSLGLTPNFKSNFDLAEDAKLQLSKDTYDDDLDNLLAQIGDQYADLFLAAKNLSDAILLSDILRVNTEITKAPLSASMIKRYDEHHQDLTLLKALVRQQLPEKYKEIFFDQSKNGYAGYIDGGASQEEFYKFIKPILEKMDGTEELLVKLNREDLLRKQRTFDNGSIPHQIHLGELHAILRRQEDFYPFLKDNREKIEKILTFRIPYYVGPLARGNSRFAWMTRKSEETITPWNFEEVVDKGASAQSFIERMTNFDKNLPNEKVLPKHSLLYEYFTVYNELTKVKYVTEGMRKPAFLSGEQKKAIVDLLFKTNRKVTVKQLKEDYFKKIECFDSVEISGVEDRFNASLGTYHDLLKIIKDKDFLDNEENEDILEDIVLTLTLFEDREMIEERLKTYAHLFDDKVMKQLKRRRYTGWGRLSRKLINGIRDKQSGKTILDFLKSDGFANRNFMQLIHDDSLTFKEDIQKAQVSGQGDSLHEHIANLAGSPAIKKGILQTVKVVDELVKVMGRHKPENIVIEMARENQTTQKGQKNSRERMKRIEEGIKELGSQILKEHPVENTQLQNEKLYLYYLQNGRDMYVDQELDINRLSDYDVDHIVPQSFLKDDSIDNKVLTRSDKARGKSDNVPSEEVVKKMKNYWRQLLNAKLITQRKFDNLTKAERGGLSELDKAGFIKRQLVETRQITKHVAQILDSRMNTKYDENDKLIREVKVITLKSKLVSDFRKDFQFYKVREINNYHHAHDAYLNAVVGTALIKKYPKLESEFVYGDYKVYDVRKMIAKSEQEIGKATAKYFFYSNIMNFFKTEITLANGEIRKRPLIETNGETGEIVWDKGRDFATVRKVLSMPQVNIVKKTEVQTGGFSKESILPKRNSDKLIARKKDWDPKKYGGFDSPTVAYSVLVVAKVEKGKSKKLKSVKELLGITIMERSSFEKNPIDFLEAKGYKEVKKDLIIKLPKYSLFELENGRKRMLASAGELQKGNELALPSKYVNFLYLASHYEKLKGSPEDNEQKQLFVEQHKHYLDEIIEQISEFSKRVILADANLDKVLSAYNKHRDKPIREQAENIIHLFTLTNLGAPAAFKYFDTTIDRKRYTSTKEVLDATLIHQSITGLYETRIDLSQLGGDGGEAAAKGGGGGSGGVPWLTQQPLQLTILVPLQEYQEKILSKTALPEDQKQQLKTLFVKYDNLWQHWENQVGHRKIRPHNIATGDYPPRPQKQYPINPKAKPSIQIVIDDLLKQGVLTPQNSTMNTPVYPVPKPDGRWRMVLDYREVNKTIPLTAAQNQHSAGILATIVRQKYKTTLDLANGFWAHPITPESYWLTAFTWQGKQYCWTRLPQGFLNSPALFNADVVDLLKEIPNVQVYVDDIYLSHDDPKEHVQQLEKVFQILLQAGYVVSLKKSEIGQKTVEFLGFNITKEGRGLTDTFKTKLLNITPPKDLKQLQSILGKLNFARNFIPNFAELVQPLYNLIAPAKGKYIEWSEENTKQLNMVIEALNTASNLEERLPEQRLVIKVNTSPSAGYVRYYNETGKKPIMYLNYVFSKAELKFSMLEKLLTTMHKALIKAMDLAMGQEILVYSPIVSMTKIQKTPLPERKALPIRWITWMTYLEDPRIQFHYDKTLPELKHIPDVYTSSQSPVKHPSQYEGVFYTDGSAIKSPDPTKSNNAGMGIVHATYKPEYQVLNQWSIPLGNHTAQMAEIAAVEFACKKALKIPGPVLVITDSFYVAESANKELPYWKSNGFVNNKKKPLKHISKWKSIAECLSMKPDITIQHEKGISLQIPVFILKGNALADKLATQGSYVVNAGKRTADGSEFEKRTADGSEFESPKKKAKVE

SEQ ID NO: 6960 - protein, 2218 aa, synthetic construct
MPAAKRVKLDGGDKKYSIGLDIGTNSVGWAVITDEYKVPSKKFKVLGNTDRHSIKKNLIGALLFDSGETAEATRLKRTARRRYTRRKNRICYLQEIFSNEMAKVDDSFFHRLEESFLVEEDKKHERHPIFGNIVDEVAYHEKYPTIYHLRKKLVDSTDKADLRLIYLALAHMIKFRGHFLIEGDLNPDNSDVDKLFIQLVQTYNQLFEENPINASGVDAKAILSARLSKSRRLENLIAQLPGEKKNGLFGNLIALSLGLTPNFKSNFDLAEDAKLQLSKDTYDDDLDNLLAQIGDQYADLFLAAKNLSDAILLSDILRVNTEITKAPLSASMIKRYDEHHQDLTLLKALVRQQLPEKYKEIFFDQSKNGYAGYIDGGASQEEFYKFIKPILEKMDGTEELLVKLNREDLLRKQRTFDNGSIPHQIHLGELHAILRRQEDFYPFLKDNREKIEKILTFRIPYYVGPLARGNSRFAWMTRKSEETITPWNFEEVVDKGASAQSFIERMTNFDKNLPNEKVLPKHSLLYEYFTVYNELTKVKYVTEGMRKPAFLSGEQKKAIVDLLFKTNRKVTVKQLKEDYFKKIECFDSVEISGVEDRFNASLGTYHDLLKIIKDKDFLDNEENEDILEDIVLTLTLFEDREMIEERLKTYAHLFDDKVMKQLKRRRYTGWGRLSRKLINGIRDKQSGKTILDFLKSDGFANRNFMQLIHDDSLTFKEDIQKAQVSGQGDSLHEHIANLAGSPAIKKGILQTVKVVDELVKVMGRHKPENIVIEMARENQTTQKGQKNSRERMKRIEEGIKELGSQILKEHPVENTQLQNEKLYLYYLQNGRDMYVDQELDINRLSDYDVDHIVPQSFLKDDSIDNKVLTRSDKARGKSDNVPSEEVVKKMKNYWRQLLNAKLITQRKFDNLTKAERGGLSELDKAGFIKRQLVETRQITKHVAQILDSRMNTKYDENDKLIREVKVITLKSKLVSDFRKDFQFYKVREINNYHHAHDAYLNAVVGTALIKKYPKLESEFVYGDYKVYDVRKMIAKSEQEIGKATAKYFFYSNIMNFFKTEITLANGEIRKRPLIETNGETGEIVWDKGRDFATVRKVLSMPQVNIVKKTEVQTGGFSKESILPKRNSDKLIARKKDWDPKKYGGFDSPTVAYSVLVVAKVEKGKSKKLKSVKELLGITIMERSSFEKNPIDFLEAKGYKEVKKDLIIKLPKYSLFELENGRKRMLASAGELQKGNELALPSKYVNFLYLASHYEKLKGSPEDNEQKQLFVEQHKHYLDEIIEQISEFSKRVILADANLDKVLSAYNKHRDKPIREQAENIIHLFTLTNLGAPAAFKYFDTTIDRKRYTSTKEVLDATLIHQSITGLYETRIDLSQLGGDGGEAAAKGGGGGSGGTLGDQGSRGSDPLPEPRVTLTVEGIPTEFLVNTGAEHSVLTKPMGKMGSKRTVVAGATGSKVYPWTTKRLLKIGQKQVTHSFLVIPECPAPLLGRDLLTKLKAQIQFSTEGPQVTWEDRPAMCLVLNLEEEYRLHEKPVPPSIDPSWLQLFPMVWAEKAGMGLANQVPPVVVELKSDASPVAVRQYPMSKEAREGIRPHIQRFLDLGILVPCQSPWNTPLLPVKKPGTNDYRPVQDLREVNKRVQDIHPTVPNPYNLLSSLPPSHTWYSVLDLKDAFFCLKLHPNSQPLFAFEWRDPEKGNTGQLTWTRLPQGFKNSPTLFDEALHRDLASFRALNPQVVMLQYVDDLLVAAPTYRDCKEGTRRLLQELSKLGYRVSAKKAQLCREEVTYLGYLLKGGKRWLTPARKATVMKIPTPTTPRQVREFLGTAGFCRLWIPGFASLAAPLYPLTREKVPFTWTEAHQEAFGRIKEALLSAPALALPDLTKPFALYVDEKEGVARGVLTQTLGPWRRPVAYLSKKLDPVASGWPTCLKAIAAVALLLKDADKLTLGQNVLVIAPHNLESIVRQPPDRWMTNARMTHYQSLLLNERVSFAPPAILNPATLLPVESDDTPIHICSEILAEETGTRPDLRDQPLPGVPAWYTDGSSFIMDGRRQAGAAIVDNKRTVWASNLPEGTSAQKAELIALTQALRLAEGKSINIYTDSRYAFATAHVHGAIYKQRGLLTSAGKDIKNKEEILALLEAIHLPKRVAIIHCPGHQRGTDPVATGNRKADEAAKQAAQSTRILTETTKNAGKRTADGSEFEKRTADGSEFESPKKKAKVE

SEQ ID NO: 6961 - protein, 2218 aa, synthetic construct
MPAAKRVKLDGGDKKYSIGLDIGTNSVGWAVITDEYKVPSKKFKVLGNTDRHSIKKNLIGALLFDSGETAEATRLKRTARRRYTRRKNRICYLQEIFSNEMAKVDDSFFHRLEESFLVEEDKKHERHPIFGNIVDEVAYHEKYPTIYHLRKKLVDSTDKADLRLIYLALAHMIKFRGHFLIEGDLNPDNSDVDKLFIQLVQTYNQLFEENPINASGVDAKAILSARLSKSRRLENLIAQLPGEKKNGLFGNLIALSLGLTPNFKSNFDLAEDAKLQLSKDTYDDDLDNLLAQIGDQYADLFLAAKNLSDAILLSDILRVNTEITKAPLSASMIKRYDEHHQDLTLLKALVRQQLPEKYKEIFFDQSKNGYAGYIDGGASQEEFYKFIKPILEKMDGTEELLVKLNREDLLRKQRTFDNGSIPHQIHLGELHAILRRQEDFYPFLKDNREKIEKILTFRIPYYVGPLARGNSRFAWMTRKSEETITPWNFEEVVDKGASAQSFIERMTNFDKNLPNEKVLPKHSLLYEYFTVYNELTKVKYVTEGMRKPAFLSGEQKKAIVDLLFKTNRKVTVKQLKEDYFKKIECFDSVEISGVEDRFNASLGTYHDLLKIIKDKDFLDNEENEDILEDIVLTLTLFEDREMIEERLKTYAHLFDDKVMKQLKRRRYTGWGRLSRKLINGIRDKQSGKTILDFLKSDGFANRNFMQLIHDDSLTFKEDIQKAQVSGQGDSLHEHIANLAGSPAIKKGILQTVKVVDELVKVMGRHKPENIVIEMARENQTTQKGQKNSRERMKRIEEGIKELGSQILKEHPVENTQLQNEKLYLYYLQNGRDMYVDQELDINRLSDYDVDHIVPQSFLKDDSIDNKVLTRSDKARGKSDNVPSEEVVKKMKNYWRQLLNAKLITQRKFDNLTKAERGGLSELDKAGFIKRQLVETRQITKHVAQILDSRMNTKYDENDKLIREVKVITLKSKLVSDFRKDFQFYKVREINNYHHAHDAYLNAVVGTALIKKYPKLESEFVYGDYKVYDVRKMIAKSEQEIGKATAKYFFYSNIMNFFKTEITLANGEIRKRPLIETNGETGEIVWDKGRDFATVRKVLSMPQVNIVKKTEVQTGGFSKESILPKRNSDKLIARKKDWDPKKYGGFDSPTVAYSVLVVAKVEKGKSKKLKSVKELLGITIMERSSFEKNPIDFLEAKGYKEVKKDLIIKLPKYSLFELENGRKRMLASAGELQKGNELALPSKYVNFLYLASHYEKLKGSPEDNEQKQLFVEQHKHYLDEIIEQISEFSKRVILADANLDKVLSAYNKHRDKPIREQAENIIHLFTLTNLGAPAAFKYFDTTIDRKRYTSTKEVLDATLIHQSITGLYETRIDLSQLGGDGGEAAAKGGGGGSGGTLGDQGSRGSDPLPEPRVTLTVEGIPTEFLVNTGAEHSVLTKPMGKMGSKRTVVAGATGSKVYPWTTKRLLKIGQKQVTHSFLVIPECPAPLLGRDLLTKLKAQIQFSTEGPQVTWEDRPAMCLVLNLEEEYRLHEKPVPPSIDPSWLQLFPMVWAEKAGMGLANQVPPVVVELKSDASPVAVRQYPMSKEAREGIRPHIQRFLDLGILVPCQSPWNTPLLPVKKPGTNDYRPVQDLREVNKRVQDIHPTVPNPYNLLSSLPPSHTWYSVLDLKDAFFCLKLHPNSQPLFAFEWRDPEKGNTGQLTWTRLPQGFKNSPTLFNEALHRDLASFRALNPQVVMLQYVDDLLVAAPTYRDCKEGTRRLLQELSKLGYRVSAKKAQLCREEVTYLGYLLKGGKRWLTPARKATVMKIPTPTTPRQVREFLGTAGFCRLWIPGFASLAAPLYPLTRPKVPFTWTEAHQEAFGRIKEALLSAPALALPDLTKPFALYVDEKEGVARGVLTQTLGPWRRPVAYLSKKLDPVASGWPTCLKAIAAVALLLKDADKLTLGQNVLVIAPHNLESIVRQPPDRWMTNARMTHYQSLLLNERVSFAPPAILNPATLLPVESDDTPIHICSEILAEETGTRPDLRDQPLPGVPAWYTDGSSFIMDGRRQAGAAIVDNKRTVWASNLPEGTSAQKAELIALTQALRLAEGKSINIYTDSRYAFATAHVHGAIYKQRGWLTSAGKDIKNKEEILALLEAIHLPKRVAIIHCPGHQRGTDPVATGNRKADEAAKQAAQSTRILTETTKNAGKRTADGSEFEKRTADGSEFESPKKKAKVE

SEQ ID NO: 6962 - protein, 2218 aa, synthetic construct
MPAAKRVKLDGGDKKYSIGLDIGTNSVGWAVITDEYKVPSKKFKVLGNTDRHSIKKNLIGALLFDSGETAEATRLKRTARRRYTRRKNRICYLQEIFSNEMAKVDDSFFHRLEESFLVEEDKKHERHPIFGNIVDEVAYHEKYPTIYHLRKKLVDSTDKADLRLIYLALAHMIKFRGHFLIEGDLNPDNSDVDKLFIQLVQTYNQLFEENPINASGVDAKAILSARLSKSRRLENLIAQLPGEKKNGLFGNLIALSLGLTPNFKSNFDLAEDAKLQLSKDTYDDDLDNLLAQIGDQYADLFLAAKNLSDAILLSDILRVNTEITKAPLSASMIKRYDEHHQDLTLLKALVRQQLPEKYKEIFFDQSKNGYAGYIDGGASQEEFYKFIKPILEKMDGTEELLVKLNREDLLRKQRTFDNGSIPHQIHLGELHAILRRQEDFYPFLKDNREKIEKILTFRIPYYVGPLARGNSRFAWMTRKSEETITPWNFEEVVDKGASAQSFIERMTNFDKNLPNEKVLPKHSLLYEYFTVYNELTKVKYVTEGMRKPAFLSGEQKKAIVDLLFKTNRKVTVKQLKEDYFKKIECFDSVEISGVEDRFNASLGTYHDLLKIIKDKDFLDNEENEDILEDIVLTLTLFEDREMIEERLKTYAHLFDDKVMKQLKRRRYTGWGRLSRKLINGIRDKQSGKTILDFLKSDGFANRNFMQLIHDDSLTFKEDIQKAQVSGQGDSLHEHIANLAGSPAIKKGILQTVKVVDELVKVMGRHKPENIVIEMARENQTTQKGQKNSRERMKRIEEGIKELGSQILKEHPVENTQLQNEKLYLYYLQNGRDMYVDQELDINRLSDYDVDHIVPQSFLKDDSIDNKVLTRSDKARGKSDNVPSEEVVKKMKNYWRQLLNAKLITQRKFDNLTKAERGGLSELDKAGFIKRQLVETRQITKHVAQILDSRMNTKYDENDKLIREVKVITLKSKLVSDFRKDFQFYKVREINNYHHAHDAYLNAVVGTALIKKYPKLESEFVYGDYKVYDVRKMIAKSEQEIGKATAKYFFYSNIMNFFKTEITLANGEIRKRPLIETNGETGEIVWDKGRDFATVRKVLSMPQVNIVKKTEVQTGGFSKESILPKRNSDKLIARKKDWDPKKYGGFDSPTVAYSVLVVAKVEKGKSKKLKSVKELLGITIMERSSFEKNPIDFLEAKGYKEVKKDLIIKLPKYSLFELENGRKRMLASAGELQKGNELALPSKYVNFLYLASHYEKLKGSPEDNEQKQLFVEQHKHYLDEIIEQISEFSKRVILADANLDKVLSAYNKHRDKPIREQAENIIHLFTLTNLGAPAAFKYFDTTIDRKRYTSTKEVLDATLIHQSITGLYETRIDLSQLGGDGGEAAAKGGGGGSGGTLGDQGSRGSDPLPEPRVTLTVEGIPTEFLVNTGAEHSVLTKPMGKMGSKRTVVAGATGSKVYPWTTKRLLKIGQKQVTHSFLVIPECPAPLLGRDLLTKLKAQIQFSTEGPQVTWEDRPAMCLVLNLEEEYRLHEKPVPPSIDPSWLQLFPMVWAEKAGMGLANQVPPVVVELKSDASPVAVRQYPMSKEAREGIRPHIQRFLDLGILVPCQSPWNTPLLPVKKPGTNDYRPVQDLREVNKRVQDIHPTVPNPYNLLSSLPPSHTWYSVLDLKDAFFCLKLHPNSQPLFAFEWRDPEKGNTGQLTWTRLPQGFKNSPTLFNEALHRDLASFRALNPQVVMLQYVDDLLVAAPTYRDCKEGTRRLLQELSKLGYRVSAKKAQLCREEVTYLGYLLKGGKRWLTPARKATVMKIPTPTTPRQVREFLGKAGFCRLFIPGFASLAAPLYPLTRPKVPFTWTEAHQEAFGRIKEALLSAPALALPDLTKPFALYVDEKEGVARGVLTQTLGPWRRPVAYLSKKLDPVASGWPTCLKAIAAVALLLKDADKLTLGQNVLVIAPHNLESIVRQPPDRWMTNARMTHYQSLLLNERVSFAPPAILNPATLLPVESDDTPIHICSEILAEETGTRPDLRDQPLPGVPAWYTDGSSFIMDGRRQAGAAIVDNKRTVWASNLPEGTSAQKAELIALTQALRLAEGKSINIYTDSRYAFATAHVHGAIYKQRGWLTSAGKDIKNKEEILALLEAIHLPKRVAIIHCPGHQRGTDPVATGNRKADEAAKQAAQSTRILTETTKNAGKRTADGSEFEKRTADGSEFESPKKKAKVE

SEQ ID NO: 6963 - protein, 2096 aa, synthetic construct
MPAAKRVKLDGGDKKYSIGLDIGTNSVGWAVITDEYKVPSKKFKVLGNTDRHSIKKNLIGALLFDSGETAEATRLKRTARRRYTRRKNRICYLQEIFSNEMAKVDDSFFHRLEESFLVEEDKKHERHPIFGNIVDEVAYHEKYPTIYHLRKKLVDSTDKADLRLIYLALAHMIKFRGHFLIEGDLNPDNSDVDKLFIQLVQTYNQLFEENPINASGVDAKAILSARLSKSRRLENLIAQLPGEKKNGLFGNLIALSLGLTPNFKSNFDLAEDAKLQLSKDTYDDDLDNLLAQIGDQYADLFLAAKNLSDAILLSDILRVNTEITKAPLSASMIKRYDEHHQDLTLLKALVRQQLPEKYKEIFFDQSKNGYAGYIDGGASQEEFYKFIKPILEKMDGTEELLVKLNREDLLRKQRTFDNGSIPHQIHLGELHAILRRQEDFYPFLKDNREKIEKILTFRIPYYVGPLARGNSRFAWMTRKSEETITPWNFEEVVDKGASAQSFIERMTNFDKNLPNEKVLPKHSLLYEYFTVYNELTKVKYVTEGMRKPAFLSGEQKKAIVDLLFKTNRKVTVKQLKEDYFKKIECFDSVEISGVEDRFNASLGTYHDLLKIIKDKDFLDNEENEDILEDIVLTLTLFEDREMIEERLKTYAHLFDDKVMKQLKRRRYTGWGRLSRKLINGIRDKQSGKTILDFLKSDGFANRNFMQLIHDDSLTFKEDIQKAQVSGQGDSLHEHIANLAGSPAIKKGILQTVKVVDELVKVMGRHKPENIVIEMARENQTTQKGQKNSRERMKRIEEGIKELGSQILKEHPVENTQLQNEKLYLYYLQNGRDMYVDQELDINRLSDYDVDHIVPQSFLKDDSIDNKVLTRSDKARGKSDNVPSEEVVKKMKNYWRQLLNAKLITQRKFDNLTKAERGGLSELDKAGFIKRQLVETRQITKHVAQILDSRMNTKYDENDKLIREVKVITLKSKLVSDFRKDFQFYKVREINNYHHAHDAYLNAVVGTALIKKYPKLESEFVYGDYKVYDVRKMIAKSEQEIGKATAKYFFYSNIMNFFKTEITLANGEIRKRPLIETNGETGEIVWDKGRDFATVRKVLSMPQVNIVKKTEVQTGGFSKESILPKRNSDKLIARKKDWDPKKYGGFDSPTVAYSVLVVAKVEKGKSKKLKSVKELLGITIMERSSFEKNPIDFLEAKGYKEVKKDLIIKLPKYSLFELENGRKRMLASAGELQKGNELALPSKYVNFLYLASHYEKLKGSPEDNEQKQLFVEQHKHYLDEIIEQISEFSKRVILADANLDKVLSAYNKHRDKPIREQAENIIHLFTLTNLGAPAAFKYFDTTIDRKRYTSTKEVLDATLIHQSITGLYETRIDLSQLGGDGGEAAAKGGGGGSGGTLNLEDEYRLYETSAEPEVSPGSTWLSDFPQAWAETGGMGLAVRQAPLIIPLKATSTPVSIKQYPMSQEAKLGIKPHIQRLLDQGILVPCQSPWNTPLLPVKKPGTNDYRPVQDLREVNKRVEDIHPTVPNPYNLLSGLPPSHRWYTVLDLKDAFFCLRLHPTSQPLFAFEWRDPGMGISGQLTWTRLPQGFKNSPTLFNEALHRDLADFRIQHPDLILLQYVDDILLAATSELDCQQGTRALLLTLGNLGYRASAKKAQLCQKQVKYLGYLLKEGQRWLTEARKETVMGQPTPKTPRQLREFLGKAGFCRLFIPGFAEMAAPLYPLTKPGTLFNWGPDQQKAYQEIKQALLTAPALGLPDLTKPFELFVDEKQGYAKGVLTQKLGPWRRPVAYLSKKLDPVAAGWPPCLRMVAAIAVLRKDAGKLTMGQPLVILAPHAVEALVKQPPDRWLSNARMTHYQAMLLDTDRVQFGPVVALNPATLLPLPEEGAPHDCLEILAETHGTRPDLTDQPIPDADHTWYTDGSSFLQEGQRKAGAAVTTETEVIWARALPAGTSAQRAELIALTQALKMAEGKRLNVYTDSRYAFATAHIHGEIYRRRGWLTSEGREIKNKSEILALLKALFLPKRLSIIHCLGHQKGDSAEARGNRLADQAAREAAIKTPPDTSTLLAGKRTADGSEFEKRTADGSEFESPKKKAKVE

SEQ ID NO: 6964 - protein, 2096 aa, synthetic construct
MPAAKRVKLDGGDKKYSIGLDIGTNSVGWAVITDEYKVPSKKFKVLGNTDRHSIKKNLIGALLFDSGETAEATRLKRTARRRYTRRKNRICYLQEIFSNEMAKVDDSFFHRLEESFLVEEDKKHERHPIFGNIVDEVAYHEKYPTIYHLRKKLVDSTDKADLRLIYLALAHMIKFRGHFLIEGDLNPDNSDVDKLFIQLVQTYNQLFEENPINASGVDAKAILSARLSKSRRLENLIAQLPGEKKNGLFGNLIALSLGLTPNFKSNFDLAEDAKLQLSKDTYDDDLDNLLAQIGDQYADLFLAAKNLSDAILLSDILRVNTEITKAPLSASMIKRYDEHHQDLTLLKALVRQQLPEKYKEIFFDQSKNGYAGYIDGGASQEEFYKFIKPILEKMDGTEELLVKLNREDLLRKQRTFDNGSIPHQIHLGELHAILRRQEDFYPFLKDNREKIEKILTFRIPYYVGPLARGNSRFAWMTRKSEETITPWNFEEVVDKGASAQSFIERMTNFDKNLPNEKVLPKHSLLYEYFTVYNELTKVKYVTEGMRKPAFLSGEQKKAIVDLLFKTNRKVTVKQLKEDYFKKIECFDSVEISGVEDRFNASLGTYHDLLKIIKDKDFLDNEENEDILEDIVLTLTLFEDREMIEERLKTYAHLFDDKVMKQLKRRRYTGWGRLSRKLINGIRDKQSGKTILDFLKSDGFANRNFMQLIHDDSLTFKEDIQKAQVSGQGDSLHEHIANLAGSPAIKKGILQTVKVVDELVKVMGRHKPENIVIEMARENQTTQKGQKNSRERMKRIEEGIKELGSQILKEHPVENTQLQNEKLYLYYLQNGRDMYVDQELDINRLSDYDVDHIVPQSFLKDDSIDNKVLTRSDKARGKSDNVPSEEVVKKMKNYWRQLLNAKLITQRKFDNLTKAERGGLSELDKAGFIKRQLVETRQITKHVAQILDSRMNTKYDENDKLIREVKVITLKSKLVSDFRKDFQFYKVREINNYHHAHDAYLNAVVGTALIKKYPKLESEFVYGDYKVYDVRKMIAKSEQEIGKATAKYFFYSNIMNFFKTEITLANGEIRKRPLIETNGETGEIVWDKGRDFATVRKVLSMPQVNIVKKTEVQTGGFSKESILPKRNSDKLIARKKDWDPKKYGGFDSPTVAYSVLVVAKVEKGKSKKLKSVKELLGITIMERSSFEKNPIDFLEAKGYKEVKKDLIIKLPKYSLFELENGRKRMLASAGELQKGNELALPSKYVNFLYLASHYEKLKGSPEDNEQKQLFVEQHKHYLDEIIEQISEFSKRVILADANLDKVLSAYNKHRDKPIREQAENIIHLFTLTNLGAPAAFKYFDTTIDRKRYTSTKEVLDATLIHQSITGLYETRIDLSQLGGDGGEAAAKGGGGGSGGTLGIEDEYRLHETSTEPDVSLGSTWLSDFPQAWAETGGMGLAVRQAPLIIPLKATSTPVSIQQYPMSHEARLGIKPHIQRLLDQGILVPCQSPWNTPLLPVKKPGTNDYRPVQDLREVNKRVEDIHPTVPNPYNLLSGLPPSHQWYTVLDLKDAFFCLRLHPTSQPLFAFEWRDPGMGISGQLTWTRLPQGFKNSPTLFDEALHRDLADFRIQHPDLILLQYVDDILLAATSELDCQQGTRALLQTLGDLGYRASAKKAQICQKQVKYLGYLLREGQRWLTEARKETVMGQPVPKTPRQLREFLGTAGFCRLWIPGFAEMAAPLYPLTKTGTLFSWGPDQQKAYQEIKQALLTAPALGLPDLTKPFELFVDEKQGYAKGVLTQKLGPWRRPVAYLSKKLDPVAAGWPPCLRMVAAIAVLTKDAGKLTMGQPLVILAPHAVEALVKQPPDRWLSNARMTHYQAMLLDTDRVQFGPVVALNPATLLPLPEEGAPHDCLEILAETHGTRPDLTDQPIPDADHTWYTDGSSFLQEGQRKAGAAVTTETEVIWAGALPAGTSAQRAELIALTQALKMAEGKRLNVYTDSRYAFATAHIHGEIYRRRGLLTSEGREIKNKSEILALLKALFLPKRLSIIHCLGHQKGDSAEARGNRLADQAAREAAIKTPPDTSTLLAGKRTADGSEFEKRTADGSEFESPKKKAKVE

SEQ ID NO: 6965 - protein, 2096 aa, synthetic construct
MPAAKRVKLDGGDKKYSIGLDIGTNSVGWAVITDEYKVPSKKFKVLGNTDRHSIKKNLIGALLFDSGETAEATRLKRTARRRYTRRKNRICYLQEIFSNEMAKVDDSFFHRLEESFLVEEDKKHERHPIFGNIVDEVAYHEKYPTIYHLRKKLVDSTDKADLRLIYLALAHMIKFRGHFLIEGDLNPDNSDVDKLFIQLVQTYNQLFEENPINASGVDAKAILSARLSKSRRLENLIAQLPGEKKNGLFGNLIALSLGLTPNFKSNFDLAEDAKLQLSKDTYDDDLDNLLAQIGDQYADLFLAAKNLSDAILLSDILRVNTEITKAPLSASMIKRYDEHHQDLTLLKALVRQQLPEKYKEIFFDQSKNGYAGYIDGGASQEEFYKFIKPILEKMDGTEELLVKLNREDLLRKQRTFDNGSIPHQIHLGELHAILRRQEDFYPFLKDNREKIEKILTFRIPYYVGPLARGNSRFAWMTRKSEETITPWNFEEVVDKGASAQSFIERMTNFDKNLPNEKVLPKHSLLYEYFTVYNELTKVKYVTEGMRKPAFLSGEQKKAIVDLLFKTNRKVTVKQLKEDYFKKIECFDSVEISGVEDRFNASLGTYHDLLKIIKDKDFLDNEENEDILEDIVLTLTLFEDREMIEERLKTYAHLFDDKVMKQLKRRRYTGWGRLSRKLINGIRDKQSGKTILDFLKSDGFANRNFMQLIHDDSLTFKEDIQKAQVSGQGDSLHEHIANLAGSPAIKKGILQTVKVVDELVKVMGRHKPENIVIEMARENQTTQKGQKNSRERMKRIEEGIKELGSQILKEHPVENTQLQNEKLYLYYLQNGRDMYVDQELDINRLSDYDVDHIVPQSFLKDDSIDNKVLTRSDKARGKSDNVPSEEVVKKMKNYWRQLLNAKLITQRKFDNLTKAERGGLSELDKAGFIKRQLVETRQITKHVAQILDSRMNTKYDENDKLIREVKVITLKSKLVSDFRKDFQFYKVREINNYHHAHDAYLNAVVGTALIKKYPKLESEFVYGDYKVYDVRKMIAKSEQEIGKATAKYFFYSNIMNFFKTEITLANGEIRKRPLIETNGETGEIVWDKGRDFATVRKVLSMPQVNIVKKTEVQTGGFSKESILPKRNSDKLIARKKDWDPKKYGGFDSPTVAYSVLVVAKVEKGKSKKLKSVKELLGITIMERSSFEKNPIDFLEAKGYKEVKKDLIIKLPKYSLFELENGRKRMLASAGELQKGNELALPSKYVNFLYLASHYEKLKGSPEDNEQKQLFVEQHKHYLDEIIEQISEFSKRVILADANLDKVLSAYNKHRDKPIREQAENIIHLFTLTNLGAPAAFKYFDTTIDRKRYTSTKEVLDATLIHQSITGLYETRIDLSQLGGDGGEAAAKGGGGGSGGTLNIEDEYRLHETSKGPDVPLGSTWLSDFPQAWAETGGMGLAVRQAPLIIPLKATSTPVSIKQYPMSQEARLGIKPHIQRLLDQGILVPCQSPWNTPLLPVKKPGTNDYRPVQDLREVNKRVEDIHPTVPNPYNLLSGLPPSHQWYTVLDLKDAFFCLRLHPTSQSLFAFEWRDPEMGISGQLTWTRLPQGFKNSPTLFDEALHRDLADFRIQHPDLILLQYVDDLLLAATSELDCQQGTRALLQTLGDLGYRASAKKAQICQKQVKYLGYLLKEGQRWLTEARKETVMGQPTPKTPRQLREFLGTAGFCRLWIPGFAEMAAPLYPLTKTGTLFEWGPDQQKAYQEIKQALLTAPALGLPDLTKPFELFVDEKQGYAKGVLTQKLGPWRRPVAYLSKKLDPVAAGWPPCLRMVAAIAVLTKDAGKLTMGQPLVILAPHAVEALVKQPPDRWLSNARMTHYQALLLDTDRVQFGPIVALNPATLLPLPEEGLQHDCLDILAEAHGTRPDLTDQPLPDADHTWYTDGSSFLQEGQRKAGAAVTTETEVVWAKALPAGTSAQRAELIALTQALKMAEGKKLNVYTDSRYAFATAHIHGEIYRRRGLLTSEGKEIKNKDEILALLKALFLPKRLSIIHCPGHQKGNRAEARGNRMADQAAREVATRETPETSTLLAGKRTADGSEFEKRTADGSEFESPKKKAKVE

SEQ ID NO: 6966 - protein, 2087 aa, synthetic construct
MPAAKRVKLDGGDKKYSIGLDIGTNSVGWAVITDEYKVPSKKFKVLGNTDRHSIKKNLIGALLFDSGETAEATRLKRTARRRYTRRKNRICYLQEIFSNEMAKVDDSFFHRLEESFLVEEDKKHERHPIFGNIVDEVAYHEKYPTIYHLRKKLVDSTDKADLRLIYLALAHMIKFRGHFLIEGDLNPDNSDVDKLFIQLVQTYNQLFEENPINASGVDAKAILSARLSKSRRLENLIAQLPGEKKNGLFGNLIALSLGLTPNFKSNFDLAEDAKLQLSKDTYDDDLDNLLAQIGDQYADLFLAAKNLSDAILLSDILRVNTEITKAPLSASMIKRYDEHHQDLTLLKALVRQQLPEKYKEIFFDQSKNGYAGYIDGGASQEEFYKFIKPILEKMDGTEELLVKLNREDLLRKQRTFDNGSIPHQIHLGELHAILRRQEDFYPFLKDNREKIEKILTFRIPYYVGPLARGNSRFAWMTRKSEETITPWNFEEVVDKGASAQSFIERMTNFDKNLPNEKVLPKHSLLYEYFTVYNELTKVKYVTEGMRKPAFLSGEQKKAIVDLLFKTNRKVTVKQLKEDYFKKIECFDSVEISGVEDRFNASLGTYHDLLKIIKDKDFLDNEENEDILEDIVLTLTLFEDREMIEERLKTYAHLFDDKVMKQLKRRRYTGWGRLSRKLINGIRDKQSGKTILDFLKSDGFANRNFMQLIHDDSLTFKEDIQKAQVSGQGDSLHEHIANLAGSPAIKKGILQTVKVVDELVKVMGRHKPENIVIEMARENQTTQKGQKNSRERMKRIEEGIKELGSQILKEHPVENTQLQNEKLYLYYLQNGRDMYVDQELDINRLSDYDVDHIVPQSFLKDDSIDNKVLTRSDKARGKSDNVPSEEVVKKMKNYWRQLLNAKLITQRKFDNLTKAERGGLSELDKAGFIKRQLVETRQITKHVAQILDSRMNTKYDENDKLIREVKVITLKSKLVSDFRKDFQFYKVREINNYHHAHDAYLNAVVGTALIKKYPKLESEFVYGDYKVYDVRKMIAKSEQEIGKATAKYFFYSNIMNFFKTEITLANGEIRKRPLIETNGETGEIVWDKGRDFATVRKVLSMPQVNIVKKTEVQTGGFSKESILPKRNSDKLIARKKDWDPKKYGGFDSPTVAYSVLVVAKVEKGKSKKLKSVKELLGITIMERSSFEKNPIDFLEAKGYKEVKKDLIIKLPKYSLFELENGRKRMLASAGELQKGNELALPSKYVNFLYLASHYEKLKGSPEDNEQKQLFVEQHKHYLDEIIEQISEFSKRVILADANLDKVLSAYNKHRDKPIREQAENIIHLFTLTNLGAPAAFKYFDTTIDRKRYTSTKEVLDATLIHQSITGLYETRIDLSQLGGDGGEAAAKGGGGGSGGIPWLMKKPLQLTTLVPLQEYEERLLKQTMLTGSYKEKLQSLFLKYDALWQHWENQVGHRRIKPHHIATGTVNPRPQKQYPINPKAKASIQTVINDLLKQGVLIQQNSIMNTPVYPVPKPDGKWRMVLDYREVNKTIPLIAAQNQHSAGILSSIFRGKYKTTLDLSNGFWAHSITPESYWLTAFTWLGQQYCWTRLPQGFLNSPALFNADVVDLLKEVPNVQVYVDDIYISHDDPREHLEQLEKVFSLLLNAGYVVSLKKSEIAQHEVEFLGFNITKEGRGLTETFKQKLLNITPPRDLKQLQSILGLLNFARNFIPNFSELVKPLYNIIATAPGKYITWTTDNSQQLQNIISMLNSAENLEERNPEVRLIMKVNTSPSAGYIRFYNEFAKRPIMYLNYVYTKAEVKFTNTEKLLTTIHKGLIKALDLGMGQEILVYSPIVSMTKIQKTPLPERKALPIRWITWMSYLEDPRIQFHYDKTLPELQQVPTVTDDIIAKIKHPSEFSMVFYTDGSAIKHPNVNKSHNAGMGIAQVQFKPEFTVINTWSIPLGDHTAQLAEVAAVEFACKKALKIDGPVLIVTDSFYVAESVNKELPYWQSNGFFNNKKKPLKHVSKWKSIADCIQLKPDIIIIHEKGHQPTASTFHTEGNNLADKLATQGSYVVNAGKRTADGSEFEKRTADGSEFESPKKKAKVE

SEQ ID NO: 6967 - protein, 2087 aa, synthetic construct
MPAAKRVKLDGGDKKYSIGLDIGTNSVGWAVITDEYKVPSKKFKVLGNTDRHSIKKNLIGALLFDSGETAEATRLKRTARRRYTRRKNRICYLQEIFSNEMAKVDDSFFHRLEESFLVEEDKKHERHPIFGNIVDEVAYHEKYPTIYHLRKKLVDSTDKADLRLIYLALAHMIKFRGHFLIEGDLNPDNSDVDKLFIQLVQTYNQLFEENPINASGVDAKAILSARLSKSRRLENLIAQLPGEKKNGLFGNLIALSLGLTPNFKSNFDLAEDAKLQLSKDTYDDDLDNLLAQIGDQYADLFLAAKNLSDAILLSDILRVNTEITKAPLSASMIKRYDEHHQDLTLLKALVRQQLPEKYKEIFFDQSKNGYAGYIDGGASQEEFYKFIKPILEKMDGTEELLVKLNREDLLRKQRTFDNGSIPHQIHLGELHAILRRQEDFYPFLKDNREKIEKILTFRIPYYVGPLARGNSRFAWMTRKSEETITPWNFEEVVDKGASAQSFIERMTNFDKNLPNEKVLPKHSLLYEYFTVYNELTKVKYVTEGMRKPAFLSGEQKKAIVDLLFKTNRKVTVKQLKEDYFKKIECFDSVEISGVEDRFNASLGTYHDLLKIIKDKDFLDNEENEDILEDIVLTLTLFEDREMIEERLKTYAHLFDDKVMKQLKRRRYTGWGRLSRKLINGIRDKQSGKTILDFLKSDGFANRNFMQLIHDDSLTFKEDIQKAQVSGQGDSLHEHIANLAGSPAIKKGILQTVKVVDELVKVMGRHKPENIVIEMARENQTTQKGQKNSRERMKRIEEGIKELGSQILKEHPVENTQLQNEKLYLYYLQNGRDMYVDQELDINRLSDYDVDHIVPQSFLKDDSIDNKVLTRSDKARGKSDNVPSEEVVKKMKNYWRQLLNAKLITQRKFDNLTKAERGGLSELDKAGFIKRQLVETRQITKHVAQILDSRMNTKYDENDKLIREVKVITLKSKLVSDFRKDFQFYKVREINNYHHAHDAYLNAVVGTALIKKYPKLESEFVYGDYKVYDVRKMIAKSEQEIGKATAKYFFYSNIMNFFKTEITLANGEIRKRPLIETNGETGEIVWDKGRDFATVRKVLSMPQVNIVKKTEVQTGGFSKESILPKRNSDKLIARKKDWDPKKYGGFDSPTVAYSVLVVAKVEKGKSKKLKSVKELLGITIMERSSFEKNPIDFLEAKGYKEVKKDLIIKLPKYSLFELENGRKRMLASAGELQKGNELALPSKYVNFLYLASHYEKLKGSPEDNEQKQLFVEQHKHYLDEIIEQISEFSKRVILADANLDKVLSAYNKHRDKPIREQAENIIHLFTLTNLGAPAAFKYFDTTIDRKRYTSTKEVLDATLIHQSITGLYETRIDLSQLGGDGGEAAAKGGGGGSGGIPWLMKKPLQLTTLVPLQEYEERLLKQTMLTGSYKEKLQSLFLKYDALWQHWENQVGHRRIKPHHIATGTVNPRPQKQYPINPKAKASIQTVINDLLKQGVLIQQNSIMNTPVYPVPKPDGKWRMVLDYREVNKTIPLIAAQNQHSAGILSSIFRGKYKTTLDLSNGFWAHSITPESYWLTAFTWLGQQYCWTRLPQGFLNSPALFNADVVDLLKEVPNVQVYVDDIYISHDDPREHLEQLEKVFSLLLNAGYVVSLKKSEIAQHEVEFLGFNITKEGRGLTETFKQKLLNITPPRDLKQLQSILGKLNFARNFIPNFSELVKPLYNIIATAPGKYITWTTDNSQQLQNIISMLNSAENLEERNPEVRLIMKVNTSPSAGYIRFYNEFAKRPIMYLNYVYTKAEVKFTNTEKLLTTIHKGLIKALDLGMGQEILVYSPIVSMTKIQKTPLPERKALPIRWITWMSYLEDPRIQFHYDKTLPELQQVPTVTDDIIAKIKHPSEFSMVFYTDGSAIKHPNVNKSHNAGMGIAQVQFKPEFTVINTWSIPLGDHTAQLAEVAAVEFACKKALKIDGPVLIVTDSFYVAESVNKELPYWQSNGFFNNKKKPLKHVSKWKSIADCIQLKPDIIIIHEKGHQPTASTFHTEGNNLADKLATQGSYVVNAGKRTADGSEFEKRTADGSEFESPKKKAKVE

SEQ ID NO: 6968 - protein, 2094 aa, synthetic construct
MPAAKRVKLDGGDKKYSIGLDIGTNSVGWAVITDEYKVPSKKFKVLGNTDRHSIKKNLIGALLFDSGETAEATRLKRTARRRYTRRKNRICYLQEIFSNEMAKVDDSFFHRLEESFLVEEDKKHERHPIFGNIVDEVAYHEKYPTIYHLRKKLVDSTDKADLRLIYLALAHMIKFRGHFLIEGDLNPDNSDVDKLFIQLVQTYNQLFEENPINASGVDAKAILSARLSKSRRLENLIAQLPGEKKNGLFGNLIALSLGLTPNFKSNFDLAEDAKLQLSKDTYDDDLDNLLAQIGDQYADLFLAAKNLSDAILLSDILRVNTEITKAPLSASMIKRYDEHHQDLTLLKALVRQQLPEKYKEIFFDQSKNGYAGYIDGGASQEEFYKFIKPILEKMDGTEELLVKLNREDLLRKQRTFDNGSIPHQIHLGELHAILRRQEDFYPFLKDNREKIEKILTFRIPYYVGPLARGNSRFAWMTRKSEETITPWNFEEVVDKGASAQSFIERMTNFDKNLPNEKVLPKHSLLYEYFTVYNELTKVKYVTEGMRKPAFLSGEQKKAIVDLLFKTNRKVTVKQLKEDYFKKIECFDSVEISGVEDRFNASLGTYHDLLKIIKDKDFLDNEENEDILEDIVLTLTLFEDREMIEERLKTYAHLFDDKVMKQLKRRRYTGWGRLSRKLINGIRDKQSGKTILDFLKSDGFANRNFMQLIHDDSLTFKEDIQKAQVSGQGDSLHEHIANLAGSPAIKKGILQTVKVVDELVKVMGRHKPENIVIEMARENQTTQKGQKNSRERMKRIEEGIKELGSQILKEHPVENTQLQNEKLYLYYLQNGRDMYVDQELDINRLSDYDVDHIVPQSFLKDDSIDNKVLTRSDKARGKSDNVPSEEVVKKMKNYWRQLLNAKLITQRKFDNLTKAERGGLSELDKAGFIKRQLVETRQITKHVAQILDSRMNTKYDENDKLIREVKVITLKSKLVSDFRKDFQFYKVREINNYHHAHDAYLNAVVGTALIKKYPKLESEFVYGDYKVYDVRKMIAKSEQEIGKATAKYFFYSNIMNFFKTEITLANGEIRKRPLIETNGETGEIVWDKGRDFATVRKVLSMPQVNIVKKTEVQTGGFSKESILPKRNSDKLIARKKDWDPKKYGGFDSPTVAYSVLVVAKVEKGKSKKLKSVKELLGITIMERSSFEKNPIDFLEAKGYKEVKKDLIIKLPKYSLFELENGRKRMLASAGELQKGNELALPSKYVNFLYLASHYEKLKGSPEDNEQKQLFVEQHKHYLDEIIEQISEFSKRVILADANLDKVLSAYNKHRDKPIREQAENIIHLFTLTNLGAPAAFKYFDTTIDRKRYTSTKEVLDATLIHQSITGLYETRIDLSQLGGDGGEAAAKGGGGGSGGVLNLEEEYRLHEKPVPSSIDPSWLQLFPTVWAERAGMGLANQVPPVVVELRSGASPVAVRQYPMSKEAREGIRPHIQRFLDLGVLVPCQSPWNTPLLPVKKPGTNDYRPVQDLREINKRVQDIHPTVPNPYNLLSSLPPSHTWYSVLDLKDAFFCLKLHPNSQPLFAFEWRDPEKGNTGQLTWTRLPQGFKNSPTLFNEALHRDLAPFRALNPQVVLLQYVDDLLVAAPTYRDCKEGTQKLLQELSKLGYRVSAKKAQLCQKEVTYLGYLLKEGKRWLTPARKATVMKIPPPTTPRQVREFLGKAGFCRLFIPGFASLAAPLYPLTKPSIPFIWTEEHQKAFDRIKEALLSAPALALPDLTKPFTLYVDERAGVARGVLTQTLGPWRRPVAYLSKKLDPVASGWPTCLKAVAAVALLLKDADKLTLGQNVTVIASHSLESIVRQPPDRWMTNARMTHYQSLLLNERVSFAPPAVLNPATLLPVESEATPVHRCSEILAEETGTRRDLKDQPLPGVPAWYTDGSSFIAEGKRRAGAAIVDGKRTVWASSLPEGTSAQKAELVALTQALRLAEGKDINIYTDSRYAFATAHIHGAIYKQRGWLTSAGKDIKNKEEILALLEAIHLPKRVAIIHCPGHQKGNDPVATGNRRADEAAKQAALSTRVLAETTKPAGKRTADGSEFEKRTADGSEFESPKKKAKVE

SEQ ID NO: 6969 - protein, 2096 aa, synthetic construct
MPAAKRVKLDGGDKKYSIGLDIGTNSVGWAVITDEYKVPSKKFKVLGNTDRHSIKKNLIGALLFDSGETAEATRLKRTARRRYTRRKNRICYLQEIFSNEMAKVDDSFFHRLEESFLVEEDKKHERHPIFGNIVDEVAYHEKYPTIYHLRKKLVDSTDKADLRLIYLALAHMIKFRGHFLIEGDLNPDNSDVDKLFIQLVQTYNQLFEENPINASGVDAKAILSARLSKSRRLENLIAQLPGEKKNGLFGNLIALSLGLTPNFKSNFDLAEDAKLQLSKDTYDDDLDNLLAQIGDQYADLFLAAKNLSDAILLSDILRVNTEITKAPLSASMIKRYDEHHQDLTLLKALVRQQLPEKYKEIFFDQSKNGYAGYIDGGASQEEFYKFIKPILEKMDGTEELLVKLNREDLLRKQRTFDNGSIPHQIHLGELHAILRRQEDFYPFLKDNREKIEKILTFRIPYYVGPLARGNSRFAWMTRKSEETITPWNFEEVVDKGASAQSFIERMTNFDKNLPNEKVLPKHSLLYEYFTVYNELTKVKYVTEGMRKPAFLSGEQKKAIVDLLFKTNRKVTVKQLKEDYFKKIECFDSVEISGVEDRFNASLGTYHDLLKIIKDKDFLDNEENEDILEDIVLTLTLFEDREMIEERLKTYAHLFDDKVMKQLKRRRYTGWGRLSRKLINGIRDKQSGKTILDFLKSDGFANRNFMQLIHDDSLTFKEDIQKAQVSGQGDSLHEHIANLAGSPAIKKGILQTVKVVDELVKVMGRHKPENIVIEMARENQTTQKGQKNSRERMKRIEEGIKELGSQILKEHPVENTQLQNEKLYLYYLQNGRDMYVDQELDINRLSDYDVDHIVPQSFLKDDSIDNKVLTRSDKARGKSDNVPSEEVVKKMKNYWRQLLNAKLITQRKFDNLTKAERGGLSELDKAGFIKRQLVETRQITKHVAQILDSRMNTKYDENDKLIREVKVITLKSKLVSDFRKDFQFYKVREINNYHHAHDAYLNAVVGTALIKKYPKLESEFVYGDYKVYDVRKMIAKSEQEIGKATAKYFFYSNIMNFFKTEITLANGEIRKRPLIETNGETGEIVWDKGRDFATVRKVLSMPQVNIVKKTEVQTGGFSKESILPKRNSDKLIARKKDWDPKKYGGFDSPTVAYSVLVVAKVEKGKSKKLKSVKELLGITIMERSSFEKNPIDFLEAKGYKEVKKDLIIKLPKYSLFELENGRKRMLASAGELQKGNELALPSKYVNFLYLASHYEKLKGSPEDNEQKQLFVEQHKHYLDEIIEQISEFSKRVILADANLDKVLSAYNKHRDKPIREQAENIIHLFTLTNLGAPAAFKYFDTTIDRKRYTSTKEVLDATLIHQSITGLYETRIDLSQLGGDGGEAAAKGGGGGSGGTLNIEDEYRLHETSKEPDVPLGSTWLSDFPQAWAETGGMGLAVRQAPLIIPLKATSTPVSIKQYPMSQEARLGIKPHIQRLLDQGILVPCQSPWNTPLLPVKKPGTNDYRPVQDLREVNKRVEDIHPTVPNPYNLLSGLPPSHQWYTVLDLKDAFFCLRLHPTSQPLFAFEWRDPEMGISGQLTWTRLPQGFKNSPTLFNEALHRDLADFRIQHPDLILLQYVDDLLLAATSEQDCQRGTRALLQTLGNLGYRASAKKAQICQKQVKYLGYLLKEGQRWLTEARKETVMGQPTPKTPRQLREFLGTAGFCRLWIPGFAEMAAPLYPLTKPGTLFNWGPDQQKAYQEIKQALLTAPALGLPDLTKPFELFVDEKQGYAKGVLTQKLGPWRRPVAYLSKKLDPVAAGWPPCLRMVAAIAVLTKDAGKLTMGQPLVILAPHAVEALVKQPPDRWLSNARMTHYQAMLLDTDRVQFGPVVALNPATLLPLPEKEAPHDCLEILAETHGTRPDLTDQPIPDADYTWYTDGSSFLQEGQRRAGAAVTTETEVIWARALPAGTSAQRAELIALTQALKMAEGKKLNVYTDSRYAFATAHVHGEIYRRRGWLTSEGREIKNKNEILALLKALFLPKRLSIIHCPGHQKGNSAEARGNRMADQAAREAAMKAVLETSTLLAGKRTADGSEFEKRTADGSEFESPKKKAKVE

SEQ ID NO: 6970 - protein, 2096 aa, synthetic construct
MPAAKRVKLDGGDKKYSIGLDIGTNSVGWAVITDEYKVPSKKFKVLGNTDRHSIKKNLIGALLFDSGETAEATRLKRTARRRYTRRKNRICYLQEIFSNEMAKVDDSFFHRLEESFLVEEDKKHERHPIFGNIVDEVAYHEKYPTIYHLRKKLVDSTDKADLRLIYLALAHMIKFRGHFLIEGDLNPDNSDVDKLFIQLVQTYNQLFEENPINASGVDAKAILSARLSKSRRLENLIAQLPGEKKNGLFGNLIALSLGLTPNFKSNFDLAEDAKLQLSKDTYDDDLDNLLAQIGDQYADLFLAAKNLSDAILLSDILRVNTEITKAPLSASMIKRYDEHHQDLTLLKALVRQQLPEKYKEIFFDQSKNGYAGYIDGGASQEEFYKFIKPILEKMDGTEELLVKLNREDLLRKQRTFDNGSIPHQIHLGELHAILRRQEDFYPFLKDNREKIEKILTFRIPYYVGPLARGNSRFAWMTRKSEETITPWNFEEVVDKGASAQSFIERMTNFDKNLPNEKVLPKHSLLYEYFTVYNELTKVKYVTEGMRKPAFLSGEQKKAIVDLLFKTNRKVTVKQLKEDYFKKIECFDSVEISGVEDRFNASLGTYHDLLKIIKDKDFLDNEENEDILEDIVLTLTLFEDREMIEERLKTYAHLFDDKVMKQLKRRRYTGWGRLSRKLINGIRDKQSGKTILDFLKSDGFANRNFMQLIHDDSLTFKEDIQKAQVSGQGDSLHEHIANLAGSPAIKKGILQTVKVVDELVKVMGRHKPENIVIEMARENQTTQKGQKNSRERMKRIEEGIKELGSQILKEHPVENTQLQNEKLYLYYLQNGRDMYVDQELDINRLSDYDVDHIVPQSFLKDDSIDNKVLTRSDKARGKSDNVPSEEVVKKMKNYWRQLLNAKLITQRKFDNLTKAERGGLSELDKAGFIKRQLVETRQITKHVAQILDSRMNTKYDENDKLIREVKVITLKSKLVSDFRKDFQFYKVREINNYHHAHDAYLNAVVGTALIKKYPKLESEFVYGDYKVYDVRKMIAKSEQEIGKATAKYFFYSNIMNFFKTEITLANGEIRKRPLIETNGETGEIVWDKGRDFATVRKVLSMPQVNIVKKTEVQTGGFSKESILPKRNSDKLIARKKDWDPKKYGGFDSPTVAYSVLVVAKVEKGKSKKLKSVKELLGITIMERSSFEKNPIDFLEAKGYKEVKKDLIIKLPKYSLFELENGRKRMLASAGELQKGNELALPSKYVNFLYLASHYEKLKGSPEDNEQKQLFVEQHKHYLDEIIEQISEFSKRVILADANLDKVLSAYNKHRDKPIREQAENIIHLFTLTNLGAPAAFKYFDTTIDRKRYTSTKEVLDATLIHQSITGLYETRIDLSQLGGDGGGGSGGGPAPGGTAPLEEEYRLFLEAPIQNVTLLEQWKREIPKVWAEINPPGLASTQAPIHVQLLSTALPVRVRQYPITLEAKRSLRETIRKFRAAGILRPVHSPWNTPLLPVRKSGTSEYRMVQDLREVNKRVETIHPTVPNPYTLLSLLPPDRIWYSVLDLKDAFFCIPLAPESQLIFAFEWADAEEGESGQLTWTRLPQGFKNSPTLFDEALNRDLQGFRLDHPSVSLLQYVDDLLIAADTQAACLSATRDLLMTLAELGYRVSGKKAQLCQEEVTYLGFKIHKGSRSLSNSRTQAILQIPVPKTKRQVREFLGTIGYCRLWIPGFAELAQPLYAATRGGNDPLVWGEKEEEAFQSLKLALTQPPALALPSLDKPFQLFVEETSGAAKGVLTQALGPWKRPVAYLSKRLDPVAAGWPRCLRAIAAAALLTREASKLTFGQDIEITSSHNLESLLRSPPDKWLTNARITQYQVLLLDPPRVRFKQTAALNPATLLPETDDTLPIHHCLDTLDSLTSTRPDLTDQPLAQAEATLFTDGSSYIRDGKRYAGAAVVTLDSVIWAEPLPIGTSAQKAELIALTKALEWSKDKSVNIYTDSRYAFATLHVHGMIYRERGLLTAGGKAIKNAPEILALLTAVWLPKRVAVMHCKGHQKDDAPTSTGNRRADEVAREVAIRPLSTQATISAGKRTADGSEFEKRTADGSEFESPKKKAKVE

SEQ ID NO: 6971 - protein, 2096 aa, synthetic construct
MPAAKRVKLDGGDKKYSIGLDIGTNSVGWAVITDEYKVPSKKFKVLGNTDRHSIKKNLIGALLFDSGETAEATRLKRTARRRYTRRKNRICYLQEIFSNEMAKVDDSFFHRLEESFLVEEDKKHERHPIFGNIVDEVAYHEKYPTIYHLRKKLVDSTDKADLRLIYLALAHMIKFRGHFLIEGDLNPDNSDVDKLFIQLVQTYNQLFEENPINASGVDAKAILSARLSKSRRLENLIAQLPGEKKNGLFGNLIALSLGLTPNFKSNFDLAEDAKLQLSKDTYDDDLDNLLAQIGDQYADLFLAAKNLSDAILLSDILRVNTEITKAPLSASMIKRYDEHHQDLTLLKALVRQQLPEKYKEIFFDQSKNGYAGYIDGGASQEEFYKFIKPILEKMDGTEELLVKLNREDLLRKQRTFDNGSIPHQIHLGELHAILRRQEDFYPFLKDNREKIEKILTFRIPYYVGPLARGNSRFAWMTRKSEETITPWNFEEVVDKGASAQSFIERMTNFDKNLPNEKVLPKHSLLYEYFTVYNELTKVKYVTEGMRKPAFLSGEQKKAIVDLLFKTNRKVTVKQLKEDYFKKIECFDSVEISGVEDRFNASLGTYHDLLKIIKDKDFLDNEENEDILEDIVLTLTLFEDREMIEERLKTYAHLFDDKVMKQLKRRRYTGWGRLSRKLINGIRDKQSGKTILDFLKSDGFANRNFMQLIHDDSLTFKEDIQKAQVSGQGDSLHEHIANLAGSPAIKKGILQTVKVVDELVKVMGRHKPENIVIEMARENQTTQKGQKNSRERMKRIEEGIKELGSQILKEHPVENTQLQNEKLYLYYLQNGRDMYVDQELDINRLSDYDVDHIVPQSFLKDDSIDNKVLTRSDKARGKSDNVPSEEVVKKMKNYWRQLLNAKLITQRKFDNLTKAERGGLSELDKAGFIKRQLVETRQITKHVAQILDSRMNTKYDENDKLIREVKVITLKSKLVSDFRKDFQFYKVREINNYHHAHDAYLNAVVGTALIKKYPKLESEFVYGDYKVYDVRKMIAKSEQEIGKATAKYFFYSNIMNFFKTEITLANGEIRKRPLIETNGETGEIVWDKGRDFATVRKVLSMPQVNIVKKTEVQTGGFSKESILPKRNSDKLIARKKDWDPKKYGGFDSPTVAYSVLVVAKVEKGKSKKLKSVKELLGITIMERSSFEKNPIDFLEAKGYKEVKKDLIIKLPKYSLFELENGRKRMLASAGELQKGNELALPSKYVNFLYLASHYEKLKGSPEDNEQKQLFVEQHKHYLDEIIEQISEFSKRVILADANLDKVLSAYNKHRDKPIREQAENIIHLFTLTNLGAPAAFKYFDTTIDRKRYTSTKEVLDATLIHQSITGLYETRIDLSQLGGDGGGGSGGGPAPGGTAPLEEEYRLFLEAPIQNVTLLEQWKREIPKVWAEINPPGLASTQAPIHVQLLSTALPVRVRQYPITLEAKRSLRETIRKFRAAGILRPVHSPWNTPLLPVRKSGTSEYRMVQDLREVNKRVETIHPTVPNPYTLLSLLPPDRIWYSVLDLKDAFFCIPLAPESQLIFAFEWADAEEGESGQLTWTRLPQGFKNSPTLFNEALNRDLQGFRLDHPSVSLLQYVDDLLIAADTQAACLSATRDLLMTLAELGYRVSGKKAQLCQEEVTYLGFKIHKGSRSLSNSRTQAILQIPVPKTKRQVREFLGTIGYCRLWIPGFAELAQPLYAATRPGNDPLVWGEKEEEAFQSLKLALTQPPALALPSLDKPFQLFVEETSGAAKGVLTQALGPWKRPVAYLSKRLDPVAAGWPRCLRAIAAAALLTREASKLTFGQDIEITSSHNLESLLRSPPDKWLTNARITQYQVLLLDPPRVRFKQTAALNPATLLPETDDTLPIHHCLDTLDSLTSTRPDLTDQPLAQAEATLFTDGSSYIRDGKRYAGAAVVTLDSVIWAEPLPIGTSAQKAELIALTKALEWSKDKSVNIYTDSRYAFATLHVHGMIYRERGWLTAGGKAIKNAPEILALLTAVWLPKRVAVMHCKGHQKDDAPTSTGNRRADEVAREVAIRPLSTQATISAGKRTADGSEFEKRTADGSEFESPKKKAKVE

SEQ ID NO: 6972 - protein, 2096 aa, synthetic construct
MPAAKRVKLDGGDKKYSIGLDIGTNSVGWAVITDEYKVPSKKFKVLGNTDRHSIKKNLIGALLFDSGETAEATRLKRTARRRYTRRKNRICYLQEIFSNEMAKVDDSFFHRLEESFLVEEDKKHERHPIFGNIVDEVAYHEKYPTIYHLRKKLVDSTDKADLRLIYLALAHMIKFRGHFLIEGDLNPDNSDVDKLFIQLVQTYNQLFEENPINASGVDAKAILSARLSKSRRLENLIAQLPGEKKNGLFGNLIALSLGLTPNFKSNFDLAEDAKLQLSKDTYDDDLDNLLAQIGDQYADLFLAAKNLSDAILLSDILRVNTEITKAPLSASMIKRYDEHHQDLTLLKALVRQQLPEKYKEIFFDQSKNGYAGYIDGGASQEEFYKFIKPILEKMDGTEELLVKLNREDLLRKQRTFDNGSIPHQIHLGELHAILRRQEDFYPFLKDNREKIEKILTFRIPYYVGPLARGNSRFAWMTRKSEETITPWNFEEVVDKGASAQSFIERMTNFDKNLPNEKVLPKHSLLYEYFTVYNELTKVKYVTEGMRKPAFLSGEQKKAIVDLLFKTNRKVTVKQLKEDYFKKIECFDSVEISGVEDRFNASLGTYHDLLKIIKDKDFLDNEENEDILEDIVLTLTLFEDREMIEERLKTYAHLFDDKVMKQLKRRRYTGWGRLSRKLINGIRDKQSGKTILDFLKSDGFANRNFMQLIHDDSLTFKEDIQKAQVSGQGDSLHEHIANLAGSPAIKKGILQTVKVVDELVKVMGRHKPENIVIEMARENQTTQKGQKNSRERMKRIEEGIKELGSQILKEHPVENTQLQNEKLYLYYLQNGRDMYVDQELDINRLSDYDVDHIVPQSFLKDDSIDNKVLTRSDKARGKSDNVPSEEVVKKMKNYWRQLLNAKLITQRKFDNLTKAERGGLSELDKAGFIKRQLVETRQITKHVAQILDSRMNTKYDENDKLIREVKVITLKSKLVSDFRKDFQFYKVREINNYHHAHDAYLNAVVGTALIKKYPKLESEFVYGDYKVYDVRKMIAKSEQEIGKATAKYFFYSNIMNFFKTEITLANGEIRKRPLIETNGETGEIVWDKGRDFATVRKVLSMPQVNIVKKTEVQTGGFSKESILPKRNSDKLIARKKDWDPKKYGGFDSPTVAYSVLVVAKVEKGKSKKLKSVKELLGITIMERSSFEKNPIDFLEAKGYKEVKKDLIIKLPKYSLFELENGRKRMLASAGELQKGNELALPSKYVNFLYLASHYEKLKGSPEDNEQKQLFVEQHKHYLDEIIEQISEFSKRVILADANLDKVLSAYNKHRDKPIREQAENIIHLFTLTNLGAPAAFKYFDTTIDRKRYTSTKEVLDATLIHQSITGLYETRIDLSQLGGDGGGGSGGGPAPGGTAPLEEEYRLFLEAPIQNVTLLEQWKREIPKVWAEINPPGLASTQAPIHVQLLSTALPVRVRQYPITLEAKRSLRETIRKFRAAGILRPVHSPWNTPLLPVRKSGTSEYRMVQDLREVNKRVETIHPTVPNPYTLLSLLPPDRIWYSVLDLKDAFFCIPLAPESQLIFAFEWADAEEGESGQLTWTRLPQGFKNSPTLFNEALNRDLQGFRLDHPSVSLLQYVDDLLIAADTQAACLSATRDLLMTLAELGYRVSGKKAQLCQEEVTYLGFKIHKGSRSLSNSRTQAILQIPVPKTKRQVREFLGKIGYCRLFIPGFAELAQPLYAATRPGNDPLVWGEKEEEAFQSLKLALTQPPALALPSLDKPFQLFVEETSGAAKGVLTQALGPWKRPVAYLSKRLDPVAAGWPRCLRAIAAAALLTREASKLTFGQDIEITSSHNLESLLRSPPDKWLTNARITQYQVLLLDPPRVRFKQTAALNPATLLPETDDTLPIHHCLDTLDSLTSTRPDLTDQPLAQAEATLFTDGSSYIRDGKRYAGAAVVTLDSVIWAEPLPIGTSAQKAELIALTKALEWSKDKSVNIYTDSRYAFATLHVHGMIYRERGWLTAGGKAIKNAPEILALLTAVWLPKRVAVMHCKGHQKDDAPTSTGNRRADEVAREVAIRPLSTQATISAGKRTADGSEFEKRTADGSEFESPKKKAKVE

SEQ ID NO: 6973 - protein, 2100 aa, synthetic construct
MPAAKRVKLDGGDKKYSIGLDIGTNSVGWAVITDEYKVPSKKFKVLGNTDRHSIKKNLIGALLFDSGETAEATRLKRTARRRYTRRKNRICYLQEIFSNEMAKVDDSFFHRLEESFLVEEDKKHERHPIFGNIVDEVAYHEKYPTIYHLRKKLVDSTDKADLRLIYLALAHMIKFRGHFLIEGDLNPDNSDVDKLFIQLVQTYNQLFEENPINASGVDAKAILSARLSKSRRLENLIAQLPGEKKNGLFGNLIALSLGLTPNFKSNFDLAEDAKLQLSKDTYDDDLDNLLAQIGDQYADLFLAAKNLSDAILLSDILRVNTEITKAPLSASMIKRYDEHHQDLTLLKALVRQQLPEKYKEIFFDQSKNGYAGYIDGGASQEEFYKFIKPILEKMDGTEELLVKLNREDLLRKQRTFDNGSIPHQIHLGELHAILRRQEDFYPFLKDNREKIEKILTFRIPYYVGPLARGNSRFAWMTRKSEETITPWNFEEVVDKGASAQSFIERMTNFDKNLPNEKVLPKHSLLYEYFTVYNELTKVKYVTEGMRKPAFLSGEQKKAIVDLLFKTNRKVTVKQLKEDYFKKIECFDSVEISGVEDRFNASLGTYHDLLKIIKDKDFLDNEENEDILEDIVLTLTLFEDREMIEERLKTYAHLFDDKVMKQLKRRRYTGWGRLSRKLINGIRDKQSGKTILDFLKSDGFANRNFMQLIHDDSLTFKEDIQKAQVSGQGDSLHEHIANLAGSPAIKKGILQTVKVVDELVKVMGRHKPENIVIEMARENQTTQKGQKNSRERMKRIEEGIKELGSQILKEHPVENTQLQNEKLYLYYLQNGRDMYVDQELDINRLSDYDVDHIVPQSFLKDDSIDNKVLTRSDKARGKSDNVPSEEVVKKMKNYWRQLLNAKLITQRKFDNLTKAERGGLSELDKAGFIKRQLVETRQITKHVAQILDSRMNTKYDENDKLIREVKVITLKSKLVSDFRKDFQFYKVREINNYHHAHDAYLNAVVGTALIKKYPKLESEFVYGDYKVYDVRKMIAKSEQEIGKATAKYFFYSNIMNFFKTEITLANGEIRKRPLIETNGETGEIVWDKGRDFATVRKVLSMPQVNIVKKTEVQTGGFSKESILPKRNSDKLIARKKDWDPKKYGGFDSPTVAYSVLVVAKVEKGKSKKLKSVKELLGITIMERSSFEKNPIDFLEAKGYKEVKKDLIIKLPKYSLFELENGRKRMLASAGELQKGNELALPSKYVNFLYLASHYEKLKGSPEDNEQKQLFVEQHKHYLDEIIEQISEFSKRVILADANLDKVLSAYNKHRDKPIREQAENIIHLFTLTNLGAPAAFKYFDTTIDRKRYTSTKEVLDATLIHQSITGLYETRIDLSQLGGDGGGGSGGGPAPGGTVSLQDEHRLFDIPVTTSLPDVWLQDFPQAWAETGGLGRAKCQAPIIIDLKPTAVPVSIKQYPMSLEAHMGIRQHIIKFLELGVLRPCRSPWNTPLLPVKKPGTQDYRPVQDLREINKRTVDIHPTVPNPYNLLSTLKPDYSWYTVLDLKDAFFCLPLAPQSQELFAFEWKDPERGISGQLTWTRLPQGFKNSPTLFNEALHRDLTDFRTQHPEVTLLQYVDDLLLAAPTKKACTQGTRHLLQELGEKGYRASAKKAQICQTKVTYLGYILSEGKRWLTPGRIETVARIPPPRNPREVREFLGTAGFCRLWIPGFAELAAPLYALTKPSTPFTWQTEHQLAFEALKKALLSAPALGLPDTSKPFTLFLDERQGIAKGVLTQKLGPWKRPVAYLSKKLDPVAAGWPPCLRIMAATAMLVKDSAKLTLGQPLTVITPHTLEAIVRQPPDRWITNARLTHYQALLLDTDRVQFGPPVTLNPATLLPVPENQPSPHDCRQVLAETHGTREDLKDQELPDADHTWYTDGSSYLDSGTRRAGAAVVDGHNTIWAQSLPPGTSAQKAELIALTKALELSKGKKANIYTDSRYAFATAHTHGSIYERRGWLTSEGKEIKNKAEIIALLKALFLPQEVAIIHCPGHQKGQDPVAVGNRQADRVARQAAMAEVLTLATEPDNTSHITAGKRTADGSEFEKRTADGSEFESPKKKAKVE

SEQ ID NO: 6974 - protein, 2092 aa, synthetic construct
MPAAKRVKLDGGDKKYSIGLDIGTNSVGWAVITDEYKVPSKKFKVLGNTDRHSIKKNLIGALLFDSGETAEATRLKRTARRRYTRRKNRICYLQEIFSNEMAKVDDSFFHRLEESFLVEEDKKHERHPIFGNIVDEVAYHEKYPTIYHLRKKLVDSTDKADLRLIYLALAHMIKFRGHFLIEGDLNPDNSDVDKLFIQLVQTYNQLFEENPINASGVDAKAILSARLSKSRRLENLIAQLPGEKKNGLFGNLIALSLGLTPNFKSNFDLAEDAKLQLSKDTYDDDLDNLLAQIGDQYADLFLAAKNLSDAILLSDILRVNTEITKAPLSASMIKRYDEHHQDLTLLKALVRQQLPEKYKEIFFDQSKNGYAGYIDGGASQEEFYKFIKPILEKMDGTEELLVKLNREDLLRKQRTFDNGSIPHQIHLGELHAILRRQEDFYPFLKDNREKIEKILTFRIPYYVGPLARGNSRFAWMTRKSEETITPWNFEEVVDKGASAQSFIERMTNFDKNLPNEKVLPKHSLLYEYFTVYNELTKVKYVTEGMRKPAFLSGEQKKAIVDLLFKTNRKVTVKQLKEDYFKKIECFDSVEISGVEDRFNASLGTYHDLLKIIKDKDFLDNEENEDILEDIVLTLTLFEDREMIEERLKTYAHLFDDKVMKQLKRRRYTGWGRLSRKLINGIRDKQSGKTILDFLKSDGFANRNFMQLIHDDSLTFKEDIQKAQVSGQGDSLHEHIANLAGSPAIKKGILQTVKVVDELVKVMGRHKPENIVIEMARENQTTQKGQKNSRERMKRIEEGIKELGSQILKEHPVENTQLQNEKLYLYYLQNGRDMYVDQELDINRLSDYDVDHIVPQSFLKDDSIDNKVLTRSDKARGKSDNVPSEEVVKKMKNYWRQLLNAKLITQRKFDNLTKAERGGLSELDKAGFIKRQLVETRQITKHVAQILDSRMNTKYDENDKLIREVKVITLKSKLVSDFRKDFQFYKVREINNYHHAHDAYLNAVVGTALIKKYPKLESEFVYGDYKVYDVRKMIAKSEQEIGKATAKYFFYSNIMNFFKTEITLANGEIRKRPLIETNGETGEIVWDKGRDFATVRKVLSMPQVNIVKKTEVQTGGFSKESILPKRNSDKLIARKKDWDPKKYGGFDSPTVAYSVLVVAKVEKGKSKKLKSVKELLGITIMERSSFEKNPIDFLEAKGYKEVKKDLIIKLPKYSLFELENGRKRMLASAGELQKGNELALPSKYVNFLYLASHYEKLKGSPEDNEQKQLFVEQHKHYLDEIIEQISEFSKRVILADANLDKVLSAYNKHRDKPIREQAENIIHLFTLTNLGAPAAFKYFDTTIDRKRYTSTKEVLDATLIHQSITGLYETRIDLSQLGGDGGGGSGGGPAPGGVLNLEEEYRLHEKPVPSSIDPSWLQLFPTVWAERAGMGLANQVPPVVVELRSGASPVAVRQYPMSKEAREGIRPHIQKFLDLGVLVPCRSPWNTPLLPVKKPGTNDYRPVQDLREINKRVQDIHPTVPNPYNLLSSLPPSYTWYSVLDLKDAFFCLRLHPNSQPLFAFEWKDPEKGNTGQLTWTRLPQGFKNSPTLFNEALHRDLAPFRALNPQVVLLQYVDDLLVAAPTYEDCKKGTQKLLQELSKLGYRVSAKKAQLCQREVTYLGYLLKEGKRWLTPARKATVMKIPVPTTPRQVREFLGTAGFCRLWIPGFASLAAPLYPLTKPSIPFIWTEEHQQAFDHIKKALLSAPALALPDLTKPFTLYIDERAGVARGVLTQTLGPWRRPVAYLSKKLDPVASGWPTCLKAVAAVALLLKDADKLTLGQNVTVIASHSLESIVRQPPDRWMTNARMTHYQSLLLNERVSFAPPAVLNPATLLPVESEATPVHRCSEILAEETGTRRDLEDQPLPGVPTWYTDGSSFITEGKRRAGAPIVDGKRTVWASSLPEGTSAQKAELVALTQALRLAEGKNINIYTDSRYAFATAHIHGAIYKQRGWLTSAGKDIKNKEEILALLEAIHLPRRVAIIHCPGHQRGSNPVATGNRRADEAAKQAALSTRVLAGTTKPAGKRTADGSEFEKRTADGSEFESPKKKAKVE

SEQ ID NO: 6975 - protein, 2092 aa, synthetic construct
MPAAKRVKLDGGDKKYSIGLDIGTNSVGWAVITDEYKVPSKKFKVLGNTDRHSIKKNLIGALLFDSGETAEATRLKRTARRRYTRRKNRICYLQEIFSNEMAKVDDSFFHRLEESFLVEEDKKHERHPIFGNIVDEVAYHEKYPTIYHLRKKLVDSTDKADLRLIYLALAHMIKFRGHFLIEGDLNPDNSDVDKLFIQLVQTYNQLFEENPINASGVDAKAILSARLSKSRRLENLIAQLPGEKKNGLFGNLIALSLGLTPNFKSNFDLAEDAKLQLSKDTYDDDLDNLLAQIGDQYADLFLAAKNLSDAILLSDILRVNTEITKAPLSASMIKRYDEHHQDLTLLKALVRQQLPEKYKEIFFDQSKNGYAGYIDGGASQEEFYKFIKPILEKMDGTEELLVKLNREDLLRKQRTFDNGSIPHQIHLGELHAILRRQEDFYPFLKDNREKIEKILTFRIPYYVGPLARGNSRFAWMTRKSEETITPWNFEEVVDKGASAQSFIERMTNFDKNLPNEKVLPKHSLLYEYFTVYNELTKVKYVTEGMRKPAFLSGEQKKAIVDLLFKTNRKVTVKQLKEDYFKKIECFDSVEISGVEDRFNASLGTYHDLLKIIKDKDFLDNEENEDILEDIVLTLTLFEDREMIEERLKTYAHLFDDKVMKQLKRRRYTGWGRLSRKLINGIRDKQSGKTILDFLKSDGFANRNFMQLIHDDSLTFKEDIQKAQVSGQGDSLHEHIANLAGSPAIKKGILQTVKVVDELVKVMGRHKPENIVIEMARENQTTQKGQKNSRERMKRIEEGIKELGSQILKEHPVENTQLQNEKLYLYYLQNGRDMYVDQELDINRLSDYDVDHIVPQSFLKDDSIDNKVLTRSDKARGKSDNVPSEEVVKKMKNYWRQLLNAKLITQRKFDNLTKAERGGLSELDKAGFIKRQLVETRQITKHVAQILDSRMNTKYDENDKLIREVKVITLKSKLVSDFRKDFQFYKVREINNYHHAHDAYLNAVVGTALIKKYPKLESEFVYGDYKVYDVRKMIAKSEQEIGKATAKYFFYSNIMNFFKTEITLANGEIRKRPLIETNGETGEIVWDKGRDFATVRKVLSMPQVNIVKKTEVQTGGFSKESILPKRNSDKLIARKKDWDPKKYGGFDSPTVAYSVLVVAKVEKGKSKKLKSVKELLGITIMERSSFEKNPIDFLEAKGYKEVKKDLIIKLPKYSLFELENGRKRMLASAGELQKGNELALPSKYVNFLYLASHYEKLKGSPEDNEQKQLFVEQHKHYLDEIIEQISEFSKRVILADANLDKVLSAYNKHRDKPIREQAENIIHLFTLTNLGAPAAFKYFDTTIDRKRYTSTKEVLDATLIHQSITGLYETRIDLSQLGGDGGGGSGGGPAPGGVLNLEEEYRLHEKPVPSSIDPSWLQLFPTVWAERAGMGLANQVPPVVVELRSGASPVAVRQYPMSKEAREGIRPHIQKFLDLGVLVPCRSPWNTPLLPVKKPGTNDYRPVQDLREINKRVQDIHPTVPNPYNLLSSLPPSYTWYSVLDLKDAFFCLRLHPNSQPLFAFEWKDPEKGNTGQLTWTRLPQGFKNSPTLFNEALHRDLAPFRALNPQVVLLQYVDDLLVAAPTYEDCKKGTQKLLQELSKLGYRVSAKKAQLCQREVTYLGYLLKEGKRWLTPARKATVMKIPVPTTPRQVREFLGKAGFCRLFIPGFASLAAPLYPLTKPSIPFIWTEEHQQAFDHIKKALLSAPALALPDLTKPFTLYIDERAGVARGVLTQTLGPWRRPVAYLSKKLDPVASGWPTCLKAVAAVALLLKDADKLTLGQNVTVIASHSLESIVRQPPDRWMTNARMTHYQSLLLNERVSFAPPAVLNPATLLPVESEATPVHRCSEILAEETGTRRDLEDQPLPGVPTWYTDGSSFITEGKRRAGAPIVDGKRTVWASSLPEGTSAQKAELVALTQALRLAEGKNINIYTDSRYAFATAHIHGAIYKQRGWLTSAGKDIKNKEEILALLEAIHLPRRVAIIHCPGHQRGSNPVATGNRRADEAAKQAALSTRVLAGTTKPAGKRTADGSEFEKRTADGSEFESPKKKAKVE

SEQ ID NO: 6976 - protein, 2125 aa, synthetic construct
MPAAKRVKLDGGDKKYSIGLDIGTNSVGWAVITDEYKVPSKKFKVLGNTDRHSIKKNLIGALLFDSGETAEATRLKRTARRRYTRRKNRICYLQEIFSNEMAKVDDSFFHRLEESFLVEEDKKHERHPIFGNIVDEVAYHEKYPTIYHLRKKLVDSTDKADLRLIYLALAHMIKFRGHFLIEGDLNPDNSDVDKLFIQLVQTYNQLFEENPINASGVDAKAILSARLSKSRRLENLIAQLPGEKKNGLFGNLIALSLGLTPNFKSNFDLAEDAKLQLSKDTYDDDLDNLLAQIGDQYADLFLAAKNLSDAILLSDILRVNTEITKAPLSASMIKRYDEHHQDLTLLKALVRQQLPEKYKEIFFDQSKNGYAGYIDGGASQEEFYKFIKPILEKMDGTEELLVKLNREDLLRKQRTFDNGSIPHQIHLGELHAILRRQEDFYPFLKDNREKIEKILTFRIPYYVGPLARGNSRFAWMTRKSEETITPWNFEEVVDKGASAQSFIERMTNFDKNLPNEKVLPKHSLLYEYFTVYNELTKVKYVTEGMRKPAFLSGEQKKAIVDLLFKTNRKVTVKQLKEDYFKKIECFDSVEISGVEDRFNASLGTYHDLLKIIKDKDFLDNEENEDILEDIVLTLTLFEDREMIEERLKTYAHLFDDKVMKQLKRRRYTGWGRLSRKLINGIRDKQSGKTILDFLKSDGFANRNFMQLIHDDSLTFKEDIQKAQVSGQGDSLHEHIANLAGSPAIKKGILQTVKVVDELVKVMGRHKPENIVIEMARENQTTQKGQKNSRERMKRIEEGIKELGSQILKEHPVENTQLQNEKLYLYYLQNGRDMYVDQELDINRLSDYDVDHIVPQSFLKDDSIDNKVLTRSDKARGKSDNVPSEEVVKKMKNYWRQLLNAKLITQRKFDNLTKAERGGLSELDKAGFIKRQLVETRQITKHVAQILDSRMNTKYDENDKLIREVKVITLKSKLVSDFRKDFQFYKVREINNYHHAHDAYLNAVVGTALIKKYPKLESEFVYGDYKVYDVRKMIAKSEQEIGKATAKYFFYSNIMNFFKTEITLANGEIRKRPLIETNGETGEIVWDKGRDFATVRKVLSMPQVNIVKKTEVQTGGFSKESILPKRNSDKLIARKKDWDPKKYGGFDSPTVAYSVLVVAKVEKGKSKKLKSVKELLGITIMERSSFEKNPIDFLEAKGYKEVKKDLIIKLPKYSLFELENGRKRMLASAGELQKGNELALPSKYVNFLYLASHYEKLKGSPEDNEQKQLFVEQHKHYLDEIIEQISEFSKRVILADANLDKVLSAYNKHRDKPIREQAENIIHLFTLTNLGAPAAFKYFDTTIDRKRYTSTKEVLDATLIHQSITGLYETRIDLSQLGGDGGGGSGGGPAPGGLLGRDLLTKLKAQIQFSTEGPQVTWEDRPAMCLVLNLEEEYRLHEKPVPPSIDPSWLQLFPMVWAEKAGMGLANQVPPVVVELKSDASPVAVRQYPMSKEAREGIRPHIQRFLDLGILVPCQSPWNTPLLPVKKPGTNDYRPVQDLREVNKRVQDIHPTVPNPYNLLSSLPPSHTWYSVLDLKDAFFCLKLHPNSQPLFAFEWRDPEKGNTGQLTWTRLPQGFKNSPTLFNEALHRDLASFRALNPQVVMLQYVDDLLVAAPTYRDCKEGTRRLLQELSKLGYRVSAKKAQLCREEVTYLGYLLKGGKRWLTPARKATVMKIPTPTTPRQVREFLGTAGFCRLWIPGFASLAAPLYPLTRPKVPFTWTEAHQEAFGRIKEALLSAPALALPDLTKPFALYVDEKEGVARGVLTQTLGPWRRPVAYLSKKLDPVASGWPTCLKAIAAVALLLKDADKLTLGQNVLVIAPHNLESIVRQPPDRWMTNARMTHYQSLLLNERVSFAPPAILNPATLLPVESDDTPIHICSEILAEETGTRPDLRDQPLPGVPAWYTDGSSFIMDGRRQAGAAIVDNKRTVWASNLPEGTSAQKAELIALTQALRLAEGKSINIYTDSRYAFATAHVHGAIYKQRGWLTSAGKDIKNKEEILALLEAIHLPKRVAIIHCPGHQRGTDPVATGNRKADEAAKQAAQSTRILTETTKNAGKRTADGSEFEKRTADGSEFESPKKKAKVE

SEQ ID NO: 6977 - protein, 2125 aa, synthetic construct
MPAAKRVKLDGGDKKYSIGLDIGTNSVGWAVITDEYKVPSKKFKVLGNTDRHSIKKNLIGALLFDSGETAEATRLKRTARRRYTRRKNRICYLQEIFSNEMAKVDDSFFHRLEESFLVEEDKKHERHPIFGNIVDEVAYHEKYPTIYHLRKKLVDSTDKADLRLIYLALAHMIKFRGHFLIEGDLNPDNSDVDKLFIQLVQTYNQLFEENPINASGVDAKAILSARLSKSRRLENLIAQLPGEKKNGLFGNLIALSLGLTPNFKSNFDLAEDAKLQLSKDTYDDDLDNLLAQIGDQYADLFLAAKNLSDAILLSDILRVNTEITKAPLSASMIKRYDEHHQDLTLLKALVRQQLPEKYKEIFFDQSKNGYAGYIDGGASQEEFYKFIKPILEKMDGTEELLVKLNREDLLRKQRTFDNGSIPHQIHLGELHAILRRQEDFYPFLKDNREKIEKILTFRIPYYVGPLARGNSRFAWMTRKSEETITPWNFEEVVDKGASAQSFIERMTNFDKNLPNEKVLPKHSLLYEYFTVYNELTKVKYVTEGMRKPAFLSGEQKKAIVDLLFKTNRKVTVKQLKEDYFKKIECFDSVEISGVEDRFNASLGTYHDLLKIIKDKDFLDNEENEDILEDIVLTLTLFEDREMIEERLKTYAHLFDDKVMKQLKRRRYTGWGRLSRKLINGIRDKQSGKTILDFLKSDGFANRNFMQLIHDDSLTFKEDIQKAQVSGQGDSLHEHIANLAGSPAIKKGILQTVKVVDELVKVMGRHKPENIVIEMARENQTTQKGQKNSRERMKRIEEGIKELGSQILKEHPVENTQLQNEKLYLYYLQNGRDMYVDQELDINRLSDYDVDHIVPQSFLKDDSIDNKVLTRSDKARGKSDNVPSEEVVKKMKNYWRQLLNAKLITQRKFDNLTKAERGGLSELDKAGFIKRQLVETRQITKHVAQILDSRMNTKYDENDKLIREVKVITLKSKLVSDFRKDFQFYKVREINNYHHAHDAYLNAVVGTALIKKYPKLESEFVYGDYKVYDVRKMIAKSEQEIGKATAKYFFYSNIMNFFKTEITLANGEIRKRPLIETNGETGEIVWDKGRDFATVRKVLSMPQVNIVKKTEVQTGGFSKESILPKRNSDKLIARKKDWDPKKYGGFDSPTVAYSVLVVAKVEKGKSKKLKSVKELLGITIMERSSFEKNPIDFLEAKGYKEVKKDLIIKLPKYSLFELENGRKRMLASAGELQKGNELALPSKYVNFLYLASHYEKLKGSPEDNEQKQLFVEQHKHYLDEIIEQISEFSKRVILADANLDKVLSAYNKHRDKPIREQAENIIHLFTLTNLGAPAAFKYFDTTIDRKRYTSTKEVLDATLIHQSITGLYETRIDLSQLGGDGGGGSGGGPAPGGLLGRDLLTKLKAQIQFSTEGPQVTWEDRPAMCLVLNLEEEYRLHEKPVPPSIDPSWLQLFPMVWAEKAGMGLANQVPPVVVELKSDASPVAVRQYPMSKEAREGIRPHIQRFLDLGILVPCQSPWNTPLLPVKKPGTNDYRPVQDLREVNKRVQDIHPTVPNPYNLLSSLPPSHTWYSVLDLKDAFFCLKLHPNSQPLFAFEWRDPEKGNTGQLTWTRLPQGFKNSPTLFNEALHRDLASFRALNPQVVMLQYVDDLLVAAPTYRDCKEGTRRLLQELSKLGYRVSAKKAQLCREEVTYLGYLLKGGKRWLTPARKATVMKIPTPTTPRQVREFLGKAGFCRLFIPGFASLAAPLYPLTRPKVPFTWTEAHQEAFGRIKEALLSAPALALPDLTKPFALYVDEKEGVARGVLTQTLGPWRRPVAYLSKKLDPVASGWPTCLKAIAAVALLLKDADKLTLGQNVLVIAPHNLESIVRQPPDRWMTNARMTHYQSLLLNERVSFAPPAILNPATLLPVESDDTPIHICSEILAEETGTRPDLRDQPLPGVPAWYTDGSSFIMDGRRQAGAAIVDNKRTVWASNLPEGTSAQKAELIALTQALRLAEGKSINIYTDSRYAFATAHVHGAIYKQRGWLTSAGKDIKNKEEILALLEAIHLPKRVAIIHCPGHQRGTDPVATGNRKADEAAKQAAQSTRILTETTKNAGKRTADGSEFEKRTADGSEFESPKKKAKVE

SEQ ID NO: 6978 - protein, 2094 aa, synthetic construct
MPAAKRVKLDGGDKKYSIGLDIGTNSVGWAVITDEYKVPSKKFKVLGNTDRHSIKKNLIGALLFDSGETAEATRLKRTARRRYTRRKNRICYLQEIFSNEMAKVDDSFFHRLEESFLVEEDKKHERHPIFGNIVDEVAYHEKYPTIYHLRKKLVDSTDKADLRLIYLALAHMIKFRGHFLIEGDLNPDNSDVDKLFIQLVQTYNQLFEENPINASGVDAKAILSARLSKSRRLENLIAQLPGEKKNGLFGNLIALSLGLTPNFKSNFDLAEDAKLQLSKDTYDDDLDNLLAQIGDQYADLFLAAKNLSDAILLSDILRVNTEITKAPLSASMIKRYDEHHQDLTLLKALVRQQLPEKYKEIFFDQSKNGYAGYIDGGASQEEFYKFIKPILEKMDGTEELLVKLNREDLLRKQRTFDNGSIPHQIHLGELHAILRRQEDFYPFLKDNREKIEKILTFRIPYYVGPLARGNSRFAWMTRKSEETITPWNFEEVVDKGASAQSFIERMTNFDKNLPNEKVLPKHSLLYEYFTVYNELTKVKYVTEGMRKPAFLSGEQKKAIVDLLFKTNRKVTVKQLKEDYFKKIECFDSVEISGVEDRFNASLGTYHDLLKIIKDKDFLDNEENEDILEDIVLTLTLFEDREMIEERLKTYAHLFDDKVMKQLKRRRYTGWGRLSRKLINGIRDKQSGKTILDFLKSDGFANRNFMQLIHDDSLTFKEDIQKAQVSGQGDSLHEHIANLAGSPAIKKGILQTVKVVDELVKVMGRHKPENIVIEMARENQTTQKGQKNSRERMKRIEEGIKELGSQILKEHPVENTQLQNEKLYLYYLQNGRDMYVDQELDINRLSDYDVDHIVPQSFLKDDSIDNKVLTRSDKARGKSDNVPSEEVVKKMKNYWRQLLNAKLITQRKFDNLTKAERGGLSELDKAGFIKRQLVETRQITKHVAQILDSRMNTKYDENDKLIREVKVITLKSKLVSDFRKDFQFYKVREINNYHHAHDAYLNAVVGTALIKKYPKLESEFVYGDYKVYDVRKMIAKSEQEIGKATAKYFFYSNIMNFFKTEITLANGEIRKRPLIETNGETGEIVWDKGRDFATVRKVLSMPQVNIVKKTEVQTGGFSKESILPKRNSDKLIARKKDWDPKKYGGFDSPTVAYSVLVVAKVEKGKSKKLKSVKELLGITIMERSSFEKNPIDFLEAKGYKEVKKDLIIKLPKYSLFELENGRKRMLASAGELQKGNELALPSKYVNFLYLASHYEKLKGSPEDNEQKQLFVEQHKHYLDEIIEQISEFSKRVILADANLDKVLSAYNKHRDKPIREQAENIIHLFTLTNLGAPAAFKYFDTTIDRKRYTSTKEVLDATLIHQSITGLYETRIDLSQLGGDGGGGSGGGPAPGGTLNLEDEYRLYETSAEPEVSPGSTWLSDFPQAWAETGGMGLAVRQAPLIIPLKATSTPVSIKQYPMSQEAKLGIKPHIQRLLDQGILVPCQSPWNTPLLPVKKPGTNDYRPVQDLREVNKRVEDIHPTVPNPYNLLSGLPPSHRWYTVLDLKDAFFCLRLHPTSQPLFAFEWRDPGMGISGQLTWTRLPQGFKNSPTLFNEALHRDLADFRIQHPDLILLQYVDDILLAATSELDCQQGTRALLLTLGNLGYRASAKKAQLCQKQVKYLGYLLKEGQRWLTEARKETVMGQPTPKTPRQLREFLGTAGFCRLWIPGFAEMAAPLYPLTKPGTLFNWGPDQQKAYQEIKQALLTAPALGLPDLTKPFELFVDEKQGYAKGVLTQKLGPWRRPVAYLSKKLDPVAAGWPPCLRMVAAIAVLRKDAGKLTMGQPLVILAPHAVEALVKQPPDRWLSNARMTHYQAMLLDTDRVQFGPVVALNPATLLPLPEEGAPHDCLEILAETHGTRPDLTDQPIPDADHTWYTDGSSFLQEGQRKAGAAVTTETEVIWARALPAGTSAQRAELIALTQALKMAEGKRLNVYTDSRYAFATAHIHGEIYRRRGWLTSEGREIKNKSEILALLKALFLPKRLSIIHCLGHQKGDSAEARGNRLADQAAREAAIKTPPDTSTLLAGKRTADGSEFEKRTADGSEFESPKKKAKVE

SEQ ID NO: 6979 - protein, 2094 aa, synthetic construct
MPAAKRVKLDGGDKKYSIGLDIGTNSVGWAVITDEYKVPSKKFKVLGNTDRHSIKKNLIGALLFDSGETAEATRLKRTARRRYTRRKNRICYLQEIFSNEMAKVDDSFFHRLEESFLVEEDKKHERHPIFGNIVDEVAYHEKYPTIYHLRKKLVDSTDKADLRLIYLALAHMIKFRGHFLIEGDLNPDNSDVDKLFIQLVQTYNQLFEENPINASGVDAKAILSARLSKSRRLENLIAQLPGEKKNGLFGNLIALSLGLTPNFKSNFDLAEDAKLQLSKDTYDDDLDNLLAQIGDQYADLFLAAKNLSDAILLSDILRVNTEITKAPLSASMIKRYDEHHQDLTLLKALVRQQLPEKYKEIFFDQSKNGYAGYIDGGASQEEFYKFIKPILEKMDGTEELLVKLNREDLLRKQRTFDNGSIPHQIHLGELHAILRRQEDFYPFLKDNREKIEKILTFRIPYYVGPLARGNSRFAWMTRKSEETITPWNFEEVVDKGASAQSFIERMTNFDKNLPNEKVLPKHSLLYEYFTVYNELTKVKYVTEGMRKPAFLSGEQKKAIVDLLFKTNRKVTVKQLKEDYFKKIECFDSVEISGVEDRFNASLGTYHDLLKIIKDKDFLDNEENEDILEDIVLTLTLFEDREMIEERLKTYAHLFDDKVMKQLKRRRYTGWGRLSRKLINGIRDKQSGKTILDFLKSDGFANRNFMQLIHDDSLTFKEDIQKAQVSGQGDSLHEHIANLAGSPAIKKGILQTVKVVDELVKVMGRHKPENIVIEMARENQTTQKGQKNSRERMKRIEEGIKELGSQILKEHPVENTQLQNEKLYLYYLQNGRDMYVDQELDINRLSDYDVDHIVPQSFLKDDSIDNKVLTRSDKARGKSDNVPSEEVVKKMKNYWRQLLNAKLITQRKFDNLTKAERGGLSELDKAGFIKRQLVETRQITKHVAQILDSRMNTKYDENDKLIREVKVITLKSKLVSDFRKDFQFYKVREINNYHHAHDAYLNAVVGTALIKKYPKLESEFVYGDYKVYDVRKMIAKSEQEIGKATAKYFFYSNIMNFFKTEITLANGEIRKRPLIETNGETGEIVWDKGRDFATVRKVLSMPQVNIVKKTEVQTGGFSKESILPKRNSDKLIARKKDWDPKKYGGFDSPTVAYSVLVVAKVEKGKSKKLKSVKELLGITIMERSSFEKNPIDFLEAKGYKEVKKDLIIKLPKYSLFELENGRKRMLASAGELQKGNELALPSKYVNFLYLASHYEKLKGSPEDNEQKQLFVEQHKHYLDEIIEQISEFSKRVILADANLDKVLSAYNKHRDKPIREQAENIIHLFTLTNLGAPAAFKYFDTTIDRKRYTSTKEVLDATLIHQSITGLYETRIDLSQLGGDGGGGSGGGPAPGGTLNLEDEYRLYETSAEPEVSPGSTWLSDFPQAWAETGGMGLAVRQAPLIIPLKATSTPVSIKQYPMSQEAKLGIKPHIQRLLDQGILVPCQSPWNTPLLPVKKPGTNDYRPVQDLREVNKRVEDIHPTVPNPYNLLSGLPPSHRWYTVLDLKDAFFCLRLHPTSQPLFAFEWRDPGMGISGQLTWTRLPQGFKNSPTLFNEALHRDLADFRIQHPDLILLQYVDDILLAATSELDCQQGTRALLLTLGNLGYRASAKKAQLCQKQVKYLGYLLKEGQRWLTEARKETVMGQPTPKTPRQLREFLGKAGFCRLFIPGFAEMAAPLYPLTKPGTLFNWGPDQQKAYQEIKQALLTAPALGLPDLTKPFELFVDEKQGYAKGVLTQKLGPWRRPVAYLSKKLDPVAAGWPPCLRMVAAIAVLRKDAGKLTMGQPLVILAPHAVEALVKQPPDRWLSNARMTHYQAMLLDTDRVQFGPVVALNPATLLPLPEEGAPHDCLEILAETHGTRPDLTDQPIPDADHTWYTDGSSFLQEGQRKAGAAVTTETEVIWARALPAGTSAQRAELIALTQALKMAEGKRLNVYTDSRYAFATAHIHGEIYRRRGWLTSEGREIKNKSEILALLKALFLPKRLSIIHCLGHQKGDSAEARGNRLADQAAREAAIKTPPDTSTLLAGKRTADGSEFEKRTADGSEFESPKKKAKVE

SEQ ID NO: 6980 - protein, 2094 aa, synthetic construct
MPAAKRVKLDGGDKKYSIGLDIGTNSVGWAVITDEYKVPSKKFKVLGNTDRHSIKKNLIGALLFDSGETAEATRLKRTARRRYTRRKNRICYLQEIFSNEMAKVDDSFFHRLEESFLVEEDKKHERHPIFGNIVDEVAYHEKYPTIYHLRKKLVDSTDKADLRLIYLALAHMIKFRGHFLIEGDLNPDNSDVDKLFIQLVQTYNQLFEENPINASGVDAKAILSARLSKSRRLENLIAQLPGEKKNGLFGNLIALSLGLTPNFKSNFDLAEDAKLQLSKDTYDDDLDNLLAQIGDQYADLFLAAKNLSDAILLSDILRVNTEITKAPLSASMIKRYDEHHQDLTLLKALVRQQLPEKYKEIFFDQSKNGYAGYIDGGASQEEFYKFIKPILEKMDGTEELLVKLNREDLLRKQRTFDNGSIPHQIHLGELHAILRRQEDFYPFLKDNREKIEKILTFRIPYYVGPLARGNSRFAWMTRKSEETITPWNFEEVVDKGASAQSFIERMTNFDKNLPNEKVLPKHSLLYEYFTVYNELTKVKYVTEGMRKPAFLSGEQKKAIVDLLFKTNRKVTVKQLKEDYFKKIECFDSVEISGVEDRFNASLGTYHDLLKIIKDKDFLDNEENEDILEDIVLTLTLFEDREMIEERLKTYAHLFDDKVMKQLKRRRYTGWGRLSRKLINGIRDKQSGKTILDFLKSDGFANRNFMQLIHDDSLTFKEDIQKAQVSGQGDSLHEHIANLAGSPAIKKGILQTVKVVDELVKVMGRHKPENIVIEMARENQTTQKGQKNSRERMKRIEEGIKELGSQILKEHPVENTQLQNEKLYLYYLQNGRDMYVDQELDINRLSDYDVDHIVPQSFLKDDSIDNKVLTRSDKARGKSDNVPSEEVVKKMKNYWRQLLNAKLITQRKFDNLTKAERGGLSELDKAGFIKRQLVETRQITKHVAQILDSRMNTKYDENDKLIREVKVITLKSKLVSDFRKDFQFYKVREINNYHHAHDAYLNAVVGTALIKKYPKLESEFVYGDYKVYDVRKMIAKSEQEIGKATAKYFFYSNIMNFFKTEITLANGEIRKRPLIETNGETGEIVWDKGRDFATVRKVLSMPQVNIVKKTEVQTGGFSKESILPKRNSDKLIARKKDWDPKKYGGFDSPTVAYSVLVVAKVEKGKSKKLKSVKELLGITIMERSSFEKNPIDFLEAKGYKEVKKDLIIKLPKYSLFELENGRKRMLASAGELQKGNELALPSKYVNFLYLASHYEKLKGSPEDNEQKQLFVEQHKHYLDEIIEQISEFSKRVILADANLDKVLSAYNKHRDKPIREQAENIIHLFTLTNLGAPAAFKYFDTTIDRKRYTSTKEVLDATLIHQSITGLYETRIDLSQLGGDGGGGSGGGPAPGGTLNIEDEYRLHETSKGPDVPLGSTWLSDFPQAWAETGGMGLAVRQAPLIIPLKATSTPVSIKQYPMSQEARLGIKPHIQRLLDQGILVPCQSPWNTPLLPVKKPGTNDYRPVQDLREVNKRVEDIHPTVPNPYNLLSGLPPSHQWYTVLDLKDAFFCLRLHPTSQSLFAFEWRDPEMGISGQLTWTRLPQGFKNSPTLFNEALHRDLADFRIQHPDLILLQYVDDLLLAATSELDCQQGTRALLQTLGDLGYRASAKKAQICQKQVKYLGYLLKEGQRWLTEARKETVMGQPTPKTPRQLREFLGKAGFCRLFIPGFAEMAAPLYPLTKPGTLFEWGPDQQKAYQEIKQALLTAPALGLPDLTKPFELFVDEKQGYAKGVLTQKLGPWRRPVAYLSKKLDPVAAGWPPCLRMVAAIAVLTKDAGKLTMGQPLVILAPHAVEALVKQPPDRWLSNARMTHYQALLLDTDRVQFGPIVALNPATLLPLPEEGLQHDCLDILAEAHGTRPDLTDQPLPDADHTWYTDGSSFLQEGQRKAGAAVTTETEVVWAKALPAGTSAQRAELIALTQALKMAEGKKLNVYTDSRYAFATAHIHGEIYRRRGWLTSEGKEIKNKDEILALLKALFLPKRLSIIHCPGHQKGNRAEARGNRMADQAAREVATRETPETSTLLAGKRTADGSEFEKRTADGSEFESPKKKAKVE

SEQ ID NO: 6981 - protein, 2114 aa, synthetic construct
MPAAKRVKLDGGDKKYSIGLDIGTNSVGWAVITDEYKVPSKKFKVLGNTDRHSIKKNLIGALLFDSGETAEATRLKRTARRRYTRRKNRICYLQEIFSNEMAKVDDSFFHRLEESFLVEEDKKHERHPIFGNIVDEVAYHEKYPTIYHLRKKLVDSTDKADLRLIYLALAHMIKFRGHFLIEGDLNPDNSDVDKLFIQLVQTYNQLFEENPINASGVDAKAILSARLSKSRRLENLIAQLPGEKKNGLFGNLIALSLGLTPNFKSNFDLAEDAKLQLSKDTYDDDLDNLLAQIGDQYADLFLAAKNLSDAILLSDILRVNTEITKAPLSASMIKRYDEHHQDLTLLKALVRQQLPEKYKEIFFDQSKNGYAGYIDGGASQEEFYKFIKPILEKMDGTEELLVKLNREDLLRKQRTFDNGSIPHQIHLGELHAILRRQEDFYPFLKDNREKIEKILTFRIPYYVGPLARGNSRFAWMTRKSEETITPWNFEEVVDKGASAQSFIERMTNFDKNLPNEKVLPKHSLLYEYFTVYNELTKVKYVTEGMRKPAFLSGEQKKAIVDLLFKTNRKVTVKQLKEDYFKKIECFDSVEISGVEDRFNASLGTYHDLLKIIKDKDFLDNEENEDILEDIVLTLTLFEDREMIEERLKTYAHLFDDKVMKQLKRRRYTGWGRLSRKLINGIRDKQSGKTILDFLKSDGFANRNFMQLIHDDSLTFKEDIQKAQVSGQGDSLHEHIANLAGSPAIKKGILQTVKVVDELVKVMGRHKPENIVIEMARENQTTQKGQKNSRERMKRIEEGIKELGSQILKEHPVENTQLQNEKLYLYYLQNGRDMYVDQELDINRLSDYDVDHIVPQSFLKDDSIDNKVLTRSDKARGKSDNVPSEEVVKKMKNYWRQLLNAKLITQRKFDNLTKAERGGLSELDKAGFIKRQLVETRQITKHVAQILDSRMNTKYDENDKLIREVKVITLKSKLVSDFRKDFQFYKVREINNYHHAHDAYLNAVVGTALIKKYPKLESEFVYGDYKVYDVRKMIAKSEQEIGKATAKYFFYSNIMNFFKTEITLANGEIRKRPLIETNGETGEIVWDKGRDFATVRKVLSMPQVNIVKKTEVQTGGFSKESILPKRNSDKLIARKKDWDPKKYGGFDSPTVAYSVLVVAKVEKGKSKKLKSVKELLGITIMERSSFEKNPIDFLEAKGYKEVKKDLIIKLPKYSLFELENGRKRMLASAGELQKGNELALPSKYVNFLYLASHYEKLKGSPEDNEQKQLFVEQHKHYLDEIIEQISEFSKRVILADANLDKVLSAYNKHRDKPIREQAENIIHLFTLTNLGAPAAFKYFDTTIDRKRYTSTKEVLDATLIHQSITGLYETRIDLSQLGGDGGGGSGGGPAPGGVQEISDSRPMLHIYLNGRRFLGLLDTGADKTCIAGRDWPANWPIHQTESSLQGLGMACGVARSSQPLRWQHEDKSGIIHPFVIPTLPFTLWGRDIMKDIKVRLMTDSPDDSQDLMIGAIESNLFADQISWKSDQPVWLNQWPLKQEKLQALQQLVTEQLQLGHLEESNSPWNTPVFVIKKKSGKWRLLQDLRAVNATMHDMGALQPGLPSPPAVPKGWEIIIIDLQDCFFNIKLHPEDCKRFAFSVPSPNFKRPYQRFQWKVLPQGMKNSPTLCQKFVDKAILTVRDKYQDSYIVHYMDDILLAHPSRSIVDEILTSMIQALNKHGLVVSTEKIQKYDNLKYLGTHIQGDSVSYQKLQIRTDKLRTLNDFQKLLGNINWIRPFLKLTTGELKPLFEILNPDSNPISTRKLTPEACKALQLMNERLSTARVKRLDLSQPWSLCILKTEYTPTACLWQDGVVEWIHLPHISPKVITPYDIFCTQLIIKGRHRSKELFSKDPDYIVVPYTKVQFDLLLQEKEDWPISLLGFLGEVHFHLPKDPLLTFTLQTAIIFPHMTSTTPLEKGIVIFTDGSANGRSVTYIQGREPIIKENTQNTAQQAEIVAVITAFEEVSQPFNLYTDSKYVTGLFPEIETATLSPRTKIYTELKHLQRLIHKRQEKFYIGHIRGHTGLPGPLAQGNAYADSLTRILTAAGKRTADGSEFEKRTADGSEFESPKKKAKVE

SEQ ID NO: 6982 - protein, 2088 aa, synthetic construct
MPAAKRVKLDGGDKKYSIGLDIGTNSVGWAVITDEYKVPSKKFKVLGNTDRHSIKKNLIGALLFDSGETAEATRLKRTARRRYTRRKNRICYLQEIFSNEMAKVDDSFFHRLEESFLVEEDKKHERHPIFGNIVDEVAYHEKYPTIYHLRKKLVDSTDKADLRLIYLALAHMIKFRGHFLIEGDLNPDNSDVDKLFIQLVQTYNQLFEENPINASGVDAKAILSARLSKSRRLENLIAQLPGEKKNGLFGNLIALSLGLTPNFKSNFDLAEDAKLQLSKDTYDDDLDNLLAQIGDQYADLFLAAKNLSDAILLSDILRVNTEITKAPLSASMIKRYDEHHQDLTLLKALVRQQLPEKYKEIFFDQSKNGYAGYIDGGASQEEFYKFIKPILEKMDGTEELLVKLNREDLLRKQRTFDNGSIPHQIHLGELHAILRRQEDFYPFLKDNREKIEKILTFRIPYYVGPLARGNSRFAWMTRKSEETITPWNFEEVVDKGASAQSFIERMTNFDKNLPNEKVLPKHSLLYEYFTVYNELTKVKYVTEGMRKPAFLSGEQKKAIVDLLFKTNRKVTVKQLKEDYFKKIECFDSVEISGVEDRFNASLGTYHDLLKIIKDKDFLDNEENEDILEDIVLTLTLFEDREMIEERLKTYAHLFDDKVMKQLKRRRYTGWGRLSRKLINGIRDKQSGKTILDFLKSDGFANRNFMQLIHDDSLTFKEDIQKAQVSGQGDSLHEHIANLAGSPAIKKGILQTVKVVDELVKVMGRHKPENIVIEMARENQTTQKGQKNSRERMKRIEEGIKELGSQILKEHPVENTQLQNEKLYLYYLQNGRDMYVDQELDINRLSDYDVDHIVPQSFLKDDSIDNKVLTRSDKARGKSDNVPSEEVVKKMKNYWRQLLNAKLITQRKFDNLTKAERGGLSELDKAGFIKRQLVETRQITKHVAQILDSRMNTKYDENDKLIREVKVITLKSKLVSDFRKDFQFYKVREINNYHHAHDAYLNAVVGTALIKKYPKLESEFVYGDYKVYDVRKMIAKSEQEIGKATAKYFFYSNIMNFFKTEITLANGEIRKRPLIETNGETGEIVWDKGRDFATVRKVLSMPQVNIVKKTEVQTGGFSKESILPKRNSDKLIARKKDWDPKKYGGFDSPTVAYSVLVVAKVEKGKSKKLKSVKELLGITIMERSSFEKNPIDFLEAKGYKEVKKDLIIKLPKYSLFELENGRKRMLASAGELQKGNELALPSKYVNFLYLASHYEKLKGSPEDNEQKQLFVEQHKHYLDEIIEQISEFSKRVILADANLDKVLSAYNKHRDKPIREQAENIIHLFTLTNLGAPAAFKYFDTTIDRKRYTSTKEVLDATLIHQSITGLYETRIDLSQLGGDGGGGSGGGPAPGGTLQLDDEYRLYSPLVKPDQNIQFWLEQFPQAWAETAGMGLAKQVPPQVIQLKASATPVSVRQYPLSKEAQEGIRPHVQRLIQQGILVPVQSPWNTPLLPVRKPGTNDYRPVQDLREVNKRVQDIHPTVPNPYNLLCALPPQRSWYTVLDLKDAFFCLRLHPTSQPLFAFEWRDPGTGRTGQLTWTRLPQGFKNSPTIFDEALHRDLANFRIQHPQVTLLQYVDDLLLAGATKQDCLEGTKALLLELSDLGYRASAKKAQICRREVTYLGYSLRDGQRWLTEARKKTVVQIPAPTTAKQVREFLGTAGFCRLWIPGFATLAAPLYPLTKEKGEFSWAPEHQKAFDAIKKALLSAPALALPDVTKPFTLYVDERKGVARGVLTQTLGPWRRPVAYLSKKLDPVASGWPVCLKAIAAVAILVKDADKLTLGQNITVIAPHALENIVRQPPDRWMTNARMTHYQSLLLTERVTFAPPAALNPATLLPEETDEPVTHDCHQLLIEETGVRKDLTDIPLTGEVLTWFTDGSSYVVEGKRMAGAAVVDGTRTIWASSLPEGTSAQKAELMALTQALRLAEGKSINIYTDSRYAFATAHVHGAIYKQRGLLTSAGREIKNKEEILSLLEALHLPKRLAIIHCPGHQKAKDPISRGNQMADRVAKQAAQGVNLLAGKRTADGSEFEKRTADGSEFESPKKKAKVE

SEQ ID NO: 6983 - protein, 2085 aa, synthetic construct
MPAAKRVKLDGGDKKYSIGLDIGTNSVGWAVITDEYKVPSKKFKVLGNTDRHSIKKNLIGALLFDSGETAEATRLKRTARRRYTRRKNRICYLQEIFSNEMAKVDDSFFHRLEESFLVEEDKKHERHPIFGNIVDEVAYHEKYPTIYHLRKKLVDSTDKADLRLIYLALAHMIKFRGHFLIEGDLNPDNSDVDKLFIQLVQTYNQLFEENPINASGVDAKAILSARLSKSRRLENLIAQLPGEKKNGLFGNLIALSLGLTPNFKSNFDLAEDAKLQLSKDTYDDDLDNLLAQIGDQYADLFLAAKNLSDAILLSDILRVNTEITKAPLSASMIKRYDEHHQDLTLLKALVRQQLPEKYKEIFFDQSKNGYAGYIDGGASQEEFYKFIKPILEKMDGTEELLVKLNREDLLRKQRTFDNGSIPHQIHLGELHAILRRQEDFYPFLKDNREKIEKILTFRIPYYVGPLARGNSRFAWMTRKSEETITPWNFEEVVDKGASAQSFIERMTNFDKNLPNEKVLPKHSLLYEYFTVYNELTKVKYVTEGMRKPAFLSGEQKKAIVDLLFKTNRKVTVKQLKEDYFKKIECFDSVEISGVEDRFNASLGTYHDLLKIIKDKDFLDNEENEDILEDIVLTLTLFEDREMIEERLKTYAHLFDDKVMKQLKRRRYTGWGRLSRKLINGIRDKQSGKTILDFLKSDGFANRNFMQLIHDDSLTFKEDIQKAQVSGQGDSLHEHIANLAGSPAIKKGILQTVKVVDELVKVMGRHKPENIVIEMARENQTTQKGQKNSRERMKRIEEGIKELGSQILKEHPVENTQLQNEKLYLYYLQNGRDMYVDQELDINRLSDYDVDHIVPQSFLKDDSIDNKVLTRSDKARGKSDNVPSEEVVKKMKNYWRQLLNAKLITQRKFDNLTKAERGGLSELDKAGFIKRQLVETRQITKHVAQILDSRMNTKYDENDKLIREVKVITLKSKLVSDFRKDFQFYKVREINNYHHAHDAYLNAVVGTALIKKYPKLESEFVYGDYKVYDVRKMIAKSEQEIGKATAKYFFYSNIMNFFKTEITLANGEIRKRPLIETNGETGEIVWDKGRDFATVRKVLSMPQVNIVKKTEVQTGGFSKESILPKRNSDKLIARKKDWDPKKYGGFDSPTVAYSVLVVAKVEKGKSKKLKSVKELLGITIMERSSFEKNPIDFLEAKGYKEVKKDLIIKLPKYSLFELENGRKRMLASAGELQKGNELALPSKYVNFLYLASHYEKLKGSPEDNEQKQLFVEQHKHYLDEIIEQISEFSKRVILADANLDKVLSAYNKHRDKPIREQAENIIHLFTLTNLGAPAAFKYFDTTIDRKRYTSTKEVLDATLIHQSITGLYETRIDLSQLGGDGGGGSGGGPAPGGVPWLMKKPLQLTVLVPLHEYQERLLQQTALPKEQKELLQKLFLKYDALWQHWENQVGHRRIKPHNIATGTLAPRPQKQYPINPKAKPSIQIVIDDLLKQGVLIQQNSTMNTPVYPVPKPDGKWRMVLDYREVNKTIPLIAAQNQHSAGILSSIYRGKYKTTLDLTNGFWAHPITPESYWLTAFTWQGKQYCWTRLPQGFLNSPALFTADVVDLLKEIPNVQAYVDDIYISHDDPQEHLEQLEKIFSILLNAGYVVSLKKSEIAQREVEFLGFNITKEGRGLTDTFKQKLLNITPPKDLKQLQSILGLLNFARNFIPNYSELVKPLYTIVANANGKFISWTEDNSNQLQHIISVLNQADNLEERNPETRLIIKVNSSPSAGYIRYYNEGSKRPIMYVNYIFSKAEAKFTQTEKLLTTMHKGLIKAMDLAMGQEILVYSPIVSMTKIQRTPLPERKALPVRWITWMTYLEDPRIQFHYDKSLPELQQIPNVTEDVIAKTKHPSEFAMVFYTDGSAIKHPDVNKSHSAGMGIAQVQFIPEYKIVHQWSIPLGDHTAQLAEIAAVEFACKKALKISGPVLIVTDSFYVAESANKELPYWKSNGFLNNKKKPLRHVSKWKSIAECLQLKPDIIIMHEKGHQQPMTTLHTEGNNLADKLATQGSYVVHAGKRTADGSEFEKRTADGSEFESPKKKAKVE

SEQ ID NO: 6984 - protein, 2085 aa, synthetic construct
MPAAKRVKLDGGDKKYSIGLDIGTNSVGWAVITDEYKVPSKKFKVLGNTDRHSIKKNLIGALLFDSGETAEATRLKRTARRRYTRRKNRICYLQEIFSNEMAKVDDSFFHRLEESFLVEEDKKHERHPIFGNIVDEVAYHEKYPTIYHLRKKLVDSTDKADLRLIYLALAHMIKFRGHFLIEGDLNPDNSDVDKLFIQLVQTYNQLFEENPINASGVDAKAILSARLSKSRRLENLIAQLPGEKKNGLFGNLIALSLGLTPNFKSNFDLAEDAKLQLSKDTYDDDLDNLLAQIGDQYADLFLAAKNLSDAILLSDILRVNTEITKAPLSASMIKRYDEHHQDLTLLKALVRQQLPEKYKEIFFDQSKNGYAGYIDGGASQEEFYKFIKPILEKMDGTEELLVKLNREDLLRKQRTFDNGSIPHQIHLGELHAILRRQEDFYPFLKDNREKIEKILTFRIPYYVGPLARGNSRFAWMTRKSEETITPWNFEEVVDKGASAQSFIERMTNFDKNLPNEKVLPKHSLLYEYFTVYNELTKVKYVTEGMRKPAFLSGEQKKAIVDLLFKTNRKVTVKQLKEDYFKKIECFDSVEISGVEDRFNASLGTYHDLLKIIKDKDFLDNEENEDILEDIVLTLTLFEDREMIEERLKTYAHLFDDKVMKQLKRRRYTGWGRLSRKLINGIRDKQSGKTILDFLKSDGFANRNFMQLIHDDSLTFKEDIQKAQVSGQGDSLHEHIANLAGSPAIKKGILQTVKVVDELVKVMGRHKPENIVIEMARENQTTQKGQKNSRERMKRIEEGIKELGSQILKEHPVENTQLQNEKLYLYYLQNGRDMYVDQELDINRLSDYDVDHIVPQSFLKDDSIDNKVLTRSDKARGKSDNVPSEEVVKKMKNYWRQLLNAKLITQRKFDNLTKAERGGLSELDKAGFIKRQLVETRQITKHVAQILDSRMNTKYDENDKLIREVKVITLKSKLVSDFRKDFQFYKVREINNYHHAHDAYLNAVVGTALIKKYPKLESEFVYGDYKVYDVRKMIAKSEQEIGKATAKYFFYSNIMNFFKTEITLANGEIRKRPLIETNGETGEIVWDKGRDFATVRKVLSMPQVNIVKKTEVQTGGFSKESILPKRNSDKLIARKKDWDPKKYGGFDSPTVAYSVLVVAKVEKGKSKKLKSVKELLGITIMERSSFEKNPIDFLEAKGYKEVKKDLIIKLPKYSLFELENGRKRMLASAGELQKGNELALPSKYVNFLYLASHYEKLKGSPEDNEQKQLFVEQHKHYLDEIIEQISEFSKRVILADANLDKVLSAYNKHRDKPIREQAENIIHLFTLTNLGAPAAFKYFDTTIDRKRYTSTKEVLDATLIHQSITGLYETRIDLSQLGGDGGGGSGGGPAPGGIPWLMKKPLQLTTLVPLQEYEERLLKQTMLTGSYKEKLQSLFLKYDALWQHWENQVGHRRIKPHHIATGTVNPRPQKQYPINPKAKASIQTVINDLLKQGVLIQQNSIMNTPVYPVPKPDGKWRMVLDYREVNKTIPLIAAQNQHSAGILSSIFRGKYKTTLDLSNGFWAHSITPESYWLTAFTWLGQQYCWTRLPQGFLNSPALFNADVVDLLKEVPNVQVYVDDIYISHDDPREHLEQLEKVFSLLLNAGYVVSLKKSEIAQHEVEFLGFNITKEGRGLTETFKQKLLNITPPRDLKQLQSILGLLNFARNFIPNFSELVKPLYNIIATAPGKYITWTTDNSQQLQNIISMLNSAENLEERNPEVRLIMKVNTSPSAGYIRFYNEFAKRPIMYLNYVYTKAEVKFTNTEKLLTTIHKGLIKALDLGMGQEILVYSPIVSMTKIQKTPLPERKALPIRWITWMSYLEDPRIQFHYDKTLPELQQVPTVTDDIIAKIKHPSEFSMVFYTDGSAIKHPNVNKSHNAGMGIAQVQFKPEFTVINTWSIPLGDHTAQLAEVAAVEFACKKALKIDGPVLIVTDSFYVAESVNKELPYWQSNGFFNNKKKPLKHVSKWKSIADCIQLKPDIIIIHEKGHQPTASTFHTEGNNLADKLATQGSYVVNAGKRTADGSEFEKRTADGSEFESPKKKAKVE

SEQ ID NO: 6985 - protein, 2100 aa, synthetic construct
MPAAKRVKLDGGDKKYSIGLDIGTNSVGWAVITDEYKVPSKKFKVLGNTDRHSIKKNLIGALLFDSGETAEATRLKRTARRRYTRRKNRICYLQEIFSNEMAKVDDSFFHRLEESFLVEEDKKHERHPIFGNIVDEVAYHEKYPTIYHLRKKLVDSTDKADLRLIYLALAHMIKFRGHFLIEGDLNPDNSDVDKLFIQLVQTYNQLFEENPINASGVDAKAILSARLSKSRRLENLIAQLPGEKKNGLFGNLIALSLGLTPNFKSNFDLAEDAKLQLSKDTYDDDLDNLLAQIGDQYADLFLAAKNLSDAILLSDILRVNTEITKAPLSASMIKRYDEHHQDLTLLKALVRQQLPEKYKEIFFDQSKNGYAGYIDGGASQEEFYKFIKPILEKMDGTEELLVKLNREDLLRKQRTFDNGSIPHQIHLGELHAILRRQEDFYPFLKDNREKIEKILTFRIPYYVGPLARGNSRFAWMTRKSEETITPWNFEEVVDKGASAQSFIERMTNFDKNLPNEKVLPKHSLLYEYFTVYNELTKVKYVTEGMRKPAFLSGEQKKAIVDLLFKTNRKVTVKQLKEDYFKKIECFDSVEISGVEDRFNASLGTYHDLLKIIKDKDFLDNEENEDILEDIVLTLTLFEDREMIEERLKTYAHLFDDKVMKQLKRRRYTGWGRLSRKLINGIRDKQSGKTILDFLKSDGFANRNFMQLIHDDSLTFKEDIQKAQVSGQGDSLHEHIANLAGSPAIKKGILQTVKVVDELVKVMGRHKPENIVIEMARENQTTQKGQKNSRERMKRIEEGIKELGSQILKEHPVENTQLQNEKLYLYYLQNGRDMYVDQELDINRLSDYDVDHIVPQSFLKDDSIDNKVLTRSDKARGKSDNVPSEEVVKKMKNYWRQLLNAKLITQRKFDNLTKAERGGLSELDKAGFIKRQLVETRQITKHVAQILDSRMNTKYDENDKLIREVKVITLKSKLVSDFRKDFQFYKVREINNYHHAHDAYLNAVVGTALIKKYPKLESEFVYGDYKVYDVRKMIAKSEQEIGKATAKYFFYSNIMNFFKTEITLANGEIRKRPLIETNGETGEIVWDKGRDFATVRKVLSMPQVNIVKKTEVQTGGFSKESILPKRNSDKLIARKKDWDPKKYGGFDSPTVAYSVLVVAKVEKGKSKKLKSVKELLGITIMERSSFEKNPIDFLEAKGYKEVKKDLIIKLPKYSLFELENGRKRMLASAGELQKGNELALPSKYVNFLYLASHYEKLKGSPEDNEQKQLFVEQHKHYLDEIIEQISEFSKRVILADANLDKVLSAYNKHRDKPIREQAENIIHLFTLTNLGAPAAFKYFDTTIDRKRYTSTKEVLDATLIHQSITGLYETRIDLSQLGGDGGGGSPAPGGGGGTVSLQDEHRLFDIPVTTSLPDVWLQDFPQAWAETGGLGRAKCQAPIIIDLKPTAVPVSIKQYPMSLEAHMGIRQHIIKFLELGVLRPCRSPWNTPLLPVKKPGTQDYRPVQDLREINKRTVDIHPTVPNPYNLLSTLKPDYSWYTVLDLKDAFFCLPLAPQSQELFAFEWKDPERGISGQLTWTRLPQGFKNSPTLFNEALHRDLTDFRTQHPEVTLLQYVDDLLLAAPTKKACTQGTRHLLQELGEKGYRASAKKAQICQTKVTYLGYILSEGKRWLTPGRIETVARIPPPRNPREVREFLGTAGFCRLWIPGFAELAAPLYALTKPSTPFTWQTEHQLAFEALKKALLSAPALGLPDTSKPFTLFLDERQGIAKGVLTQKLGPWKRPVAYLSKKLDPVAAGWPPCLRIMAATAMLVKDSAKLTLGQPLTVITPHTLEAIVRQPPDRWITNARLTHYQALLLDTDRVQFGPPVTLNPATLLPVPENQPSPHDCRQVLAETHGTREDLKDQELPDADHTWYTDGSSYLDSGTRRAGAAVVDGHNTIWAQSLPPGTSAQKAELIALTKALELSKGKKANIYTDSRYAFATAHTHGSIYERRGWLTSEGKEIKNKAEIIALLKALFLPQEVAIIHCPGHQKGQDPVAVGNRQADRVARQAAMAEVLTLATEPDNTSHITAGKRTADGSEFEKRTADGSEFESPKKKAKVE

SEQ ID NO: 6986 - protein, 2092 aa, synthetic construct
MPAAKRVKLDGGDKKYSIGLDIGTNSVGWAVITDEYKVPSKKFKVLGNTDRHSIKKNLIGALLFDSGETAEATRLKRTARRRYTRRKNRICYLQEIFSNEMAKVDDSFFHRLEESFLVEEDKKHERHPIFGNIVDEVAYHEKYPTIYHLRKKLVDSTDKADLRLIYLALAHMIKFRGHFLIEGDLNPDNSDVDKLFIQLVQTYNQLFEENPINASGVDAKAILSARLSKSRRLENLIAQLPGEKKNGLFGNLIALSLGLTPNFKSNFDLAEDAKLQLSKDTYDDDLDNLLAQIGDQYADLFLAAKNLSDAILLSDILRVNTEITKAPLSASMIKRYDEHHQDLTLLKALVRQQLPEKYKEIFFDQSKNGYAGYIDGGASQEEFYKFIKPILEKMDGTEELLVKLNREDLLRKQRTFDNGSIPHQIHLGELHAILRRQEDFYPFLKDNREKIEKILTFRIPYYVGPLARGNSRFAWMTRKSEETITPWNFEEVVDKGASAQSFIERMTNFDKNLPNEKVLPKHSLLYEYFTVYNELTKVKYVTEGMRKPAFLSGEQKKAIVDLLFKTNRKVTVKQLKEDYFKKIECFDSVEISGVEDRFNASLGTYHDLLKIIKDKDFLDNEENEDILEDIVLTLTLFEDREMIEERLKTYAHLFDDKVMKQLKRRRYTGWGRLSRKLINGIRDKQSGKTILDFLKSDGFANRNFMQLIHDDSLTFKEDIQKAQVSGQGDSLHEHIANLAGSPAIKKGILQTVKVVDELVKVMGRHKPENIVIEMARENQTTQKGQKNSRERMKRIEEGIKELGSQILKEHPVENTQLQNEKLYLYYLQNGRDMYVDQELDINRLSDYDVDHIVPQSFLKDDSIDNKVLTRSDKARGKSDNVPSEEVVKKMKNYWRQLLNAKLITQRKFDNLTKAERGGLSELDKAGFIKRQLVETRQITKHVAQILDSRMNTKYDENDKLIREVKVITLKSKLVSDFRKDFQFYKVREINNYHHAHDAYLNAVVGTALIKKYPKLESEFVYGDYKVYDVRKMIAKSEQEIGKATAKYFFYSNIMNFFKTEITLANGEIRKRPLIETNGETGEIVWDKGRDFATVRKVLSMPQVNIVKKTEVQTGGFSKESILPKRNSDKLIARKKDWDPKKYGGFDSPTVAYSVLVVAKVEKGKSKKLKSVKELLGITIMERSSFEKNPIDFLEAKGYKEVKKDLIIKLPKYSLFELENGRKRMLASAGELQKGNELALPSKYVNFLYLASHYEKLKGSPEDNEQKQLFVEQHKHYLDEIIEQISEFSKRVILADANLDKVLSAYNKHRDKPIREQAENIIHLFTLTNLGAPAAFKYFDTTIDRKRYTSTKEVLDATLIHQSITGLYETRIDLSQLGGDGGGGSPAPGGGGGVLNLEEEYRLHEKPVPSSIDPSWLQLFPTVWAERAGMGLANQVPPVVVELRSGASPVAVRQYPMSKEAREGIRPHIQKFLDLGVLVPCRSPWNTPLLPVKKPGTNDYRPVQDLREINKRVQDIHPTVPNPYNLLSSLPPSYTWYSVLDLKDAFFCLRLHPNSQPLFAFEWKDPEKGNTGQLTWTRLPQGFKNSPTLFDEALHRDLAPFRALNPQVVLLQYVDDLLVAAPTYEDCKKGTQKLLQELSKLGYRVSAKKAQLCQREVTYLGYLLKEGKRWLTPARKATVMKIPVPTTPRQVREFLGTAGFCRLWIPGFASLAAPLYPLTKESIPFIWTEEHQQAFDHIKKALLSAPALALPDLTKPFTLYIDERAGVARGVLTQTLGPWRRPVAYLSKKLDPVASGWPTCLKAVAAVALLLKDADKLTLGQNVTVIASHSLESIVRQPPDRWMTNARMTHYQSLLLNERVSFAPPAVLNPATLLPVESEATPVHRCSEILAEETGTRRDLEDQPLPGVPTWYTDGSSFITEGKRRAGAPIVDGKRTVWASSLPEGTSAQKAELVALTQALRLAEGKNINIYTDSRYAFATAHIHGAIYKQRGLLTSAGKDIKNKEEILALLEAIHLPRRVAIIHCPGHQRGSNPVATGNRRADEAAKQAALSTRVLAGTTKPAGKRTADGSEFEKRTADGSEFESPKKKAKVE

SEQ ID NO: 6987 - protein, 2092 aa, synthetic construct
MPAAKRVKLDGGDKKYSIGLDIGTNSVGWAVITDEYKVPSKKFKVLGNTDRHSIKKNLIGALLFDSGETAEATRLKRTARRRYTRRKNRICYLQEIFSNEMAKVDDSFFHRLEESFLVEEDKKHERHPIFGNIVDEVAYHEKYPTIYHLRKKLVDSTDKADLRLIYLALAHMIKFRGHFLIEGDLNPDNSDVDKLFIQLVQTYNQLFEENPINASGVDAKAILSARLSKSRRLENLIAQLPGEKKNGLFGNLIALSLGLTPNFKSNFDLAEDAKLQLSKDTYDDDLDNLLAQIGDQYADLFLAAKNLSDAILLSDILRVNTEITKAPLSASMIKRYDEHHQDLTLLKALVRQQLPEKYKEIFFDQSKNGYAGYIDGGASQEEFYKFIKPILEKMDGTEELLVKLNREDLLRKQRTFDNGSIPHQIHLGELHAILRRQEDFYPFLKDNREKIEKILTFRIPYYVGPLARGNSRFAWMTRKSEETITPWNFEEVVDKGASAQSFIERMTNFDKNLPNEKVLPKHSLLYEYFTVYNELTKVKYVTEGMRKPAFLSGEQKKAIVDLLFKTNRKVTVKQLKEDYFKKIECFDSVEISGVEDRFNASLGTYHDLLKIIKDKDFLDNEENEDILEDIVLTLTLFEDREMIEERLKTYAHLFDDKVMKQLKRRRYTGWGRLSRKLINGIRDKQSGKTILDFLKSDGFANRNFMQLIHDDSLTFKEDIQKAQVSGQGDSLHEHIANLAGSPAIKKGILQTVKVVDELVKVMGRHKPENIVIEMARENQTTQKGQKNSRERMKRIEEGIKELGSQILKEHPVENTQLQNEKLYLYYLQNGRDMYVDQELDINRLSDYDVDHIVPQSFLKDDSIDNKVLTRSDKARGKSDNVPSEEVVKKMKNYWRQLLNAKLITQRKFDNLTKAERGGLSELDKAGFIKRQLVETRQITKHVAQILDSRMNTKYDENDKLIREVKVITLKSKLVSDFRKDFQFYKVREINNYHHAHDAYLNAVVGTALIKKYPKLESEFVYGDYKVYDVRKMIAKSEQEIGKATAKYFFYSNIMNFFKTEITLANGEIRKRPLIETNGETGEIVWDKGRDFATVRKVLSMPQVNIVKKTEVQTGGFSKESILPKRNSDKLIARKKDWDPKKYGGFDSPTVAYSVLVVAKVEKGKSKKLKSVKELLGITIMERSSFEKNPIDFLEAKGYKEVKKDLIIKLPKYSLFELENGRKRMLASAGELQKGNELALPSKYVNFLYLASHYEKLKGSPEDNEQKQLFVEQHKHYLDEIIEQISEFSKRVILADANLDKVLSAYNKHRDKPIREQAENIIHLFTLTNLGAPAAFKYFDTTIDRKRYTSTKEVLDATLIHQSITGLYETRIDLSQLGGDGGGGSPAPGGGGGVLNLEEEYRLHEKPVPSSIDPSWLQLFPTVWAERAGMGLANQVPPVVVELRSGASPVAVRQYPMSKEAREGIRPHIQKFLDLGVLVPCRSPWNTPLLPVKKPGTNDYRPVQDLREINKRVQDIHPTVPNPYNLLSSLPPSYTWYSVLDLKDAFFCLRLHPNSQPLFAFEWKDPEKGNTGQLTWTRLPQGFKNSPTLFNEALHRDLAPFRALNPQVVLLQYVDDLLVAAPTYEDCKKGTQKLLQELSKLGYRVSAKKAQLCQREVTYLGYLLKEGKRWLTPARKATVMKIPVPTTPRQVREFLGTAGFCRLWIPGFASLAAPLYPLTKPSIPFIWTEEHQQAFDHIKKALLSAPALALPDLTKPFTLYIDERAGVARGVLTQTLGPWRRPVAYLSKKLDPVASGWPTCLKAVAAVALLLKDADKLTLGQNVTVIASHSLESIVRQPPDRWMTNARMTHYQSLLLNERVSFAPPAVLNPATLLPVESEATPVHRCSEILAEETGTRRDLEDQPLPGVPTWYTDGSSFITEGKRRAGAPIVDGKRTVWASSLPEGTSAQKAELVALTQALRLAEGKNINIYTDSRYAFATAHIHGAIYKQRGWLTSAGKDIKNKEEILALLEAIHLPRRVAIIHCPGHQRGSNPVATGNRRADEAAKQAALSTRVLAGTTKPAGKRTADGSEFEKRTADGSEFESPKKKAKVE

SEQ ID NO: 6988 - protein, 2125 aa, synthetic construct
MPAAKRVKLDGGDKKYSIGLDIGTNSVGWAVITDEYKVPSKKFKVLGNTDRHSIKKNLIGALLFDSGETAEATRLKRTARRRYTRRKNRICYLQEIFSNEMAKVDDSFFHRLEESFLVEEDKKHERHPIFGNIVDEVAYHEKYPTIYHLRKKLVDSTDKADLRLIYLALAHMIKFRGHFLIEGDLNPDNSDVDKLFIQLVQTYNQLFEENPINASGVDAKAILSARLSKSRRLENLIAQLPGEKKNGLFGNLIALSLGLTPNFKSNFDLAEDAKLQLSKDTYDDDLDNLLAQIGDQYADLFLAAKNLSDAILLSDILRVNTEITKAPLSASMIKRYDEHHQDLTLLKALVRQQLPEKYKEIFFDQSKNGYAGYIDGGASQEEFYKFIKPILEKMDGTEELLVKLNREDLLRKQRTFDNGSIPHQIHLGELHAILRRQEDFYPFLKDNREKIEKILTFRIPYYVGPLARGNSRFAWMTRKSEETITPWNFEEVVDKGASAQSFIERMTNFDKNLPNEKVLPKHSLLYEYFTVYNELTKVKYVTEGMRKPAFLSGEQKKAIVDLLFKTNRKVTVKQLKEDYFKKIECFDSVEISGVEDRFNASLGTYHDLLKIIKDKDFLDNEENEDILEDIVLTLTLFEDREMIEERLKTYAHLFDDKVMKQLKRRRYTGWGRLSRKLINGIRDKQSGKTILDFLKSDGFANRNFMQLIHDDSLTFKEDIQKAQVSGQGDSLHEHIANLAGSPAIKKGILQTVKVVDELVKVMGRHKPENIVIEMARENQTTQKGQKNSRERMKRIEEGIKELGSQILKEHPVENTQLQNEKLYLYYLQNGRDMYVDQELDINRLSDYDVDHIVPQSFLKDDSIDNKVLTRSDKARGKSDNVPSEEVVKKMKNYWRQLLNAKLITQRKFDNLTKAERGGLSELDKAGFIKRQLVETRQITKHVAQILDSRMNTKYDENDKLIREVKVITLKSKLVSDFRKDFQFYKVREINNYHHAHDAYLNAVVGTALIKKYPKLESEFVYGDYKVYDVRKMIAKSEQEIGKATAKYFFYSNIMNFFKTEITLANGEIRKRPLIETNGETGEIVWDKGRDFATVRKVLSMPQVNIVKKTEVQTGGFSKESILPKRNSDKLIARKKDWDPKKYGGFDSPTVAYSVLVVAKVEKGKSKKLKSVKELLGITIMERSSFEKNPIDFLEAKGYKEVKKDLIIKLPKYSLFELENGRKRMLASAGELQKGNELALPSKYVNFLYLASHYEKLKGSPEDNEQKQLFVEQHKHYLDEIIEQISEFSKRVILADANLDKVLSAYNKHRDKPIREQAENIIHLFTLTNLGAPAAFKYFDTTIDRKRYTSTKEVLDATLIHQSITGLYETRIDLSQLGGDGGGGSPAPGGGGGLLGRDLLTKLKAQIQFSTEGPQVTWEDRPAMCLVLNLEEEYRLHEKPVPPSIDPSWLQLFPMVWAEKAGMGLANQVPPVVVELKSDASPVAVRQYPMSKEAREGIRPHIQRFLDLGILVPCQSPWNTPLLPVKKPGTNDYRPVQDLREVNKRVQDIHPTVPNPYNLLSSLPPSHTWYSVLDLKDAFFCLKLHPNSQPLFAFEWRDPEKGNTGQLTWTRLPQGFKNSPTLFNEALHRDLASFRALNPQVVMLQYVDDLLVAAPTYRDCKEGTRRLLQELSKLGYRVSAKKAQLCREEVTYLGYLLKGGKRWLTPARKATVMKIPTPTTPRQVREFLGTAGFCRLWIPGFASLAAPLYPLTRPKVPFTWTEAHQEAFGRIKEALLSAPALALPDLTKPFALYVDEKEGVARGVLTQTLGPWRRPVAYLSKKLDPVASGWPTCLKAIAAVALLLKDADKLTLGQNVLVIAPHNLESIVRQPPDRWMTNARMTHYQSLLLNERVSFAPPAILNPATLLPVESDDTPIHICSEILAEETGTRPDLRDQPLPGVPAWYTDGSSFIMDGRRQAGAAIVDNKRTVWASNLPEGTSAQKAELIALTQALRLAEGKSINIYTDSRYAFATAHVHGAIYKQRGWLTSAGKDIKNKEEILALLEAIHLPKRVAIIHCPGHQRGTDPVATGNRKADEAAKQAAQSTRILTETTKNAGKRTADGSEFEKRTADGSEFESPKKKAKVE

SEQ ID NO: 6989 - protein, 2216 aa, synthetic construct
MPAAKRVKLDGGDKKYSIGLDIGTNSVGWAVITDEYKVPSKKFKVLGNTDRHSIKKNLIGALLFDSGETAEATRLKRTARRRYTRRKNRICYLQEIFSNEMAKVDDSFFHRLEESFLVEEDKKHERHPIFGNIVDEVAYHEKYPTIYHLRKKLVDSTDKADLRLIYLALAHMIKFRGHFLIEGDLNPDNSDVDKLFIQLVQTYNQLFEENPINASGVDAKAILSARLSKSRRLENLIAQLPGEKKNGLFGNLIALSLGLTPNFKSNFDLAEDAKLQLSKDTYDDDLDNLLAQIGDQYADLFLAAKNLSDAILLSDILRVNTEITKAPLSASMIKRYDEHHQDLTLLKALVRQQLPEKYKEIFFDQSKNGYAGYIDGGASQEEFYKFIKPILEKMDGTEELLVKLNREDLLRKQRTFDNGSIPHQIHLGELHAILRRQEDFYPFLKDNREKIEKILTFRIPYYVGPLARGNSRFAWMTRKSEETITPWNFEEVVDKGASAQSFIERMTNFDKNLPNEKVLPKHSLLYEYFTVYNELTKVKYVTEGMRKPAFLSGEQKKAIVDLLFKTNRKVTVKQLKEDYFKKIECFDSVEISGVEDRFNASLGTYHDLLKIIKDKDFLDNEENEDILEDIVLTLTLFEDREMIEERLKTYAHLFDDKVMKQLKRRRYTGWGRLSRKLINGIRDKQSGKTILDFLKSDGFANRNFMQLIHDDSLTFKEDIQKAQVSGQGDSLHEHIANLAGSPAIKKGILQTVKVVDELVKVMGRHKPENIVIEMARENQTTQKGQKNSRERMKRIEEGIKELGSQILKEHPVENTQLQNEKLYLYYLQNGRDMYVDQELDINRLSDYDVDHIVPQSFLKDDSIDNKVLTRSDKARGKSDNVPSEEVVKKMKNYWRQLLNAKLITQRKFDNLTKAERGGLSELDKAGFIKRQLVETRQITKHVAQILDSRMNTKYDENDKLIREVKVITLKSKLVSDFRKDFQFYKVREINNYHHAHDAYLNAVVGTALIKKYPKLESEFVYGDYKVYDVRKMIAKSEQEIGKATAKYFFYSNIMNFFKTEITLANGEIRKRPLIETNGETGEIVWDKGRDFATVRKVLSMPQVNIVKKTEVQTGGFSKESILPKRNSDKLIARKKDWDPKKYGGFDSPTVAYSVLVVAKVEKGKSKKLKSVKELLGITIMERSSFEKNPIDFLEAKGYKEVKKDLIIKLPKYSLFELENGRKRMLASAGELQKGNELALPSKYVNFLYLASHYEKLKGSPEDNEQKQLFVEQHKHYLDEIIEQISEFSKRVILADANLDKVLSAYNKHRDKPIREQAENIIHLFTLTNLGAPAAFKYFDTTIDRKRYTSTKEVLDATLIHQSITGLYETRIDLSQLGGDGGGGSPAPGGGGGTLGDQGSRGSDPLPEPRVTLTVEGIPTEFLVNTGAEHSVLTKPMGKMGSKRTVVAGATGSKVYPWTTKRLLKIGQKQVTHSFLVIPECPAPLLGRDLLTKLKAQIQFSTEGPQVTWEDRPAMCLVLNLEEEYRLHEKPVPPSIDPSWLQLFPMVWAEKAGMGLANQVPPVVVELKSDASPVAVRQYPMSKEAREGIRPHIQRFLDLGILVPCQSPWNTPLLPVKKPGTNDYRPVQDLREVNKRVQDIHPTVPNPYNLLSSLPPSHTWYSVLDLKDAFFCLKLHPNSQPLFAFEWRDPEKGNTGQLTWTRLPQGFKNSPTLFNEALHRDLASFRALNPQVVMLQYVDDLLVAAPTYRDCKEGTRRLLQELSKLGYRVSAKKAQLCREEVTYLGYLLKGGKRWLTPARKATVMKIPTPTTPRQVREFLGTAGFCRLWIPGFASLAAPLYPLTRPKVPFTWTEAHQEAFGRIKEALLSAPALALPDLTKPFALYVDEKEGVARGVLTQTLGPWRRPVAYLSKKLDPVASGWPTCLKAIAAVALLLKDADKLTLGQNVLVIAPHNLESIVRQPPDRWMTNARMTHYQSLLLNERVSFAPPAILNPATLLPVESDDTPIHICSEILAEETGTRPDLRDQPLPGVPAWYTDGSSFIMDGRRQAGAAIVDNKRTVWASNLPEGTSAQKAELIALTQALRLAEGKSINIYTDSRYAFATAHVHGAIYKQRGWLTSAGKDIKNKEEILALLEAIHLPKRVAIIHCPGHQRGTDPVATGNRKADEAAKQAAQSTRILTETTKNAGKRTADGSEFEKRTADGSEFESPKKKAKVE

SEQ ID NO: 6990 - protein, 2088 aa, synthetic construct
MPAAKRVKLDGGDKKYSIGLDIGTNSVGWAVITDEYKVPSKKFKVLGNTDRHSIKKNLIGALLFDSGETAEATRLKRTARRRYTRRKNRICYLQEIFSNEMAKVDDSFFHRLEESFLVEEDKKHERHPIFGNIVDEVAYHEKYPTIYHLRKKLVDSTDKADLRLIYLALAHMIKFRGHFLIEGDLNPDNSDVDKLFIQLVQTYNQLFEENPINASGVDAKAILSARLSKSRRLENLIAQLPGEKKNGLFGNLIALSLGLTPNFKSNFDLAEDAKLQLSKDTYDDDLDNLLAQIGDQYADLFLAAKNLSDAILLSDILRVNTEITKAPLSASMIKRYDEHHQDLTLLKALVRQQLPEKYKEIFFDQSKNGYAGYIDGGASQEEFYKFIKPILEKMDGTEELLVKLNREDLLRKQRTFDNGSIPHQIHLGELHAILRRQEDFYPFLKDNREKIEKILTFRIPYYVGPLARGNSRFAWMTRKSEETITPWNFEEVVDKGASAQSFIERMTNFDKNLPNEKVLPKHSLLYEYFTVYNELTKVKYVTEGMRKPAFLSGEQKKAIVDLLFKTNRKVTVKQLKEDYFKKIECFDSVEISGVEDRFNASLGTYHDLLKIIKDKDFLDNEENEDILEDIVLTLTLFEDREMIEERLKTYAHLFDDKVMKQLKRRRYTGWGRLSRKLINGIRDKQSGKTILDFLKSDGFANRNFMQLIHDDSLTFKEDIQKAQVSGQGDSLHEHIANLAGSPAIKKGILQTVKVVDELVKVMGRHKPENIVIEMARENQTTQKGQKNSRERMKRIEEGIKELGSQILKEHPVENTQLQNEKLYLYYLQNGRDMYVDQELDINRLSDYDVDHIVPQSFLKDDSIDNKVLTRSDKARGKSDNVPSEEVVKKMKNYWRQLLNAKLITQRKFDNLTKAERGGLSELDKAGFIKRQLVETRQITKHVAQILDSRMNTKYDENDKLIREVKVITLKSKLVSDFRKDFQFYKVREINNYHHAHDAYLNAVVGTALIKKYPKLESEFVYGDYKVYDVRKMIAKSEQEIGKATAKYFFYSNIMNFFKTEITLANGEIRKRPLIETNGETGEIVWDKGRDFATVRKVLSMPQVNIVKKTEVQTGGFSKESILPKRNSDKLIARKKDWDPKKYGGFDSPTVAYSVLVVAKVEKGKSKKLKSVKELLGITIMERSSFEKNPIDFLEAKGYKEVKKDLIIKLPKYSLFELENGRKRMLASAGELQKGNELALPSKYVNFLYLASHYEKLKGSPEDNEQKQLFVEQHKHYLDEIIEQISEFSKRVILADANLDKVLSAYNKHRDKPIREQAENIIHLFTLTNLGAPAAFKYFDTTIDRKRYTSTKEVLDATLIHQSITGLYETRIDLSQLGGDGGGGSPAPGGGGGTLQLDDEYRLYSPLVKPDQNIQFWLEQFPQAWAETAGMGLAKQVPPQVIQLKASATPVSVRQYPLSKEAQEGIRPHVQRLIQQGILVPVQSPWNTPLLPVRKPGTNDYRPVQDLREVNKRVQDIHPTVPNPYNLLCALPPQRSWYTVLDLKDAFFCLRLHPTSQPLFAFEWRDPGTGRTGQLTWTRLPQGFKNSPTIFDEALHRDLANFRIQHPQVTLLQYVDDLLLAGATKQDCLEGTKALLLELSDLGYRASAKKAQICRREVTYLGYSLRDGQRWLTEARKKTVVQIPAPTTAKQVREFLGTAGFCRLWIPGFATLAAPLYPLTKEKGEFSWAPEHQKAFDAIKKALLSAPALALPDVTKPFTLYVDERKGVARGVLTQTLGPWRRPVAYLSKKLDPVASGWPVCLKAIAAVAILVKDADKLTLGQNITVIAPHALENIVRQPPDRWMTNARMTHYQSLLLTERVTFAPPAALNPATLLPEETDEPVTHDCHQLLIEETGVRKDLTDIPLTGEVLTWFTDGSSYVVEGKRMAGAAVVDGTRTIWASSLPEGTSAQKAELMALTQALRLAEGKSINIYTDSRYAFATAHVHGAIYKQRGLLTSAGREIKNKEEILSLLEALHLPKRLAIIHCPGHQKAKDPISRGNQMADRVAKQAAQGVNLLAGKRTADGSEFEKRTADGSEFESPKKKAKVE

SEQ ID NO: 6991 - protein, 2174 aa, synthetic construct
MPAAKRVKLDGGDKKYSIGLDIGTNSVGWAVITDEYKVPSKKFKVLGNTDRHSIKKNLIGALLFDSGETAEATRLKRTARRRYTRRKNRICYLQEIFSNEMAKVDDSFFHRLEESFLVEEDKKHERHPIFGNIVDEVAYHEKYPTIYHLRKKLVDSTDKADLRLIYLALAHMIKFRGHFLIEGDLNPDNSDVDKLFIQLVQTYNQLFEENPINASGVDAKAILSARLSKSRRLENLIAQLPGEKKNGLFGNLIALSLGLTPNFKSNFDLAEDAKLQLSKDTYDDDLDNLLAQIGDQYADLFLAAKNLSDAILLSDILRVNTEITKAPLSASMIKRYDEHHQDLTLLKALVRQQLPEKYKEIFFDQSKNGYAGYIDGGASQEEFYKFIKPILEKMDGTEELLVKLNREDLLRKQRTFDNGSIPHQIHLGELHAILRRQEDFYPFLKDNREKIEKILTFRIPYYVGPLARGNSRFAWMTRKSEETITPWNFEEVVDKGASAQSFIERMTNFDKNLPNEKVLPKHSLLYEYFTVYNELTKVKYVTEGMRKPAFLSGEQKKAIVDLLFKTNRKVTVKQLKEDYFKKIECFDSVEISGVEDRFNASLGTYHDLLKIIKDKDFLDNEENEDILEDIVLTLTLFEDREMIEERLKTYAHLFDDKVMKQLKRRRYTGWGRLSRKLINGIRDKQSGKTILDFLKSDGFANRNFMQLIHDDSLTFKEDIQKAQVSGQGDSLHEHIANLAGSPAIKKGILQTVKVVDELVKVMGRHKPENIVIEMARENQTTQKGQKNSRERMKRIEEGIKELGSQILKEHPVENTQLQNEKLYLYYLQNGRDMYVDQELDINRLSDYDVDHIVPQSFLKDDSIDNKVLTRSDKARGKSDNVPSEEVVKKMKNYWRQLLNAKLITQRKFDNLTKAERGGLSELDKAGFIKRQLVETRQITKHVAQILDSRMNTKYDENDKLIREVKVITLKSKLVSDFRKDFQFYKVREINNYHHAHDAYLNAVVGTALIKKYPKLESEFVYGDYKVYDVRKMIAKSEQEIGKATAKYFFYSNIMNFFKTEITLANGEIRKRPLIETNGETGEIVWDKGRDFATVRKVLSMPQVNIVKKTEVQTGGFSKESILPKRNSDKLIARKKDWDPKKYGGFDSPTVAYSVLVVAKVEKGKSKKLKSVKELLGITIMERSSFEKNPIDFLEAKGYKEVKKDLIIKLPKYSLFELENGRKRMLASAGELQKGNELALPSKYVNFLYLASHYEKLKGSPEDNEQKQLFVEQHKHYLDEIIEQISEFSKRVILADANLDKVLSAYNKHRDKPIREQAENIIHLFTLTNLGAPAAFKYFDTTIDRKRYTSTKEVLDATLIHQSITGLYETRIDLSQLGGDGGGGSPAPGGGGGMDPLQLLQPLEAEIKGTKLKAHWNSGATITCVPEAFLEDERPIQTMLIKTIHGEKQQDVYYLTFKVQGRKVEAEVLASPYDYILLNPSDVPWLMKKPLQLTVLVPLHEYQERLLQQTALPKEQKELLQKLFLKYDALWQHWENQVGHRRIKPHNIATGTLAPRPQKQYPINPKAKPSIQIVIDDLLKQGVLIQQNSTMNTPVYPVPKPDGKWRMVLDYREVNKTIPLIAAQNQHSAGILSSIYRGKYKTTLDLTNGFWAHPITPESYWLTAFTWQGKQYCWTRLPQGFLNSPALFNADVVDLLKEIPNVQAYVDDIYISHDDPQEHLEQLEKIFSILLNAGYVVSLKKSEIAQREVEFLGFNITKEGRGLTDTFKQKLLNITPPKDLKQLQSILGLLNFARNFIPNYSELVKPLYTIVAPANGKFISWTEDNSNQLQHIISVLNQADNLEERNPETRLIIKVNSSPSAGYIRYYNEGSKRPIMYVNYIFSKAEAKFTQTEKLLTTMHKGLIKAMDLAMGQEILVYSPIVSMTKIQRTPLPERKALPVRWITWMTYLEDPRIQFHYDKSLPELQQIPNVTEDVIAKTKHPSEFAMVFYTDGSAIKHPDVNKSHSAGMGIAQVQFIPEYKIVHQWSIPLGDHTAQLAEIAAVEFACKKALKISGPVLIVTDSFYVAESANKELPYWKSNGFLNNKKKPLRHVSKWKSIAECLQLKPDIIIMHEKGHQQPMTTLHTEGNNLADKLATQGSYVVHAGKRTADGSEFEKRTADGSEFESPKKKAKVE

SEQ ID NO: 6992 - protein, 2092 aa, synthetic construct
MPAAKRVKLDGGDKKYSIGLDIGTNSVGWAVITDEYKVPSKKFKVLGNTDRHSIKKNLIGALLFDSGETAEATRLKRTARRRYTRRKNRICYLQEIFSNEMAKVDDSFFHRLEESFLVEEDKKHERHPIFGNIVDEVAYHEKYPTIYHLRKKLVDSTDKADLRLIYLALAHMIKFRGHFLIEGDLNPDNSDVDKLFIQLVQTYNQLFEENPINASGVDAKAILSARLSKSRRLENLIAQLPGEKKNGLFGNLIALSLGLTPNFKSNFDLAEDAKLQLSKDTYDDDLDNLLAQIGDQYADLFLAAKNLSDAILLSDILRVNTEITKAPLSASMIKRYDEHHQDLTLLKALVRQQLPEKYKEIFFDQSKNGYAGYIDGGASQEEFYKFIKPILEKMDGTEELLVKLNREDLLRKQRTFDNGSIPHQIHLGELHAILRRQEDFYPFLKDNREKIEKILTFRIPYYVGPLARGNSRFAWMTRKSEETITPWNFEEVVDKGASAQSFIERMTNFDKNLPNEKVLPKHSLLYEYFTVYNELTKVKYVTEGMRKPAFLSGEQKKAIVDLLFKTNRKVTVKQLKEDYFKKIECFDSVEISGVEDRFNASLGTYHDLLKIIKDKDFLDNEENEDILEDIVLTLTLFEDREMIEERLKTYAHLFDDKVMKQLKRRRYTGWGRLSRKLINGIRDKQSGKTILDFLKSDGFANRNFMQLIHDDSLTFKEDIQKAQVSGQGDSLHEHIANLAGSPAIKKGILQTVKVVDELVKVMGRHKPENIVIEMARENQTTQKGQKNSRERMKRIEEGIKELGSQILKEHPVENTQLQNEKLYLYYLQNGRDMYVDQELDINRLSDYDVDHIVPQSFLKDDSIDNKVLTRSDKARGKSDNVPSEEVVKKMKNYWRQLLNAKLITQRKFDNLTKAERGGLSELDKAGFIKRQLVETRQITKHVAQILDSRMNTKYDENDKLIREVKVITLKSKLVSDFRKDFQFYKVREINNYHHAHDAYLNAVVGTALIKKYPKLESEFVYGDYKVYDVRKMIAKSEQEIGKATAKYFFYSNIMNFFKTEITLANGEIRKRPLIETNGETGEIVWDKGRDFATVRKVLSMPQVNIVKKTEVQTGGFSKESILPKRNSDKLIARKKDWDPKKYGGFDSPTVAYSVLVVAKVEKGKSKKLKSVKELLGITIMERSSFEKNPIDFLEAKGYKEVKKDLIIKLPKYSLFELENGRKRMLASAGELQKGNELALPSKYVNFLYLASHYEKLKGSPEDNEQKQLFVEQHKHYLDEIIEQISEFSKRVILADANLDKVLSAYNKHRDKPIREQAENIIHLFTLTNLGAPAAFKYFDTTIDRKRYTSTKEVLDATLIHQSITGLYETRIDLSQLGGDGGGGSPAPGGGGGVLNLEEEYRLHEKPVPSSIDPSWLQLFPTVWAERAGMGLANQVPPVVVELRSGASPVAVRQYPMSKEAREGIRPHIQRFLDLGVLVPCQSPWNTPLLPVKKPGTNDYRPVQDLREINKRVQDIHPTVPNPYNLLSSLPPSHTWYSVLDLKDAFFCLKLHPNSQPLFAFEWRDPEKGNTGQLTWTRLPQGFKNSPTLFDEALHRDLAPFRALNPQVVLLQYVDDLLVAAPTYRDCKEGTQKLLQELSKLGYRVSAKKAQLCQKEVTYLGYLLKEGKRWLTPARKATVMKIPPPTTPRQVREFLGTAGFCRLWIPGFASLAAPLYPLTKESIPFIWTEEHQKAFDRIKEALLSAPALALPDLTKPFTLYVDERAGVARGVLTQTLGPWRRPVAYLSKKLDPVASGWPTCLKAVAAVALLLKDADKLTLGQNVTVIASHSLESIVRQPPDRWMTNARMTHYQSLLLNERVSFAPPAVLNPATLLPVESEATPVHRCSEILAEETGTRRDLKDQPLPGVPAWYTDGSSFIAEGKRRAGAAIVDGKRTVWASSLPEGTSAQKAELVALTQALRLAEGKDINIYTDSRYAFATAHIHGAIYKQRGLLTSAGKDIKNKEEILALLEAIHLPKRVAIIHCPGHQKGNDPVATGNRRADEAAKQAALSTRVLAETTKPAGKRTADGSEFEKRTADGSEFESPKKKAKVE

SEQ ID NO: 6993 - protein, 2100 aa, synthetic construct
MPAAKRVKLDGGDKKYSIGLDIGTNSVGWAVITDEYKVPSKKFKVLGNTDRHSIKKNLIGALLFDSGETAEATRLKRTARRRYTRRKNRICYLQEIFSNEMAKVDDSFFHRLEESFLVEEDKKHERHPIFGNIVDEVAYHEKYPTIYHLRKKLVDSTDKADLRLIYLALAHMIKFRGHFLIEGDLNPDNSDVDKLFIQLVQTYNQLFEENPINASGVDAKAILSARLSKSRRLENLIAQLPGEKKNGLFGNLIALSLGLTPNFKSNFDLAEDAKLQLSKDTYDDDLDNLLAQIGDQYADLFLAAKNLSDAILLSDILRVNTEITKAPLSASMIKRYDEHHQDLTLLKALVRQQLPEKYKEIFFDQSKNGYAGYIDGGASQEEFYKFIKPILEKMDGTEELLVKLNREDLLRKQRTFDNGSIPHQIHLGELHAILRRQEDFYPFLKDNREKIEKILTFRIPYYVGPLARGNSRFAWMTRKSEETITPWNFEEVVDKGASAQSFIERMTNFDKNLPNEKVLPKHSLLYEYFTVYNELTKVKYVTEGMRKPAFLSGEQKKAIVDLLFKTNRKVTVKQLKEDYFKKIECFDSVEISGVEDRFNASLGTYHDLLKIIKDKDFLDNEENEDILEDIVLTLTLFEDREMIEERLKTYAHLFDDKVMKQLKRRRYTGWGRLSRKLINGIRDKQSGKTILDFLKSDGFANRNFMQLIHDDSLTFKEDIQKAQVSGQGDSLHEHIANLAGSPAIKKGILQTVKVVDELVKVMGRHKPENIVIEMARENQTTQKGQKNSRERMKRIEEGIKELGSQILKEHPVENTQLQNEKLYLYYLQNGRDMYVDQELDINRLSDYDVDHIVPQSFLKDDSIDNKVLTRSDKARGKSDNVPSEEVVKKMKNYWRQLLNAKLITQRKFDNLTKAERGGLSELDKAGFIKRQLVETRQITKHVAQILDSRMNTKYDENDKLIREVKVITLKSKLVSDFRKDFQFYKVREINNYHHAHDAYLNAVVGTALIKKYPKLESEFVYGDYKVYDVRKMIAKSEQEIGKATAKYFFYSNIMNFFKTEITLANGEIRKRPLIETNGETGEIVWDKGRDFATVRKVLSMPQVNIVKKTEVQTGGFSKESILPKRNSDKLIARKKDWDPKKYGGFDSPTVAYSVLVVAKVEKGKSKKLKSVKELLGITIMERSSFEKNPIDFLEAKGYKEVKKDLIIKLPKYSLFELENGRKRMLASAGELQKGNELALPSKYVNFLYLASHYEKLKGSPEDNEQKQLFVEQHKHYLDEIIEQISEFSKRVILADANLDKVLSAYNKHRDKPIREQAENIIHLFTLTNLGAPAAFKYFDTTIDRKRYTSTKEVLDATLIHQSITGLYETRIDLSQLGGDGGGGGGGSPAPGGTVSLQDEHRLFDIPVTTSLPDVWLQDFPQAWAETGGLGRAKCQAPIIIDLKPTAVPVSIKQYPMSLEAHMGIRQHIIKFLELGVLRPCRSPWNTPLLPVKKPGTQDYRPVQDLREINKRTVDIHPTVPNPYNLLSTLKPDYSWYTVLDLKDAFFCLPLAPQSQELFAFEWKDPERGISGQLTWTRLPQGFKNSPTLFNEALHRDLTDFRTQHPEVTLLQYVDDLLLAAPTKKACTQGTRHLLQELGEKGYRASAKKAQICQTKVTYLGYILSEGKRWLTPGRIETVARIPPPRNPREVREFLGTAGFCRLWIPGFAELAAPLYALTKPSTPFTWQTEHQLAFEALKKALLSAPALGLPDTSKPFTLFLDERQGIAKGVLTQKLGPWKRPVAYLSKKLDPVAAGWPPCLRIMAATAMLVKDSAKLTLGQPLTVITPHTLEAIVRQPPDRWITNARLTHYQALLLDTDRVQFGPPVTLNPATLLPVPENQPSPHDCRQVLAETHGTREDLKDQELPDADHTWYTDGSSYLDSGTRRAGAAVVDGHNTIWAQSLPPGTSAQKAELIALTKALELSKGKKANIYTDSRYAFATAHTHGSIYERRGWLTSEGKEIKNKAEIIALLKALFLPQEVAIIHCPGHQKGQDPVAVGNRQADRVARQAAMAEVLTLATEPDNTSHITAGKRTADGSEFEKRTADGSEFESPKKKAKVE

SEQ ID NO: 6994 - protein, 2171 aa, synthetic construct
MPAAKRVKLDGGDKKYSIGLDIGTNSVGWAVITDEYKVPSKKFKVLGNTDRHSIKKNLIGALLFDSGETAEATRLKRTARRRYTRRKNRICYLQEIFSNEMAKVDDSFFHRLEESFLVEEDKKHERHPIFGNIVDEVAYHEKYPTIYHLRKKLVDSTDKADLRLIYLALAHMIKFRGHFLIEGDLNPDNSDVDKLFIQLVQTYNQLFEENPINASGVDAKAILSARLSKSRRLENLIAQLPGEKKNGLFGNLIALSLGLTPNFKSNFDLAEDAKLQLSKDTYDDDLDNLLAQIGDQYADLFLAAKNLSDAILLSDILRVNTEITKAPLSASMIKRYDEHHQDLTLLKALVRQQLPEKYKEIFFDQSKNGYAGYIDGGASQEEFYKFIKPILEKMDGTEELLVKLNREDLLRKQRTFDNGSIPHQIHLGELHAILRRQEDFYPFLKDNREKIEKILTFRIPYYVGPLARGNSRFAWMTRKSEETITPWNFEEVVDKGASAQSFIERMTNFDKNLPNEKVLPKHSLLYEYFTVYNELTKVKYVTEGMRKPAFLSGEQKKAIVDLLFKTNRKVTVKQLKEDYFKKIECFDSVEISGVEDRFNASLGTYHDLLKIIKDKDFLDNEENEDILEDIVLTLTLFEDREMIEERLKTYAHLFDDKVMKQLKRRRYTGWGRLSRKLINGIRDKQSGKTILDFLKSDGFANRNFMQLIHDDSLTFKEDIQKAQVSGQGDSLHEHIANLAGSPAIKKGILQTVKVVDELVKVMGRHKPENIVIEMARENQTTQKGQKNSRERMKRIEEGIKELGSQILKEHPVENTQLQNEKLYLYYLQNGRDMYVDQELDINRLSDYDVDHIVPQSFLKDDSIDNKVLTRSDKARGKSDNVPSEEVVKKMKNYWRQLLNAKLITQRKFDNLTKAERGGLSELDKAGFIKRQLVETRQITKHVAQILDSRMNTKYDENDKLIREVKVITLKSKLVSDFRKDFQFYKVREINNYHHAHDAYLNAVVGTALIKKYPKLESEFVYGDYKVYDVRKMIAKSEQEIGKATAKYFFYSNIMNFFKTEITLANGEIRKRPLIETNGETGEIVWDKGRDFATVRKVLSMPQVNIVKKTEVQTGGFSKESILPKRNSDKLIARKKDWDPKKYGGFDSPTVAYSVLVVAKVEKGKSKKLKSVKELLGITIMERSSFEKNPIDFLEAKGYKEVKKDLIIKLPKYSLFELENGRKRMLASAGELQKGNELALPSKYVNFLYLASHYEKLKGSPEDNEQKQLFVEQHKHYLDEIIEQISEFSKRVILADANLDKVLSAYNKHRDKPIREQAENIIHLFTLTNLGAPAAFKYFDTTIDRKRYTSTKEVLDATLIHQSITGLYETRIDLSQLGGDGGGGGGGSPAPGGMDLLKPLTVERKGVKIKGYWNSQADITCVPKDLLQGEEPVRQQNVTTIHGTQEGDVYYVNLKIDGRRINTEVIGTTLDYAIITPGDVPWILKKPLELTIKLDLEEQQGTLLNNSILSKKGKEELKQLFEKYSALWQSWENQVGHRRIRPHKIATGTVKPTPQKQYHINPKAKPDIQIVINDLLKQGVLIQKESTMNTPVYPVPKPNGRWRMVLDYRAVNKVTPLIAVQNQHSYGILGSLFKGRYKTTIDLSNGFWAHPIVPEDYWITAFTWQGKQYCWTVLPQGFLNSPGLFTGDVVDLLQGIPNVEVYVDDVYISHDSEKEHLEYLDILFNRLKEAGYIISLKKSNIANSIVDFLGFQITNEGRGLTDTFKEKLENITAPTTLKQLQSILGLLNFARNFIPDFTELIAPLYALIPKSTKNYVPWQIEHSTTLETLITKLNGAEYLQGRKGDKTLIMKVNASYTTGYIRYYNEGEKKPISYVSIVFSKTELKFTELEKLLTTVHKGLLKALDLSMGQNIHVYSPIVSMQNIQKTPQTAKKALASRWLSWLSYLEDPRIRFFYDPQMPALKDLPAVDTGKDNKKHPSNFQHIFYTDGSAITSPTKEGHLNAGMGIVYFINKDGNLQKQQEWSISLGNHTAQFAEIAAFEFALKKCLPLGGNILVVTDSNYVAKAYNEELDVWASNGFVNNRKKPLKHISKWKSVADLKRLRPDVVVTHEPGHQKLDSSPHAYGNNLADQLATQASFKVHAGKRTADGSEFEKRTADGSEFESPKKKAKVE

SEQ ID NO: 6995 - protein, 2093 aa, synthetic construct
MPAAKRVKLDGGDKKYSIGLDIGTNSVGWAVITDEYKVPSKKFKVLGNTDRHSIKKNLIGALLFDSGETAEATRLKRTARRRYTRRKNRICYLQEIFSNEMAKVDDSFFHRLEESFLVEEDKKHERHPIFGNIVDEVAYHEKYPTIYHLRKKLVDSTDKADLRLIYLALAHMIKFRGHFLIEGDLNPDNSDVDKLFIQLVQTYNQLFEENPINASGVDAKAILSARLSKSRRLENLIAQLPGEKKNGLFGNLIALSLGLTPNFKSNFDLAEDAKLQLSKDTYDDDLDNLLAQIGDQYADLFLAAKNLSDAILLSDILRVNTEITKAPLSASMIKRYDEHHQDLTLLKALVRQQLPEKYKEIFFDQSKNGYAGYIDGGASQEEFYKFIKPILEKMDGTEELLVKLNREDLLRKQRTFDNGSIPHQIHLGELHAILRRQEDFYPFLKDNREKIEKILTFRIPYYVGPLARGNSRFAWMTRKSEETITPWNFEEVVDKGASAQSFIERMTNFDKNLPNEKVLPKHSLLYEYFTVYNELTKVKYVTEGMRKPAFLSGEQKKAIVDLLFKTNRKVTVKQLKEDYFKKIECFDSVEISGVEDRFNASLGTYHDLLKIIKDKDFLDNEENEDILEDIVLTLTLFEDREMIEERLKTYAHLFDDKVMKQLKRRRYTGWGRLSRKLINGIRDKQSGKTILDFLKSDGFANRNFMQLIHDDSLTFKEDIQKAQVSGQGDSLHEHIANLAGSPAIKKGILQTVKVVDELVKVMGRHKPENIVIEMARENQTTQKGQKNSRERMKRIEEGIKELGSQILKEHPVENTQLQNEKLYLYYLQNGRDMYVDQELDINRLSDYDVDHIVPQSFLKDDSIDNKVLTRSDKARGKSDNVPSEEVVKKMKNYWRQLLNAKLITQRKFDNLTKAERGGLSELDKAGFIKRQLVETRQITKHVAQILDSRMNTKYDENDKLIREVKVITLKSKLVSDFRKDFQFYKVREINNYHHAHDAYLNAVVGTALIKKYPKLESEFVYGDYKVYDVRKMIAKSEQEIGKATAKYFFYSNIMNFFKTEITLANGEIRKRPLIETNGETGEIVWDKGRDFATVRKVLSMPQVNIVKKTEVQTGGFSKESILPKRNSDKLIARKKDWDPKKYGGFDSPTVAYSVLVVAKVEKGKSKKLKSVKELLGITIMERSSFEKNPIDFLEAKGYKEVKKDLIIKLPKYSLFELENGRKRMLASAGELQKGNELALPSKYVNFLYLASHYEKLKGSPEDNEQKQLFVEQHKHYLDEIIEQISEFSKRVILADANLDKVLSAYNKHRDKPIREQAENIIHLFTLTNLGAPAAFKYFDTTIDRKRYTSTKEVLDATLIHQSITGLYETRIDLSQLGGDGGGGGGGSPAPGGTLQLEEEYRLFEPESTQKQEMDIWLKNFPQAWAETGGMGTAHCQAPVLIQLKATATPISIRQYPMPHEAYQGIKPHIRRMLDQGILKPCQSPWNTPLLPVKKPGTEDYRPVQDLREVNKRVEDIHPTVPNPYNLLSTLPPSHPWYTVLDLKDAFFCLRLHSESQLLFAFEWRDPEIGLSGQLTWTRLPQGFKNSPTLFDEALHSDLADFRVRYPALVLLQYVDDLLLAAATRTECLEGTKALLETLGNKGYRASAKKAQICLQEVTYLGYSLKDGQRWLTKARKEAILSIPVPKNSRQVREFLGTAGYCRLWIPGFAELAAPLYPLTRPGTLFQWGTEQQLAFEDIKKALLSSPALGLPDITKPFELFIDENSGFAKGVLVQKLGPWKRPVAYLSKKLDTVASGWPPCLRMVAAIAILVKDAGKLTLGQPLTILTSHPVEALVRQPPNKWLSNARMTHYQAMLLDAERVHFGPTVSLNPATLLPLPSGGNHHDCLQILAETHGTRPDLTDQPLPDADLTWYTDGSSFIRNGEREAGAAVTTESEVIWAAPLPPGTSAQRAELIALTQALKMAEGKKLTVYTDSRYAFATTHVHGEIYRRRGLLTSEGKEIKNKNEILALLEALFLPKRLSIIHCPGHQKGDSPQAKGNRLADDTAKKAATETHSSLTVLPAGKRTADGSEFEKRTADGSEFESPKKKAKVE

SEQ ID NO: 6996 - protein, 2085 aa, synthetic construct
MPAAKRVKLDGGDKKYSIGLDIGTNSVGWAVITDEYKVPSKKFKVLGNTDRHSIKKNLIGALLFDSGETAEATRLKRTARRRYTRRKNRICYLQEIFSNEMAKVDDSFFHRLEESFLVEEDKKHERHPIFGNIVDEVAYHEKYPTIYHLRKKLVDSTDKADLRLIYLALAHMIKFRGHFLIEGDLNPDNSDVDKLFIQLVQTYNQLFEENPINASGVDAKAILSARLSKSRRLENLIAQLPGEKKNGLFGNLIALSLGLTPNFKSNFDLAEDAKLQLSKDTYDDDLDNLLAQIGDQYADLFLAAKNLSDAILLSDILRVNTEITKAPLSASMIKRYDEHHQDLTLLKALVRQQLPEKYKEIFFDQSKNGYAGYIDGGASQEEFYKFIKPILEKMDGTEELLVKLNREDLLRKQRTFDNGSIPHQIHLGELHAILRRQEDFYPFLKDNREKIEKILTFRIPYYVGPLARGNSRFAWMTRKSEETITPWNFEEVVDKGASAQSFIERMTNFDKNLPNEKVLPKHSLLYEYFTVYNELTKVKYVTEGMRKPAFLSGEQKKAIVDLLFKTNRKVTVKQLKEDYFKKIECFDSVEISGVEDRFNASLGTYHDLLKIIKDKDFLDNEENEDILEDIVLTLTLFEDREMIEERLKTYAHLFDDKVMKQLKRRRYTGWGRLSRKLINGIRDKQSGKTILDFLKSDGFANRNFMQLIHDDSLTFKEDIQKAQVSGQGDSLHEHIANLAGSPAIKKGILQTVKVVDELVKVMGRHKPENIVIEMARENQTTQKGQKNSRERMKRIEEGIKELGSQILKEHPVENTQLQNEKLYLYYLQNGRDMYVDQELDINRLSDYDVDHIVPQSFLKDDSIDNKVLTRSDKARGKSDNVPSEEVVKKMKNYWRQLLNAKLITQRKFDNLTKAERGGLSELDKAGFIKRQLVETRQITKHVAQILDSRMNTKYDENDKLIREVKVITLKSKLVSDFRKDFQFYKVREINNYHHAHDAYLNAVVGTALIKKYPKLESEFVYGDYKVYDVRKMIAKSEQEIGKATAKYFFYSNIMNFFKTEITLANGEIRKRPLIETNGETGEIVWDKGRDFATVRKVLSMPQVNIVKKTEVQTGGFSKESILPKRNSDKLIARKKDWDPKKYGGFDSPTVAYSVLVVAKVEKGKSKKLKSVKELLGITIMERSSFEKNPIDFLEAKGYKEVKKDLIIKLPKYSLFELENGRKRMLASAGELQKGNELALPSKYVNFLYLASHYEKLKGSPEDNEQKQLFVEQHKHYLDEIIEQISEFSKRVILADANLDKVLSAYNKHRDKPIREQAENIIHLFTLTNLGAPAAFKYFDTTIDRKRYTSTKEVLDATLIHQSITGLYETRIDLSQLGGDGGGGGGGSPAPGGVPWLTQQPLQLTILVPLQEYQEKILSKTALPEDQKQQLKTLFVKYDNLWQHWENQVGHRKIRPHNIATGDYPPRPQKQYPINPKAKPSIQIVIDDLLKQGVLTPQNSTMNTPVYPVPKPDGRWRMVLDYREVNKTIPLTAAQNQHSAGILATIVRQKYKTTLDLANGFWAHPITPESYWLTAFTWQGKQYCWTRLPQGFLNSPALFNADVVDLLKEIPNVQVYVDDIYLSHDDPKEHVQQLEKVFQILLQAGYVVSLKKSEIGQKTVEFLGFNITKEGRGLTDTFKTKLLNITPPKDLKQLQSILGLLNFARNFIPNFAELVQPLYNLIAPAKGKYIEWSEENTKQLNMVIEALNTASNLEERLPEQRLVIKVNTSPSAGYVRYYNETGKKPIMYLNYVFSKAELKFSMLEKLLTTMHKALIKAMDLAMGQEILVYSPIVSMTKIQKTPLPERKALPIRWITWMTYLEDPRIQFHYDKTLPELKHIPDVYTSSQSPVKHPSQYEGVFYTDGSAIKSPDPTKSNNAGMGIVHATYKPEYQVLNQWSIPLGNHTAQMAEIAAVEFACKKALKIPGPVLVITDSFYVAESANKELPYWKSNGFVNNKKKPLKHISKWKSIAECLSMKPDITIQHEKGISLQIPVFILKGNALADKLATQGSYVVNAGKRTADGSEFEKRTADGSEFESPKKKAKVE

SEQ ID NO: 6997 - protein, 2085 aa, synthetic construct
MPAAKRVKLDGGDKKYSIGLDIGTNSVGWAVITDEYKVPSKKFKVLGNTDRHSIKKNLIGALLFDSGETAEATRLKRTARRRYTRRKNRICYLQEIFSNEMAKVDDSFFHRLEESFLVEEDKKHERHPIFGNIVDEVAYHEKYPTIYHLRKKLVDSTDKADLRLIYLALAHMIKFRGHFLIEGDLNPDNSDVDKLFIQLVQTYNQLFEENPINASGVDAKAILSARLSKSRRLENLIAQLPGEKKNGLFGNLIALSLGLTPNFKSNFDLAEDAKLQLSKDTYDDDLDNLLAQIGDQYADLFLAAKNLSDAILLSDILRVNTEITKAPLSASMIKRYDEHHQDLTLLKALVRQQLPEKYKEIFFDQSKNGYAGYIDGGASQEEFYKFIKPILEKMDGTEELLVKLNREDLLRKQRTFDNGSIPHQIHLGELHAILRRQEDFYPFLKDNREKIEKILTFRIPYYVGPLARGNSRFAWMTRKSEETITPWNFEEVVDKGASAQSFIERMTNFDKNLPNEKVLPKHSLLYEYFTVYNELTKVKYVTEGMRKPAFLSGEQKKAIVDLLFKTNRKVTVKQLKEDYFKKIECFDSVEISGVEDRFNASLGTYHDLLKIIKDKDFLDNEENEDILEDIVLTLTLFEDREMIEERLKTYAHLFDDKVMKQLKRRRYTGWGRLSRKLINGIRDKQSGKTILDFLKSDGFANRNFMQLIHDDSLTFKEDIQKAQVSGQGDSLHEHIANLAGSPAIKKGILQTVKVVDELVKVMGRHKPENIVIEMARENQTTQKGQKNSRERMKRIEEGIKELGSQILKEHPVENTQLQNEKLYLYYLQNGRDMYVDQELDINRLSDYDVDHIVPQSFLKDDSIDNKVLTRSDKARGKSDNVPSEEVVKKMKNYWRQLLNAKLITQRKFDNLTKAERGGLSELDKAGFIKRQLVETRQITKHVAQILDSRMNTKYDENDKLIREVKVITLKSKLVSDFRKDFQFYKVREINNYHHAHDAYLNAVVGTALIKKYPKLESEFVYGDYKVYDVRKMIAKSEQEIGKATAKYFFYSNIMNFFKTEITLANGEIRKRPLIETNGETGEIVWDKGRDFATVRKVLSMPQVNIVKKTEVQTGGFSKESILPKRNSDKLIARKKDWDPKKYGGFDSPTVAYSVLVVAKVEKGKSKKLKSVKELLGITIMERSSFEKNPIDFLEAKGYKEVKKDLIIKLPKYSLFELENGRKRMLASAGELQKGNELALPSKYVNFLYLASHYEKLKGSPEDNEQKQLFVEQHKHYLDEIIEQISEFSKRVILADANLDKVLSAYNKHRDKPIREQAENIIHLFTLTNLGAPAAFKYFDTTIDRKRYTSTKEVLDATLIHQSITGLYETRIDLSQLGGDGGGGGGGSPAPGGVPWLTQQPLQLTILVPLQEYQEKILSKTALPEDQKQQLKTLFVKYDNLWQHWENQVGHRKIRPHNIATGDYPPRPQKQYPINPKAKPSIQIVIDDLLKQGVLTPQNSTMNTPVYPVPKPDGRWRMVLDYREVNKTIPLTAAQNQHSAGILATIVRQKYKTTLDLANGFWAHPITPESYWLTAFTWQGKQYCWTRLPQGFLNSPALFNADVVDLLKEIPNVQVYVDDIYLSHDDPKEHVQQLEKVFQILLQAGYVVSLKKSEIGQKTVEFLGFNITKEGRGLTDTFKTKLLNITPPKDLKQLQSILGKLNFARNFIPNFAELVQPLYNLIAPAKGKYIEWSEENTKQLNMVIEALNTASNLEERLPEQRLVIKVNTSPSAGYVRYYNETGKKPIMYLNYVFSKAELKFSMLEKLLTTMHKALIKAMDLAMGQEILVYSPIVSMTKIQKTPLPERKALPIRWITWMTYLEDPRIQFHYDKTLPELKHIPDVYTSSQSPVKHPSQYEGVFYTDGSAIKSPDPTKSNNAGMGIVHATYKPEYQVLNQWSIPLGNHTAQMAEIAAVEFACKKALKIPGPVLVITDSFYVAESANKELPYWKSNGFVNNKKKPLKHISKWKSIAECLSMKPDITIQHEKGISLQIPVFILKGNALADKLATQGSYVVNAGKRTADGSEFEKRTADGSEFESPKKKAKVE

SEQ ID NO: 6998 - protein, 2094 aa, synthetic construct; identical to SEQ ID NO: 4520

SEQ ID NO: 6999 - protein, 2094 aa, synthetic construct
MPAAKRVKLDGGDKKYSIGLDIGTNSVGWAVITDEYKVPSKKFKVLGNTDRHSIKKNLIGALLFDSGETAEATRLKRTARRRYTRRKNRICYLQEIFSNEMAKVDDSFFHRLEESFLVEEDKKHERHPIFGNIVDEVAYHEKYPTIYHLRKKLVDSTDKADLRLIYLALAHMIKFRGHFLIEGDLNPDNSDVDKLFIQLVQTYNQLFEENPINASGVDAKAILSARLSKSRRLENLIAQLPGEKKNGLFGNLIALSLGLTPNFKSNFDLAEDAKLQLSKDTYDDDLDNLLAQIGDQYADLFLAAKNLSDAILLSDILRVNTEITKAPLSASMIKRYDEHHQDLTLLKALVRQQLPEKYKEIFFDQSKNGYAGYIDGGASQEEFYKFIKPILEKMDGTEELLVKLNREDLLRKQRTFDNGSIPHQIHLGELHAILRRQEDFYPFLKDNREKIEKILTFRIPYYVGPLARGNSRFAWMTRKSEETITPWNFEEVVDKGASAQSFIERMTNFDKNLPNEKVLPKHSLLYEYFTVYNELTKVKYVTEGMRKPAFLSGEQKKAIVDLLFKTNRKVTVKQLKEDYFKKIECFDSVEISGVEDRFNASLGTYHDLLKIIKDKDFLDNEENEDILEDIVLTLTLFEDREMIEERLKTYAHLFDDKVMKQLKRRRYTGWGRLSRKLINGIRDKQSGKTILDFLKSDGFANRNFMQLIHDDSLTFKEDIQKAQVSGQGDSLHEHIANLAGSPAIKKGILQTVKVVDELVKVMGRHKPENIVIEMARENQTTQKGQKNSRERMKRIEEGIKELGSQILKEHPVENTQLQNEKLYLYYLQNGRDMYVDQELDINRLSDYDVDHIVPQSFLKDDSIDNKVLTRSDKARGKSDNVPSEEVVKKMKNYWRQLLNAKLITQRKFDNLTKAERGGLSELDKAGFIKRQLVETRQITKHVAQILDSRMNTKYDENDKLIREVKVITLKSKLVSDFRKDFQFYKVREINNYHHAHDAYLNAVVGTALIKKYPKLESEFVYGDYKVYDVRKMIAKSEQEIGKATAKYFFYSNIMNFFKTEITLANGEIRKRPLIETNGETGEIVWDKGRDFATVRKVLSMPQVNIVKKTEVQTGGFSKESILPKRNSDKLIARKKDWDPKKYGGFDSPTVAYSVLVVAKVEKGKSKKLKSVKELLGITIMERSSFEKNPIDFLEAKGYKEVKKDLIIKLPKYSLFELENGRKRMLASAGELQKGNELALPSKYVNFLYLASHYEKLKGSPEDNEQKQLFVEQHKHYLDEIIEQISEFSKRVILADANLDKVLSAYNKHRDKPIREQAENIIHLFTLTNLGAPAAFKYFDTTIDRKRYTSTKEVLDATLIHQSITGLYETRIDLSQLGGDGGGGGGGSPAPGGTLGIEDEYRLHETSTEPDVSLGSTWLSDFPQAWAETGGMGLAVRQAPLIIPLKATSTPVSIQQYPMSHEARLGIKPHIQRLLDQGILVPCQSPWNTPLLPVKKPGTNDYRPVQDLREVNKRVEDIHPTVPNPYNLLSGLPPSHQWYTVLDLKDAFFCLRLHPTSQPLFAFEWRDPGMGISGQLTWTRLPQGFKNSPTLFNEALHRDLADFRIQHPDLILLQYVDDILLAATSELDCQQGTRALLQTLGDLGYRASAKKAQICQKQVKYLGYLLREGQRWLTEARKETVMGQPVPKTPRQLREFLGTAGFCRLWIPGFAEMAAPLYPLTKPGTLFSWGPDQQKAYQEIKQALLTAPALGLPDLTKPFELFVDEKQGYAKGVLTQKLGPWRRPVAYLSKKLDPVAAGWPPCLRMVAAIAVLTKDAGKLTMGQPLVILAPHAVEALVKQPPDRWLSNARMTHYQAMLLDTDRVQFGPVVALNPATLLPLPEEGAPHDCLEILAETHGTRPDLTDQPIPDADHTWYTDGSSFLQEGQRKAGAAVTTETEVIWAGALPAGTSAQRAELIALTQALKMAEGKRLNVYTDSRYAFATAHIHGEIYRRRGWLTSEGREIKNKSEILALLKALFLPKRLSIIHCLGHQKGDSAEARGNRLADQAAREAAIKTPPDTSTLLAGKRTADGSEFEKRTADGSEFESPKKKAKVE

SEQ ID NO: 7000 - protein, 2094 aa, synthetic construct
MPAAKRVKLDGGDKKYSIGLDIGTNSVGWAVITDEYKVPSKKFKVLGNTDRHSIKKNLIGALLFDSGETAEATRLKRTARRRYTRRKNRICYLQEIFSNEMAKVDDSFFHRLEESFLVEEDKKHERHPIFGNIVDEVAYHEKYPTIYHLRKKLVDSTDKADLRLIYLALAHMIKFRGHFLIEGDLNPDNSDVDKLFIQLVQTYNQLFEENPINASGVDAKAILSARLSKSRRLENLIAQLPGEKKNGLFGNLIALSLGLTPNFKSNFDLAEDAKLQLSKDTYDDDLDNLLAQIGDQYADLFLAAKNLSDAILLSDILRVNTEITKAPLSASMIKRYDEHHQDLTLLKALVRQQLPEKYKEIFFDQSKNGYAGYIDGGASQEEFYKFIKPILEKMDGTEELLVKLNREDLLRKQRTFDNGSIPHQIHLGELHAILRRQEDFYPFLKDNREKIEKILTFRIPYYVGPLARGNSRFAWMTRKSEETITPWNFEEVVDKGASAQSFIERMTNFDKNLPNEKVLPKHSLLYEYFTVYNELTKVKYVTEGMRKPAFLSGEQKKAIVDLLFKTNRKVTVKQLKEDYFKKIECFDSVEISGVEDRFNASLGTYHDLLKIIKDKDFLDNEENEDILEDIVLTLTLFEDREMIEERLKTYAHLFDDKVMKQLKRRRYTGWGRLSRKLINGIRDKQSGKTILDFLKSDGFANRNFMQLIHDDSLTFKEDIQKAQVSGQGDSLHEHIANLAGSPAIKKGILQTVKVVDELVKVMGRHKPENIVIEMARENQTTQKGQKNSRERMKRIEEGIKELGSQILKEHPVENTQLQNEKLYLYYLQNGRDMYVDQELDINRLSDYDVDHIVPQSFLKDDSIDNKVLTRSDKARGKSDNVPSEEVVKKMKNYWRQLLNAKLITQRKFDNLTKAERGGLSELDKAGFIKRQLVETRQITKHVAQILDSRMNTKYDENDKLIREVKVITLKSKLVSDFRKDFQFYKVREINNYHHAHDAYLNAVVGTALIKKYPKLESEFVYGDYKVYDVRKMIAKSEQEIGKATAKYFFYSNIMNFFKTEITLANGEIRKRPLIETNGETGEIVWDKGRDFATVRKVLSMPQVNIVKKTEVQTGGFSKESILPKRNSDKLIARKKDWDPKKYGGFDSPTVAYSVLVVAKVEKGKSKKLKSVKELLGITIMERSSFEKNPIDFLEAKGYKEVKKDLIIKLPKYSLFELENGRKRMLASAGELQKGNELALPSKYVNFLYLASHYEKLKGSPEDNEQKQLFVEQHKHYLDEIIEQISEFSKRVILADANLDKVLSAYNKHRDKPIREQAENIIHLFTLTNLGAPAAFKYFDTTIDRKRYTSTKEVLDATLIHQSITGLYETRIDLSQLGGDGGGGGGGSPAPGGTLNIEDEYRLHETSKEPDVSLGSTWLSDFPQAWAETGGMGLAVRQAPLIIPLKATSTPVSIKQYPMSQEARLGIKPHIQRLLDQGILVPCQSPWNTPLLPVKKPGTNDYRPVQDLREVNKRVEDIHPTVPNPYNLLSGLPPSHQWYTVLDLKDAFFCLRLHPTSQPLFAFEWRDPEMGISGQLTWTRLPQGFKNSPTLFDEALHRDLAGFRIQHPDLILLQYVDDLLLAATSELDCQQGTRALLQTLGDLGYRASAKKAQICQKQVKYLGYLLKEGQRWLTEARKETVMGQPIPKTPRQLREFLGTAGFCRLWIPGFAEMAAPLYPLTKTGTLFNWGPDQQKAFQEIKQALLTAPALGLPDLTKPFELFVDEKQGYAKGVLTQKLGPWRRPVAYLSKKLDPVAAGWPPCLRMVAAIAVLTKDAGKLTMGQPLVILAPHAVEALVKQPPDRWLSNARMTHYQALLLDTDRVQFGPVVALNPATLLPLPEEGLQHDCLDILAEAHGTRSDLMDQPLPDADHTWYTDGSSFLQEGQRKAGAAVTTETEVIWARALPAGTSAQRAELIALTQALKMAEGKKLNVYTDSRYAFATAHIHGEIYRRRGLLTSEGKEIKNKDEILALLKALFLPKRLSIIHCPGHQKGNSAEARGNRMADQAAREVATRETPETSTLLAGKRTADGSEFEKRTADGSEFESPKKKAKVE

SEQ ID NO: 7001 - protein, 2094 aa, synthetic construct
MPAAKRVKLDGGDKKYSIGLDIGTNSVGWAVITDEYKVPSKKFKVLGNTDRHSIKKNLIGALLFDSGETAEATRLKRTARRRYTRRKNRICYLQEIFSNEMAKVDDSFFHRLEESFLVEEDKKHERHPIFGNIVDEVAYHEKYPTIYHLRKKLVDSTDKADLRLIYLALAHMIKFRGHFLIEGDLNPDNSDVDKLFIQLVQTYNQLFEENPINASGVDAKAILSARLSKSRRLENLIAQLPGEKKNGLFGNLIALSLGLTPNFKSNFDLAEDAKLQLSKDTYDDDLDNLLAQIGDQYADLFLAAKNLSDAILLSDILRVNTEITKAPLSASMIKRYDEHHQDLTLLKALVRQQLPEKYKEIFFDQSKNGYAGYIDGGASQEEFYKFIKPILEKMDGTEELLVKLNREDLLRKQRTFDNGSIPHQIHLGELHAILRRQEDFYPFLKDNREKIEKILTFRIPYYVGPLARGNSRFAWMTRKSEETITPWNFEEVVDKGASAQSFIERMTNFDKNLPNEKVLPKHSLLYEYFTVYNELTKVKYVTEGMRKPAFLSGEQKKAIVDLLFKTNRKVTVKQLKEDYFKKIECFDSVEISGVEDRFNASLGTYHDLLKIIKDKDFLDNEENEDILEDIVLTLTLFEDREMIEERLKTYAHLFDDKVMKQLKRRRYTGWGRLSRKLINGIRDKQSGKTILDFLKSDGFANRNFMQLIHDDSLTFKEDIQKAQVSGQGDSLHEHIANLAGSPAIKKGILQTVKVVDELVKVMGRHKPENIVIEMARENQTTQKGQKNSRERMKRIEEGIKELGSQILKEHPVENTQLQNEKLYLYYLQNGRDMYVDQELDINRLSDYDVDHIVPQSFLKDDSIDNKVLTRSDKARGKSDNVPSEEVVKKMKNYWRQLLNAKLITQRKFDNLTKAERGGLSELDKAGFIKRQLVETRQITKHVAQILDSRMNTKYDENDKLIREVKVITLKSKLVSDFRKDFQFYKVREINNYHHAHDAYLNAVVGTALIKKYPKLESEFVYGDYKVYDVRKMIAKSEQEIGKATAKYFFYSNIMNFFKTEITLANGEIRKRPLIETNGETGEIVWDKGRDFATVRKVLSMPQVNIVKKTEVQTGGFSKESILPKRNSDKLIARKKDWDPKKYGGFDSPTVAYSVLVVAKVEKGKSKKLKSVKELLGITIMERSSFEKNPIDFLEAKGYKEVKKDLIIKLPKYSLFELENGRKRMLASAGELQKGNELALPSKYVNFLYLASHYEKLKGSPEDNEQKQLFVEQHKHYLDEIIEQISEFSKRVILADANLDKVLSAYNKHRDKPIREQAENIIHLFTLTNLGAPAAFKYFDTTIDRKRYTSTKEVLDATLIHQSITGLYETRIDLSQLGGDGGGGGGGSPAPGGTLNIEDEYRLHETSKEPDVSLGSTWLSDFPQAWAETGGMGLAVRQAPLIIPLKATSTPVSIKQYPMSQEARLGIKPHIQRLLDQGILVPCQSPWNTPLLPVKKPGTNDYRPVQDLREVNKRVEDIHPTVPNPYNLLSGLPPSHQWYTVLDLKDAFFCLRLHPTSQPLFAFEWRDPEMGISGQLTWTRLPQGFKNSPTLFNEALHRDLAGFRIQHPDLILLQYVDDLLLAATSELDCQQGTRALLQTLGDLGYRASAKKAQICQKQVKYLGYLLKEGQRWLTEARKETVMGQPIPKTPRQLREFLGTAGFCRLWIPGFAEMAAPLYPLTKPGTLFNWGPDQQKAFQEIKQALLTAPALGLPDLTKPFELFVDEKQGYAKGVLTQKLGPWRRPVAYLSKKLDPVAAGWPPCLRMVAAIAVLTKDAGKLTMGQPLVILAPHAVEALVKQPPDRWLSNARMTHYQALLLDTDRVQFGPVVALNPATLLPLPEEGLQHDCLDILAEAHGTRSDLMDQPLPDADHTWYTDGSSFLQEGQRKAGAAVTTETEVIWARALPAGTSAQRAELIALTQALKMAEGKKLNVYTDSRYAFATAHIHGEIYRRRGWLTSEGKEIKNKDEILALLKALFLPKRLSIIHCPGHQKGNSAEARGNRMADQAAREVATRETPETSTLLAGKRTADGSEFEKRTADGSEFESPKKKAKVE

SEQ ID NO: 7002 - protein, 2114 aa, synthetic construct
MPAAKRVKLDGGDKKYSIGLDIGTNSVGWAVITDEYKVPSKKFKVLGNTDRHSIKKNLIGALLFDSGETAEATRLKRTARRRYTRRKNRICYLQEIFSNEMAKVDDSFFHRLEESFLVEEDKKHERHPIFGNIVDEVAYHEKYPTIYHLRKKLVDSTDKADLRLIYLALAHMIKFRGHFLIEGDLNPDNSDVDKLFIQLVQTYNQLFEENPINASGVDAKAILSARLSKSRRLENLIAQLPGEKKNGLFGNLIALSLGLTPNFKSNFDLAEDAKLQLSKDTYDDDLDNLLAQIGDQYADLFLAAKNLSDAILLSDILRVNTEITKAPLSASMIKRYDEHHQDLTLLKALVRQQLPEKYKEIFFDQSKNGYAGYIDGGASQEEFYKFIKPILEKMDGTEELLVKLNREDLLRKQRTFDNGSIPHQIHLGELHAILRRQEDFYPFLKDNREKIEKILTFRIPYYVGPLARGNSRFAWMTRKSEETITPWNFEEVVDKGASAQSFIERMTNFDKNLPNEKVLPKHSLLYEYFTVYNELTKVKYVTEGMRKPAFLSGEQKKAIVDLLFKTNRKVTVKQLKEDYFKKIECFDSVEISGVEDRFNASLGTYHDLLKIIKDKDFLDNEENEDILEDIVLTLTLFEDREMIEERLKTYAHLFDDKVMKQLKRRRYTGWGRLSRKLINGIRDKQSGKTILDFLKSDGFANRNFMQLIHDDSLTFKEDIQKAQVSGQGDSLHEHIANLAGSPAIKKGILQTVKVVDELVKVMGRHKPENIVIEMARENQTTQKGQKNSRERMKRIEEGIKELGSQILKEHPVENTQLQNEKLYLYYLQNGRDMYVDQELDINRLSDYDVDHIVPQSFLKDDSIDNKVLTRSDKARGKSDNVPSEEVVKKMKNYWRQLLNAKLITQRKFDNLTKAERGGLSELDKAGFIKRQLVETRQITKHVAQILDSRMNTKYDENDKLIREVKVITLKSKLVSDFRKDFQFYKVREINNYHHAHDAYLNAVVGTALIKKYPKLESEFVYGDYKVYDVRKMIAKSEQEIGKATAKYFFYSNIMNFFKTEITLANGEIRKRPLIETNGETGEIVWDKGRDFATVRKVLSMPQVNIVKKTEVQTGGFSKESILPKRNSDKLIARKKDWDPKKYGGFDSPTVAYSVLVVAKVEKGKSKKLKSVKELLGITIMERSSFEKNPIDFLEAKGYKEVKKDLIIKLPKYSLFELENGRKRMLASAGELQKGNELALPSKYVNFLYLASHYEKLKGSPEDNEQKQLFVEQHKHYLDEIIEQISEFSKRVILADANLDKVLSAYNKHRDKPIREQAENIIHLFTLTNLGAPAAFKYFDTTIDRKRYTSTKEVLDATLIHQSITGLYETRIDLSQLGGDGGGGGGGSPAPGGVQEISDSRPMLHIYLNGRRFLGLLDTGADKTCIAGRDWPANWPIHQTESSLQGLGMACGVARSSQPLRWQHEDKSGIIHPFVIPTLPFTLWGRDIMKDIKVRLMTDSPDDSQDLMIGAIESNLFADQISWKSDQPVWLNQWPLKQEKLQALQQLVTEQLQLGHLEESNSPWNTPVFVIKKKSGKWRLLQDLRAVNATMHDMGALQPGLPSPVAVPKGWEIIIIDLQDCFFNIKLHPEDCKRFAFSVPSPNFKRPYQRFQWKVLPQGMKNSPTLCQKFVDKAILTVRDKYQDSYIVHYMDDILLAHPSRSIVDEILTSMIQALNKHGLVVSTEKIQKYDNLKYLGTHIQGDSVSYQKLQIRTDKLRTLNDFQKLLGNINWIRPFLKLTTGELKPLFEILNGDSNPISTRKLTPEACKALQLMNERLSTARVKRLDLSQPWSLCILKTEYTPTACLWQDGVVEWIHLPHISPKVITPYDIFCTQLIIKGRHRSKELFSKDPDYIVVPYTKVQFDLLLQEKEDWPISLLGFLGEVHFHLPKDPLLTFTLQTAIIFPHMTSTTPLEKGIVIFTDGSANGRSVTYIQGREPIIKENTQNTAQQAEIVAVITAFEEVSQPFNLYTDSKYVTGLFPEIETATLSPRTKIYTELKHLQRLIHKRQEKFYIGHIRGHTGLPGPLAQGNAYADSLTRILTAAGKRTADGSEFEKRTADGSEFESPKKKAKVE

SEQ ID NO: 7003 - protein, 2088 aa, synthetic construct
MPAAKRVKLDGGDKKYSIGLDIGTNSVGWAVITDEYKVPSKKFKVLGNTDRHSIKKNLIGALLFDSGETAEATRLKRTARRRYTRRKNRICYLQEIFSNEMAKVDDSFFHRLEESFLVEEDKKHERHPIFGNIVDEVAYHEKYPTIYHLRKKLVDSTDKADLRLIYLALAHMIKFRGHFLIEGDLNPDNSDVDKLFIQLVQTYNQLFEENPINASGVDAKAILSARLSKSRRLENLIAQLPGEKKNGLFGNLIALSLGLTPNFKSNFDLAEDAKLQLSKDTYDDDLDNLLAQIGDQYADLFLAAKNLSDAILLSDILRVNTEITKAPLSASMIKRYDEHHQDLTLLKALVRQQLPEKYKEIFFDQSKNGYAGYIDGGASQEEFYKFIKPILEKMDGTEELLVKLNREDLLRKQRTFDNGSIPHQIHLGELHAILRRQEDFYPFLKDNREKIEKILTFRIPYYVGPLARGNSRFAWMTRKSEETITPWNFEEVVDKGASAQSFIERMTNFDKNLPNEKVLPKHSLLYEYFTVYNELTKVKYVTEGMRKPAFLSGEQKKAIVDLLFKTNRKVTVKQLKEDYFKKIECFDSVEISGVEDRFNASLGTYHDLLKIIKDKDFLDNEENEDILEDIVLTLTLFEDREMIEERLKTYAHLFDDKVMKQLKRRRYTGWGRLSRKLINGIRDKQSGKTILDFLKSDGFANRNFMQLIHDDSLTFKEDIQKAQVSGQGDSLHEHIANLAGSPAIKKGILQTVKVVDELVKVMGRHKPENIVIEMARENQTTQKGQKNSRERMKRIEEGIKELGSQILKEHPVENTQLQNEKLYLYYLQNGRDMYVDQELDINRLSDYDVDHIVPQSFLKDDSIDNKVLTRSDKARGKSDNVPSEEVVKKMKNYWRQLLNAKLITQRKFDNLTKAERGGLSELDKAGFIKRQLVETRQITKHVAQILDSRMNTKYDENDKLIREVKVITLKSKLVSDFRKDFQFYKVREINNYHHAHDAYLNAVVGTALIKKYPKLESEFVYGDYKVYDVRKMIAKSEQEIGKATAKYFFYSNIMNFFKTEITLANGEIRKRPLIETNGETGEIVWDKGRDFATVRKVLSMPQVNIVKKTEVQTGGFSKESILPKRNSDKLIARKKDWDPKKYGGFDSPTVAYSVLVVAKVEKGKSKKLKSVKELLGITIMERSSFEKNPIDFLEAKGYKEVKKDLIIKLPKYSLFELENGRKRMLASAGELQKGNELALPSKYVNFLYLASHYEKLKGSPEDNEQKQLFVEQHKHYLDEIIEQISEFSKRVILADANLDKVLSAYNKHRDKPIREQAENIIHLFTLTNLGAPAAFKYFDTTIDRKRYTSTKEVLDATLIHQSITGLYETRIDLSQLGGDGGGGGGGSPAPGGTLQLDDEYRLYSPLVKPDQNIQFWLEQFPQAWAETAGMGLAKQVPPQVIQLKASATPVSVRQYPLSKEAQEGIRPHVQRLIQQGILVPVQSPWNTPLLPVRKPGTNDYRPVQDLREVNKRVQDIHPTVPNPYNLLCALPPQRSWYTVLDLKDAFFCLRLHPTSQPLFAFEWRDPGTGRTGQLTWTRLPQGFKNSPTIFDEALHRDLANFRIQHPQVTLLQYVDDLLLAGATKQDCLEGTKALLLELSDLGYRASAKKAQICRREVTYLGYSLRDGQRWLTEARKKTVVQIPAPTTAKQVREFLGTAGFCRLWIPGFATLAAPLYPLTKEKGEFSWAPEHQKAFDAIKKALLSAPALALPDVTKPFTLYVDERKGVARGVLTQTLGPWRRPVAYLSKKLDPVASGWPVCLKAIAAVAILVKDADKLTLGQNITVIAPHALENIVRQPPDRWMTNARMTHYQSLLLTERVTFAPPAALNPATLLPEETDEPVTHDCHQLLIEETGVRKDLTDIPLTGEVLTWFTDGSSYVVEGKRMAGAAVVDGTRTIWASSLPEGTSAQKAELMALTQALRLAEGKSINIYTDSRYAFATAHVHGAIYKQRGLLTSAGREIKNKEEILSLLEALHLPKRLAIIHCPGHQKAKDPISRGNQMADRVAKQAAQGVNLLAGKRTADGSEFEKRTADGSEFESPKKKAKVE

SEQ ID NO: 7004 - protein, 2174 aa, synthetic construct
MPAAKRVKLDGGDKKYSIGLDIGTNSVGWAVITDEYKVPSKKFKVLGNTDRHSIKKNLIGALLFDSGETAEATRLKRTARRRYTRRKNRICYLQEIFSNEMAKVDDSFFHRLEESFLVEEDKKHERHPIFGNIVDEVAYHEKYPTIYHLRKKLVDSTDKADLRLIYLALAHMIKFRGHFLIEGDLNPDNSDVDKLFIQLVQTYNQLFEENPINASGVDAKAILSARLSKSRRLENLIAQLPGEKKNGLFGNLIALSLGLTPNFKSNFDLAEDAKLQLSKDTYDDDLDNLLAQIGDQYADLFLAAKNLSDAILLSDILRVNTEITKAPLSASMIKRYDEHHQDLTLLKALVRQQLPEKYKEIFFDQSKNGYAGYIDGGASQEEFYKFIKPILEKMDGTEELLVKLNREDLLRKQRTFDNGSIPHQIHLGELHAILRRQEDFYPFLKDNREKIEKILTFRIPYYVGPLARGNSRFAWMTRKSEETITPWNFEEVVDKGASAQSFIERMTNFDKNLPNEKVLPKHSLLYEYFTVYNELTKVKYVTEGMRKPAFLSGEQKKAIVDLLFKTNRKVTVKQLKEDYFKKIECFDSVEISGVEDRFNASLGTYHDLLKIIKDKDFLDNEENEDILEDIVLTLTLFEDREMIEERLKTYAHLFDDKVMKQLKRRRYTGWGRLSRKLINGIRDKQSGKTILDFLKSDGFANRNFMQLIHDDSLTFKEDIQKAQVSGQGDSLHEHIANLAGSPAIKKGILQTVKVVDELVKVMGRHKPENIVIEMARENQTTQKGQKNSRERMKRIEEGIKELGSQILKEHPVENTQLQNEKLYLYYLQNGRDMYVDQELDINRLSDYDVDHIVPQSFLKDDSIDNKVLTRSDKARGKSDNVPSEEVVKKMKNYWRQLLNAKLITQRKFDNLTKAERGGLSELDKAGFIKRQLVETRQITKHVAQILDSRMNTKYDENDKLIREVKVITLKSKLVSDFRKDFQFYKVREINNYHHAHDAYLNAVVGTALIKKYPKLESEFVYGDYKVYDVRKMIAKSEQEIGKATAKYFFYSNIMNFFKTEITLANGEIRKRPLIETNGETGEIVWDKGRDFATVRKVLSMPQVNIVKKTEVQTGGFSKESILPKRNSDKLIARKKDWDPKKYGGFDSPTVAYSVLVVAKVEKGKSKKLKSVKELLGITIMERSSFEKNPIDFLEAKGYKEVKKDLIIKLPKYSLFELENGRKRMLASAGELQKGNELALPSKYVNFLYLASHYEKLKGSPEDNEQKQLFVEQHKHYLDEIIEQISEFSKRVILADANLDKVLSAYNKHRDKPIREQAENIIHLFTLTNLGAPAAFKYFDTTIDRKRYTSTKEVLDATLIHQSITGLYETRIDLSQLGGDGGGGGGGSPAPGGMDPLQLLQPLEAEIKGTKLKAHWNSGATITCVPEAFLEDERPIQTMLIKTIHGEKQQDVYYLTFKVQGRKVEAEVLASPYDYILLNPSDVPWLMKKPLQLTVLVPLHEYQERLLQQTALPKEQKELLQKLFLKYDALWQHWENQVGHRRIKPHNIATGTLAPRPQKQYPINPKAKPSIQIVIDDLLKQGVLIQQNSTMNTPVYPVPKPDGKWRMVLDYREVNKTIPLIAAQNQHSAGILSSIYRGKYKTTLDLTNGFWAHPITPESYWLTAFTWQGKQYCWTRLPQGFLNSPALFNADVVDLLKEIPNVQAYVDDIYISHDDPQEHLEQLEKIFSILLNAGYVVSLKKSEIAQREVEFLGFNITKEGRGLTDTFKQKLLNITPPKDLKQLQSILGLLNFARNFIPNYSELVKPLYTIVAPANGKFISWTEDNSNQLQHIISVLNQADNLEERNPETRLIIKVNSSPSAGYIRYYNEGSKRPIMYVNYIFSKAEAKFTQTEKLLTTMHKGLIKAMDLAMGQEILVYSPIVSMTKIQRTPLPERKALPVRWITWMTYLEDPRIQFHYDKSLPELQQIPNVTEDVIAKTKHPSEFAMVFYTDGSAIKHPDVNKSHSAGMGIAQVQFIPEYKIVHQWSIPLGDHTAQLAEIAAVEFACKKALKISGPVLIVTDSFYVAESANKELPYWKSNGFLNNKKKPLRHVSKWKSIAECLQLKPDIIIMHEKGHQQPMTTLHTEGNNLADKLATQGSYVVHAGKRTADGSEFEKRTADGSEFESPKKKAKVE

SEQ ID NO: 7005 - protein, 2085 aa, synthetic construct
MPAAKRVKLDGGDKKYSIGLDIGTNSVGWAVITDEYKVPSKKFKVLGNTDRHSIKKNLIGALLFDSGETAEATRLKRTARRRYTRRKNRICYLQEIFSNEMAKVDDSFFHRLEESFLVEEDKKHERHPIFGNIVDEVAYHEKYPTIYHLRKKLVDSTDKADLRLIYLALAHMIKFRGHFLIEGDLNPDNSDVDKLFIQLVQTYNQLFEENPINASGVDAKAILSARLSKSRRLENLIAQLPGEKKNGLFGNLIALSLGLTPNFKSNFDLAEDAKLQLSKDTYDDDLDNLLAQIGDQYADLFLAAKNLSDAILLSDILRVNTEITKAPLSASMIKRYDEHHQDLTLLKALVRQQLPEKYKEIFFDQSKNGYAGYIDGGASQEEFYKFIKPILEKMDGTEELLVKLNREDLLRKQRTFDNGSIPHQIHLGELHAILRRQEDFYPFLKDNREKIEKILTFRIPYYVGPLARGNSRFAWMTRKSEETITPWNFEEVVDKGASAQSFIERMTNFDKNLPNEKVLPKHSLLYEYFTVYNELTKVKYVTEGMRKPAFLSGEQKKAIVDLLFKTNRKVTVKQLKEDYFKKIECFDSVEISGVEDRFNASLGTYHDLLKIIKDKDFLDNEENEDILEDIVLTLTLFEDREMIEERLKTYAHLFDDKVMKQLKRRRYTGWGRLSRKLINGIRDKQSGKTILDFLKSDGFANRNFMQLIHDDSLTFKEDIQKAQVSGQGDSLHEHIANLAGSPAIKKGILQTVKVVDELVKVMGRHKPENIVIEMARENQTTQKGQKNSRERMKRIEEGIKELGSQILKEHPVENTQLQNEKLYLYYLQNGRDMYVDQELDINRLSDYDVDHIVPQSFLKDDSIDNKVLTRSDKARGKSDNVPSEEVVKKMKNYWRQLLNAKLITQRKFDNLTKAERGGLSELDKAGFIKRQLVETRQITKHVAQILDSRMNTKYDENDKLIREVKVITLKSKLVSDFRKDFQFYKVREINNYHHAHDAYLNAVVGTALIKKYPKLESEFVYGDYKVYDVRKMIAKSEQEIGKATAKYFFYSNIMNFFKTEITLANGEIRKRPLIETNGETGEIVWDKGRDFATVRKVLSMPQVNIVKKTEVQTGGFSKESILPKRNSDKLIARKKDWDPKKYGGFDSPTVAYSVLVVAKVEKGKSKKLKSVKELLGITIMERSSFEKNPIDFLEAKGYKEVKKDLIIKLPKYSLFELENGRKRMLASAGELQKGNELALPSKYVNFLYLASHYEKLKGSPEDNEQKQLFVEQHKHYLDEIIEQISEFSKRVILADANLDKVLSAYNKHRDKPIREQAENIIHLFTLTNLGAPAAFKYFDTTIDRKRYTSTKEVLDATLIHQSITGLYETRIDLSQLGGDGGGGGGGSPAPGGIPWLMKKPLQLTTLVPLQEYEERLLKQTMLTGSYKEKLQSLFLKYDALWQHWENQVGHRRIKPHHIATGTVNPRPQKQYPINPKAKASIQTVINDLLKQGVLIQQNSIMNTPVYPVPKPDGKWRMVLDYREVNKTIPLIAAQNQHSAGILSSIFRGKYKTTLDLSNGFWAHSITPESYWLTAFTWLGQQYCWTRLPQGFLNSPALFNADVVDLLKEVPNVQVYVDDIYISHDDPREHLEQLEKVFSLLLNAGYVVSLKKSEIAQHEVEFLGFNITKEGRGLTETFKQKLLNITPPRDLKQLQSILGLLNFARNFIPNFSELVKPLYNIIATAPGKYITWTTDNSQQLQNIISMLNSAENLEERNPEVRLIMKVNTSPSAGYIRFYNEFAKRPIMYLNYVYTKAEVKFTNTEKLLTTIHKGLIKALDLGMGQEILVYSPIVSMTKIQKTPLPERKALPIRWITWMSYLEDPRIQFHYDKTLPELQQVPTVTDDIIAKIKHPSEFSMVFYTDGSAIKHPNVNKSHNAGMGIAQVQFKPEFTVINTWSIPLGDHTAQLAEVAAVEFACKKALKIDGPVLIVTDSFYVAESVNKELPYWQSNGFFNNKKKPLKHVSKWKSIADCIQLKPDIIIIHEKGHQPTASTFHTEGNNLADKLATQGSYVVNAGKRTADGSEFEKRTADGSEFESPKKKAKVE

SEQ ID NO: 7006 - protein, 2085 aa, synthetic construct
MPAAKRVKLDGGDKKYSIGLDIGTNSVGWAVITDEYKVPSKKFKVLGNTDRHSIKKNLIGALLFDSGETAEATRLKRTARRRYTRRKNRICYLQEIFSNEMAKVDDSFFHRLEESFLVEEDKKHERHPIFGNIVDEVAYHEKYPTIYHLRKKLVDSTDKADLRLIYLALAHMIKFRGHFLIEGDLNPDNSDVDKLFIQLVQTYNQLFEENPINASGVDAKAILSARLSKSRRLENLIAQLPGEKKNGLFGNLIALSLGLTPNFKSNFDLAEDAKLQLSKDTYDDDLDNLLAQIGDQYADLFLAAKNLSDAILLSDILRVNTEITKAPLSASMIKRYDEHHQDLTLLKALVRQQLPEKYKEIFFDQSKNGYAGYIDGGASQEEFYKFIKPILEKMDGTEELLVKLNREDLLRKQRTFDNGSIPHQIHLGELHAILRRQEDFYPFLKDNREKIEKILTFRIPYYVGPLARGNSRFAWMTRKSEETITPWNFEEVVDKGASAQSFIERMTNFDKNLPNEKVLPKHSLLYEYFTVYNELTKVKYVTEGMRKPAFLSGEQKKAIVDLLFKTNRKVTVKQLKEDYFKKIECFDSVEISGVEDRFNASLGTYHDLLKIIKDKDFLDNEENEDILEDIVLTLTLFEDREMIEERLKTYAHLFDDKVMKQLKRRRYTGWGRLSRKLINGIRDKQSGKTILDFLKSDGFANRNFMQLIHDDSLTFKEDIQKAQVSGQGDSLHEHIANLAGSPAIKKGILQTVKVVDELVKVMGRHKPENIVIEMARENQTTQKGQKNSRERMKRIEEGIKELGSQILKEHPVENTQLQNEKLYLYYLQNGRDMYVDQELDINRLSDYDVDHIVPQSFLKDDSIDNKVLTRSDKARGKSDNVPSEEVVKKMKNYWRQLLNAKLITQRKFDNLTKAERGGLSELDKAGFIKRQLVETRQITKHVAQILDSRMNTKYDENDKLIREVKVITLKSKLVSDFRKDFQFYKVREINNYHHAHDAYLNAVVGTALIKKYPKLESEFVYGDYKVYDVRKMIAKSEQEIGKATAKYFFYSNIMNFFKTEITLANGEIRKRPLIETNGETGEIVWDKGRDFATVRKVLSMPQVNIVKKTEVQTGGFSKESILPKRNSDKLIARKKDWDPKKYGGFDSPTVAYSVLVVAKVEKGKSKKLKSVKELLGITIMERSSFEKNPIDFLEAKGYKEVKKDLIIKLPKYSLFELENGRKRMLASAGELQKGNELALPSKYVNFLYLASHYEKLKGSPEDNEQKQLFVEQHKHYLDEIIEQISEFSKRVILADANLDKVLSAYNKHRDKPIREQAENIIHLFTLTNLGAPAAFKYFDTTIDRKRYTSTKEVLDATLIHQSITGLYETRIDLSQLGGDGGGGGGGSPAPGGIPWLMKKPLQLTTLVPLQEYEERLLKQTMLTGSYKEKLQSLFLKYDALWQHWENQVGHRRIKPHHIATGTVNPRPQKQYPINPKAKASIQTVINDLLKQGVLIQQNSIMNTPVYPVPKPDGKWRMVLDYREVNKTIPLIAAQNQHSAGILSSIFRGKYKTTLDLSNGFWAHSITPESYWLTAFTWLGQQYCWTRLPQGFLNSPALFNADVVDLLKEVPNVQVYVDDIYISHDDPREHLEQLEKVFSLLLNAGYVVSLKKSEIAQHEVEFLGFNITKEGRGLTETFKQKLLNITPPRDLKQLQSILGKLNFARNFIPNFSELVKPLYNIIATAPGKYITWTTDNSQQLQNIISMLNSAENLEERNPEVRLIMKVNTSPSAGYIRFYNEFAKRPIMYLNYVYTKAEVKFTNTEKLLTTIHKGLIKALDLGMGQEILVYSPIVSMTKIQKTPLPERKALPIRWITWMSYLEDPRIQFHYDKTLPELQQVPTVTDDIIAKIKHPSEFSMVFYTDGSAIKHPNVNKSHNAGMGIAQVQFKPEFTVINTWSIPLGDHTAQLAEVAAVEFACKKALKIDGPVLIVTDSFYVAESVNKELPYWQSNGFFNNKKKPLKHVSKWKSIADCIQLKPDIIIIHEKGHQPTASTFHTEGNNLADKLATQGSYVVNAGKRTADGSEFEKRTADGSEFESPKKKAKVE

SEQ ID NO: 7007 - protein, 2174 aa, synthetic construct
MPAAKRVKLDGGDKKYSIGLDIGTNSVGWAVITDEYKVPSKKFKVLGNTDRHSIKKNLIGALLFDSGETAEATRLKRTARRRYTRRKNRICYLQEIFSNEMAKVDDSFFHRLEESFLVEEDKKHERHPIFGNIVDEVAYHEKYPTIYHLRKKLVDSTDKADLRLIYLALAHMIKFRGHFLIEGDLNPDNSDVDKLFIQLVQTYNQLFEENPINASGVDAKAILSARLSKSRRLENLIAQLPGEKKNGLFGNLIALSLGLTPNFKSNFDLAEDAKLQLSKDTYDDDLDNLLAQIGDQYADLFLAAKNLSDAILLSDILRVNTEITKAPLSASMIKRYDEHHQDLTLLKALVRQQLPEKYKEIFFDQSKNGYAGYIDGGASQEEFYKFIKPILEKMDGTEELLVKLNREDLLRKQRTFDNGSIPHQIHLGELHAILRRQEDFYPFLKDNREKIEKILTFRIPYYVGPLARGNSRFAWMTRKSEETITPWNFEEVVDKGASAQSFIERMTNFDKNLPNEKVLPKHSLLYEYFTVYNELTKVKYVTEGMRKPAFLSGEQKKAIVDLLFKTNRKVTVKQLKEDYFKKIECFDSVEISGVEDRFNASLGTYHDLLKIIKDKDFLDNEENEDILEDIVLTLTLFEDREMIEERLKTYAHLFDDKVMKQLKRRRYTGWGRLSRKLINGIRDKQSGKTILDFLKSDGFANRNFMQLIHDDSLTFKEDIQKAQVSGQGDSLHEHIANLAGSPAIKKGILQTVKVVDELVKVMGRHKPENIVIEMARENQTTQKGQKNSRERMKRIEEGIKELGSQILKEHPVENTQLQNEKLYLYYLQNGRDMYVDQELDINRLSDYDVDHIVPQSFLKDDSIDNKVLTRSDKARGKSDNVPSEEVVKKMKNYWRQLLNAKLITQRKFDNLTKAERGGLSELDKAGFIKRQLVETRQITKHVAQILDSRMNTKYDENDKLIREVKVITLKSKLVSDFRKDFQFYKVREINNYHHAHDAYLNAVVGTALIKKYPKLESEFVYGDYKVYDVRKMIAKSEQEIGKATAKYFFYSNIMNFFKTEITLANGEIRKRPLIETNGETGEIVWDKGRDFATVRKVLSMPQVNIVKKTEVQTGGFSKESILPKRNSDKLIARKKDWDPKKYGGFDSPTVAYSVLVVAKVEKGKSKKLKSVKELLGITIMERSSFEKNPIDFLEAKGYKEVKKDLIIKLPKYSLFELENGRKRMLASAGELQKGNELALPSKYVNFLYLASHYEKLKGSPEDNEQKQLFVEQHKHYLDEIIEQISEFSKRVILADANLDKVLSAYNKHRDKPIREQAENIIHLFTLTNLGAPAAFKYFDTTIDRKRYTSTKEVLDATLIHQSITGLYETRIDLSQLGGDGGGGGGGSPAPGGMDPLQLLQPLEAEIKGTKLKAHWNSGATITCVPQAFLEEEVPIKNIWIKTIHGEKEQPVYYLTFKIQGRKVEAEVISSPYDYILVSPSDIPWLMKKPLQLTTLVPLQEYEERLLKQTMLTGSYKEKLQSLFLKYDALWQHWENQVGHRRIKPHHIATGTVNPRPQKQYPINPKAKASIQTVINDLLKQGVLIQQNSIMNTPVYPVPKPDGKWRMVLDYREVNKTIPLIAAQNQHSAGILSSIFRGKYKTTLDLSNGFWAHSITPESYWLTAFTWLGQQYCWTRLPQGFLNSPALFNADVVDLLKEVPNVQVYVDDIYISHDDPREHLEQLEKVFSLLLNAGYVVSLKKSEIAQHEVEFLGFNITKEGRGLTETFKQKLLNITPPRDLKQLQSILGKLNFARNFIPNFSELVKPLYNIIATAPGKYITWTTDNSQQLQNIISMLNSAENLEERNPEVRLIMKVNTSPSAGYIRFYNEFAKRPIMYLNYVYTKAEVKFTNTEKLLTTIHKGLIKALDLGMGQEILVYSPIVSMTKIQKTPLPERKALPIRWITWMSYLEDPRIQFHYDKTLPELQQVPTVTDDIIAKIKHPSEFSMVFYTDGSAIKHPNVNKSHNAGMGIAQVQFKPEFTVINTWSIPLGDHTAQLAEVAAVEFACKKALKIDGPVLIVTDSFYVAESVNKELPYWQSNGFFNNKKKPLKHVSKWKSIADCIQLKPDIIIIHEKGHQPTASTFHTEGNNLADKLATQGSYVVNAGKRTADGSEFEKRTADGSEFESPKKKAKVE

SEQ ID NO: 7008 - protein, 2092 aa, synthetic construct
MPAAKRVKLDGGDKKYSIGLDIGTNSVGWAVITDEYKVPSKKFKVLGNTDRHSIKKNLIGALLFDSGETAEATRLKRTARRRYTRRKNRICYLQEIFSNEMAKVDDSFFHRLEESFLVEEDKKHERHPIFGNIVDEVAYHEKYPTIYHLRKKLVDSTDKADLRLIYLALAHMIKFRGHFLIEGDLNPDNSDVDKLFIQLVQTYNQLFEENPINASGVDAKAILSARLSKSRRLENLIAQLPGEKKNGLFGNLIALSLGLTPNFKSNFDLAEDAKLQLSKDTYDDDLDNLLAQIGDQYADLFLAAKNLSDAILLSDILRVNTEITKAPLSASMIKRYDEHHQDLTLLKALVRQQLPEKYKEIFFDQSKNGYAGYIDGGASQEEFYKFIKPILEKMDGTEELLVKLNREDLLRKQRTFDNGSIPHQIHLGELHAILRRQEDFYPFLKDNREKIEKILTFRIPYYVGPLARGNSRFAWMTRKSEETITPWNFEEVVDKGASAQSFIERMTNFDKNLPNEKVLPKHSLLYEYFTVYNELTKVKYVTEGMRKPAFLSGEQKKAIVDLLFKTNRKVTVKQLKEDYFKKIECFDSVEISGVEDRFNASLGTYHDLLKIIKDKDFLDNEENEDILEDIVLTLTLFEDREMIEERLKTYAHLFDDKVMKQLKRRRYTGWGRLSRKLINGIRDKQSGKTILDFLKSDGFANRNFMQLIHDDSLTFKEDIQKAQVSGQGDSLHEHIANLAGSPAIKKGILQTVKVVDELVKVMGRHKPENIVIEMARENQTTQKGQKNSRERMKRIEEGIKELGSQILKEHPVENTQLQNEKLYLYYLQNGRDMYVDQELDINRLSDYDVDHIVPQSFLKDDSIDNKVLTRSDKARGKSDNVPSEEVVKKMKNYWRQLLNAKLITQRKFDNLTKAERGGLSELDKAGFIKRQLVETRQITKHVAQILDSRMNTKYDENDKLIREVKVITLKSKLVSDFRKDFQFYKVREINNYHHAHDAYLNAVVGTALIKKYPKLESEFVYGDYKVYDVRKMIAKSEQEIGKATAKYFFYSNIMNFFKTEITLANGEIRKRPLIETNGETGEIVWDKGRDFATVRKVLSMPQVNIVKKTEVQTGGFSKESILPKRNSDKLIARKKDWDPKKYGGFDSPTVAYSVLVVAKVEKGKSKKLKSVKELLGITIMERSSFEKNPIDFLEAKGYKEVKKDLIIKLPKYSLFELENGRKRMLASAGELQKGNELALPSKYVNFLYLASHYEKLKGSPEDNEQKQLFVEQHKHYLDEIIEQISEFSKRVILADANLDKVLSAYNKHRDKPIREQAENIIHLFTLTNLGAPAAFKYFDTTIDRKRYTSTKEVLDATLIHQSITGLYETRIDLSQLGGDGGGGGGGSPAPGGVLNLEEEYRLHEKPVPSSIDPSWLQLFPTVWAERAGMGLANQVPPVVVELRSGASPVAVRQYPMSKEAREGIRPHIQRFLDLGVLVPCQSPWNTPLLPVKKPGTNDYRPVQDLREINKRVQDIHPTVPNPYNLLSSLPPSHTWYSVLDLKDAFFCLKLHPNSQPLFAFEWRDPEKGNTGQLTWTRLPQGFKNSPTLFNEALHRDLAPFRALNPQVVLLQYVDDLLVAAPTYRDCKEGTQKLLQELSKLGYRVSAKKAQLCQKEVTYLGYLLKEGKRWLTPARKATVMKIPPPTTPRQVREFLGKAGFCRLFIPGFASLAAPLYPLTKPSIPFIWTEEHQKAFDRIKEALLSAPALALPDLTKPFTLYVDERAGVARGVLTQTLGPWRRPVAYLSKKLDPVASGWPTCLKAVAAVALLLKDADKLTLGQNVTVIASHSLESIVRQPPDRWMTNARMTHYQSLLLNERVSFAPPAVLNPATLLPVESEATPVHRCSEILAEETGTRRDLKDQPLPGVPAWYTDGSSFIAEGKRRAGAAIVDGKRTVWASSLPEGTSAQKAELVALTQALRLAEGKDINIYTDSRYAFATAHIHGAIYKQRGWLTSAGKDIKNKEEILALLEAIHLPKRVAIIHCPGHQKGNDPVATGNRRADEAAKQAALSTRVLAETTKPAGKRTADGSEFEKRTADGSEFESPKKKAKVE

SEQ ID NO: 7009 - protein, 2096 aa, synthetic construct
MPAAKRVKLDGGDKKYSIGLDIGTNSVGWAVITDEYKVPSKKFKVLGNTDRHSIKKNLIGALLFDSGETAEATRLKRTARRRYTRRKNRICYLQEIFSNEMAKVDDSFFHRLEESFLVEEDKKHERHPIFGNIVDEVAYHEKYPTIYHLRKKLVDSTDKADLRLIYLALAHMIKFRGHFLIEGDLNPDNSDVDKLFIQLVQTYNQLFEENPINASGVDAKAILSARLSKSRRLENLIAQLPGEKKNGLFGNLIALSLGLTPNFKSNFDLAEDAKLQLSKDTYDDDLDNLLAQIGDQYADLFLAAKNLSDAILLSDILRVNTEITKAPLSASMIKRYDEHHQDLTLLKALVRQQLPEKYKEIFFDQSKNGYAGYIDGGASQEEFYKFIKPILEKMDGTEELLVKLNREDLLRKQRTFDNGSIPHQIHLGELHAILRRQEDFYPFLKDNREKIEKILTFRIPYYVGPLARGNSRFAWMTRKSEETITPWNFEEVVDKGASAQSFIERMTNFDKNLPNEKVLPKHSLLYEYFTVYNELTKVKYVTEGMRKPAFLSGEQKKAIVDLLFKTNRKVTVKQLKEDYFKKIECFDSVEISGVEDRFNASLGTYHDLLKIIKDKDFLDNEENEDILEDIVLTLTLFEDREMIEERLKTYAHLFDDKVMKQLKRRRYTGWGRLSRKLINGIRDKQSGKTILDFLKSDGFANRNFMQLIHDDSLTFKEDIQKAQVSGQGDSLHEHIANLAGSPAIKKGILQTVKVVDELVKVMGRHKPENIVIEMARENQTTQKGQKNSRERMKRIEEGIKELGSQILKEHPVENTQLQNEKLYLYYLQNGRDMYVDQELDINRLSDYDVDHIVPQSFLKDDSIDNKVLTRSDKARGKSDNVPSEEVVKKMKNYWRQLLNAKLITQRKFDNLTKAERGGLSELDKAGFIKRQLVETRQITKHVAQILDSRMNTKYDENDKLIREVKVITLKSKLVSDFRKDFQFYKVREINNYHHAHDAYLNAVVGTALIKKYPKLESEFVYGDYKVYDVRKMIAKSEQEIGKATAKYFFYSNIMNFFKTEITLANGEIRKRPLIETNGETGEIVWDKGRDFATVRKVLSMPQVNIVKKTEVQTGGFSKESILPKRNSDKLIARKKDWDPKKYGGFDSPTVAYSVLVVAKVEKGKSKKLKSVKELLGITIMERSSFEKNPIDFLEAKGYKEVKKDLIIKLPKYSLFELENGRKRMLASAGELQKGNELALPSKYVNFLYLASHYEKLKGSPEDNEQKQLFVEQHKHYLDEIIEQISEFSKRVILADANLDKVLSAYNKHRDKPIREQAENIIHLFTLTNLGAPAAFKYFDTTIDRKRYTSTKEVLDATLIHQSITGLYETRIDLSQLGGDGGGGGPAPGGSGGTAPLEEEYRLFLEAPIQNVTLLEQWKREIPKVWAEINPPGLASTQAPIHVQLLSTALPVRVRQYPITLEAKRSLRETIRKFRAAGILRPVHSPWNTPLLPVRKSGTSEYRMVQDLREVNKRVETIHPTVPNPYTLLSLLPPDRIWYSVLDLKDAFFCIPLAPESQLIFAFEWADAEEGESGQLTWTRLPQGFKNSPTLFNEALNRDLQGFRLDHPSVSLLQYVDDLLIAADTQAACLSATRDLLMTLAELGYRVSGKKAQLCQEEVTYLGFKIHKGSRSLSNSRTQAILQIPVPKTKRQVREFLGTIGYCRLWIPGFAELAQPLYAATRPGNDPLVWGEKEEEAFQSLKLALTQPPALALPSLDKPFQLFVEETSGAAKGVLTQALGPWKRPVAYLSKRLDPVAAGWPRCLRAIAAAALLTREASKLTFGQDIEITSSHNLESLLRSPPDKWLTNARITQYQVLLLDPPRVRFKQTAALNPATLLPETDDTLPIHHCLDTLDSLTSTRPDLTDQPLAQAEATLFTDGSSYIRDGKRYAGAAVVTLDSVIWAEPLPIGTSAQKAELIALTKALEWSKDKSVNIYTDSRYAFATLHVHGMIYRERGWLTAGGKAIKNAPEILALLTAVWLPKRVAVMHCKGHQKDDAPTSTGNRRADEVAREVAIRPLSTQATISAGKRTADGSEFEKRTADGSEFESPKKKAKVE

SEQ ID NO: 7010 - protein, 2216 aa, synthetic construct
MPAAKRVKLDGGDKKYSIGLDIGTNSVGWAVITDEYKVPSKKFKVLGNTDRHSIKKNLIGALLFDSGETAEATRLKRTARRRYTRRKNRICYLQEIFSNEMAKVDDSFFHRLEESFLVEEDKKHERHPIFGNIVDEVAYHEKYPTIYHLRKKLVDSTDKADLRLIYLALAHMIKFRGHFLIEGDLNPDNSDVDKLFIQLVQTYNQLFEENPINASGVDAKAILSARLSKSRRLENLIAQLPGEKKNGLFGNLIALSLGLTPNFKSNFDLAEDAKLQLSKDTYDDDLDNLLAQIGDQYADLFLAAKNLSDAILLSDILRVNTEITKAPLSASMIKRYDEHHQDLTLLKALVRQQLPEKYKEIFFDQSKNGYAGYIDGGASQEEFYKFIKPILEKMDGTEELLVKLNREDLLRKQRTFDNGSIPHQIHLGELHAILRRQEDFYPFLKDNREKIEKILTFRIPYYVGPLARGNSRFAWMTRKSEETITPWNFEEVVDKGASAQSFIERMTNFDKNLPNEKVLPKHSLLYEYFTVYNELTKVKYVTEGMRKPAFLSGEQKKAIVDLLFKTNRKVTVKQLKEDYFKKIECFDSVEISGVEDRFNASLGTYHDLLKIIKDKDFLDNEENEDILEDIVLTLTLFEDREMIEERLKTYAHLFDDKVMKQLKRRRYTGWGRLSRKLINGIRDKQSGKTILDFLKSDGFANRNFMQLIHDDSLTFKEDIQKAQVSGQGDSLHEHIANLAGSPAIKKGILQTVKVVDELVKVMGRHKPENIVIEMARENQTTQKGQKNSRERMKRIEEGIKELGSQILKEHPVENTQLQNEKLYLYYLQNGRDMYVDQELDINRLSDYDVDHIVPQSFLKDDSIDNKVLTRSDKARGKSDNVPSEEVVKKMKNYWRQLLNAKLITQRKFDNLTKAERGGLSELDKAGFIKRQLVETRQITKHVAQILDSRMNTKYDENDKLIREVKVITLKSKLVSDFRKDFQFYKVREINNYHHAHDAYLNAVVGTALIKKYPKLESEFVYGDYKVYDVRKMIAKSEQEIGKATAKYFFYSNIMNFFKTEITLANGEIRKRPLIETNGETGEIVWDKGRDFATVRKVLSMPQVNIVKKTEVQTGGFSKESILPKRNSDKLIARKKDWDPKKYGGFDSPTVAYSVLVVAKVEKGKSKKLKSVKELLGITIMERSSFEKNPIDFLEAKGYKEVKKDLIIKLPKYSLFELENGRKRMLASAGELQKGNELALPSKYVNFLYLASHYEKLKGSPEDNEQKQLFVEQHKHYLDEIIEQISEFSKRVILADANLDKVLSAYNKHRDKPIREQAENIIHLFTLTNLGAPAAFKYFDTTIDRKRYTSTKEVLDATLIHQSITGLYETRIDLSQLGGDGGGGGPAPGGSGGTLGDQGSRGSDPLPEPRVTLTVEGIPTEFLVNTGAEHSVLTKPMGKMGSKRTVVAGATGSKVYPWTTKRLLKIGQKQVTHSFLVIPECPAPLLGRDLLTKLKAQIQFSTEGPQVTWEDRPAMCLVLNLEEEYRLHEKPVPPSIDPSWLQLFPMVWAEKAGMGLANQVPPVVVELKSDASPVAVRQYPMSKEAREGIRPHIQRFLDLGILVPCQSPWNTPLLPVKKPGTNDYRPVQDLREVNKRVQDIHPTVPNPYNLLSSLPPSHTWYSVLDLKDAFFCLKLHPNSQPLFAFEWRDPEKGNTGQLTWTRLPQGFKNSPTLFDEALHRDLASFRALNPQVVMLQYVDDLLVAAPTYRDCKEGTRRLLQELSKLGYRVSAKKAQLCREEVTYLGYLLKGGKRWLTPARKATVMKIPTPTTPRQVREFLGTAGFCRLWIPGFASLAAPLYPLTREKVPFTWTEAHQEAFGRIKEALLSAPALALPDLTKPFALYVDEKEGVARGVLTQTLGPWRRPVAYLSKKLDPVASGWPTCLKAIAAVALLLKDADKLTLGQNVLVIAPHNLESIVRQPPDRWMTNARMTHYQSLLLNERVSFAPPAILNPATLLPVESDDTPIHICSEILAEETGTRPDLRDQPLPGVPAWYTDGSSFIMDGRRQAGAAIVDNKRTVWASNLPEGTSAQKAELIALTQALRLAEGKSINIYTDSRYAFATAHVHGAIYKQRGLLTSAGKDIKNKEEILALLEAIHLPKRVAIIHCPGHQRGTDPVATGNRKADEAAKQAAQSTRILTETTKNAGKRTADGSEFEKRTADGSEFESPKKKAKVE

SEQ ID NO: 7011 - protein, 2125 aa, synthetic construct
MPAAKRVKLDGGDKKYSIGLDIGTNSVGWAVITDEYKVPSKKFKVLGNTDRHSIKKNLIGALLFDSGETAEATRLKRTARRRYTRRKNRICYLQEIFSNEMAKVDDSFFHRLEESFLVEEDKKHERHPIFGNIVDEVAYHEKYPTIYHLRKKLVDSTDKADLRLIYLALAHMIKFRGHFLIEGDLNPDNSDVDKLFIQLVQTYNQLFEENPINASGVDAKAILSARLSKSRRLENLIAQLPGEKKNGLFGNLIALSLGLTPNFKSNFDLAEDAKLQLSKDTYDDDLDNLLAQIGDQYADLFLAAKNLSDAILLSDILRVNTEITKAPLSASMIKRYDEHHQDLTLLKALVRQQLPEKYKEIFFDQSKNGYAGYIDGGASQEEFYKFIKPILEKMDGTEELLVKLNREDLLRKQRTFDNGSIPHQIHLGELHAILRRQEDFYPFLKDNREKIEKILTFRIPYYVGPLARGNSRFAWMTRKSEETITPWNFEEVVDKGASAQSFIERMTNFDKNLPNEKVLPKHSLLYEYFTVYNELTKVKYVTEGMRKPAFLSGEQKKAIVDLLFKTNRKVTVKQLKEDYFKKIECFDSVEISGVEDRFNASLGTYHDLLKIIKDKDFLDNEENEDILEDIVLTLTLFEDREMIEERLKTYAHLFDDKVMKQLKRRRYTGWGRLSRKLINGIRDKQSGKTILDFLKSDGFANRNFMQLIHDDSLTFKEDIQKAQVSGQGDSLHEHIANLAGSPAIKKGILQTVKVVDELVKVMGRHKPENIVIEMARENQTTQKGQKNSRERMKRIEEGIKELGSQILKEHPVENTQLQNEKLYLYYLQNGRDMYVDQELDINRLSDYDVDHIVPQSFLKDDSIDNKVLTRSDKARGKSDNVPSEEVVKKMKNYWRQLLNAKLITQRKFDNLTKAERGGLSELDKAGFIKRQLVETRQITKHVAQILDSRMNTKYDENDKLIREVKVITLKSKLVSDFRKDFQFYKVREINNYHHAHDAYLNAVVGTALIKKYPKLESEFVYGDYKVYDVRKMIAKSEQEIGKATAKYFFYSNIMNFFKTEITLANGEIRKRPLIETNGETGEIVWDKGRDFATVRKVLSMPQVNIVKKTEVQTGGFSKESILPKRNSDKLIARKKDWDPKKYGGFDSPTVAYSVLVVAKVEKGKSKKLKSVKELLGITIMERSSFEKNPIDFLEAKGYKEVKKDLIIKLPKYSLFELENGRKRMLASAGELQKGNELALPSKYVNFLYLASHYEKLKGSPEDNEQKQLFVEQHKHYLDEIIEQISEFSKRVILADANLDKVLSAYNKHRDKPIREQAENIIHLFTLTNLGAPAAFKYFDTTIDRKRYTSTKEVLDATLIHQSITGLYETRIDLSQLGGDGGGGGPAPGGSGGLLGRDLLTKLKAQIQFSTEGPQVTWEDRPAMCLVLNLEEEYRLHEKPVPPSIDPSWLQLFPMVWAEKAGMGLANQVPPVVVELKSDASPVAVRQYPMSKEAREGIRPHIQRFLDLGILVPCQSPWNTPLLPVKKPGTNDYRPVQDLREVNKRVQDIHPTVPNPYNLLSSLPPSHTWYSVLDLKDAFFCLKLHPNSQPLFAFEWRDPEKGNTGQLTWTRLPQGFKNSPTLFNEALHRDLASFRALNPQVVMLQYVDDLLVAAPTYRDCKEGTRRLLQELSKLGYRVSAKKAQLCREEVTYLGYLLKGGKRWLTPARKATVMKIPTPTTPRQVREFLGTAGFCRLWIPGFASLAAPLYPLTRPKVPFTWTEAHQEAFGRIKEALLSAPALALPDLTKPFALYVDEKEGVARGVLTQTLGPWRRPVAYLSKKLDPVASGWPTCLKAIAAVALLLKDADKLTLGQNVLVIAPHNLESIVRQPPDRWMTNARMTHYQSLLLNERVSFAPPAILNPATLLPVESDDTPIHICSEILAEETGTRPDLRDQPLPGVPAWYTDGSSFIMDGRRQAGAAIVDNKRTVWASNLPEGTSAQKAELIALTQALRLAEGKSINIYTDSRYAFATAHVHGAIYKQRGWLTSAGKDIKNKEEILALLEAIHLPKRVAIIHCPGHQRGTDPVATGNRKADEAAKQAAQSTRILTETTKNAGKRTADGSEFEKRTADGSEFESPKKKAKVE

SEQ ID NO: 7012 - protein, 2094 aa, synthetic construct
MPAAKRVKLDGGDKKYSIGLDIGTNSVGWAVITDEYKVPSKKFKVLGNTDRHSIKKNLIGALLFDSGETAEATRLKRTARRRYTRRKNRICYLQEIFSNEMAKVDDSFFHRLEESFLVEEDKKHERHPIFGNIVDEVAYHEKYPTIYHLRKKLVDSTDKADLRLIYLALAHMIKFRGHFLIEGDLNPDNSDVDKLFIQLVQTYNQLFEENPINASGVDAKAILSARLSKSRRLENLIAQLPGEKKNGLFGNLIALSLGLTPNFKSNFDLAEDAKLQLSKDTYDDDLDNLLAQIGDQYADLFLAAKNLSDAILLSDILRVNTEITKAPLSASMIKRYDEHHQDLTLLKALVRQQLPEKYKEIFFDQSKNGYAGYIDGGASQEEFYKFIKPILEKMDGTEELLVKLNREDLLRKQRTFDNGSIPHQIHLGELHAILRRQEDFYPFLKDNREKIEKILTFRIPYYVGPLARGNSRFAWMTRKSEETITPWNFEEVVDKGASAQSFIERMTNFDKNLPNEKVLPKHSLLYEYFTVYNELTKVKYVTEGMRKPAFLSGEQKKAIVDLLFKTNRKVTVKQLKEDYFKKIECFDSVEISGVEDRFNASLGTYHDLLKIIKDKDFLDNEENEDILEDIVLTLTLFEDREMIEERLKTYAHLFDDKVMKQLKRRRYTGWGRLSRKLINGIRDKQSGKTILDFLKSDGFANRNFMQLIHDDSLTFKEDIQKAQVSGQGDSLHEHIANLAGSPAIKKGILQTVKVVDELVKVMGRHKPENIVIEMARENQTTQKGQKNSRERMKRIEEGIKELGSQILKEHPVENTQLQNEKLYLYYLQNGRDMYVDQELDINRLSDYDVDHIVPQSFLKDDSIDNKVLTRSDKARGKSDNVPSEEVVKKMKNYWRQLLNAKLITQRKFDNLTKAERGGLSELDKAGFIKRQLVETRQITKHVAQILDSRMNTKYDENDKLIREVKVITLKSKLVSDFRKDFQFYKVREINNYHHAHDAYLNAVVGTALIKKYPKLESEFVYGDYKVYDVRKMIAKSEQEIGKATAKYFFYSNIMNFFKTEITLANGEIRKRPLIETNGETGEIVWDKGRDFATVRKVLSMPQVNIVKKTEVQTGGFSKESILPKRNSDKLIARKKDWDPKKYGGFDSPTVAYSVLVVAKVEKGKSKKLKSVKELLGITIMERSSFEKNPIDFLEAKGYKEVKKDLIIKLPKYSLFELENGRKRMLASAGELQKGNELALPSKYVNFLYLASHYEKLKGSPEDNEQKQLFVEQHKHYLDEIIEQISEFSKRVILADANLDKVLSAYNKHRDKPIREQAENIIHLFTLTNLGAPAAFKYFDTTIDRKRYTSTKEVLDATLIHQSITGLYETRIDLSQLGGDGGGGGPAPGGSGGTLGIEDEYRLHETSTEPDVSLGSTWLSDFPQAWAETGGMGLAVRQAPLIIPLKATSTPVSIQQYPMSHEARLGIKPHIQRLLDQGILVPCQSPWNTPLLPVKKPGTNDYRPVQDLREVNKRVEDIHPTVPNPYNLLSGLPPSHQWYTVLDLKDAFFCLRLHPTSQPLFAFEWRDPGMGISGQLTWTRLPQGFKNSPTLFNEALHRDLADFRIQHPDLILLQYVDDILLAATSELDCQQGTRALLQTLGDLGYRASAKKAQICQKQVKYLGYLLREGQRWLTEARKETVMGQPVPKTPRQLREFLGTAGFCRLWIPGFAEMAAPLYPLTKPGTLFSWGPDQQKAYQEIKQALLTAPALGLPDLTKPFELFVDEKQGYAKGVLTQKLGPWRRPVAYLSKKLDPVAAGWPPCLRMVAAIAVLTKDAGKLTMGQPLVILAPHAVEALVKQPPDRWLSNARMTHYQAMLLDTDRVQFGPVVALNPATLLPLPEEGAPHDCLEILAETHGTRPDLTDQPIPDADHTWYTDGSSFLQEGQRKAGAAVTTETEVIWAGALPAGTSAQRAELIALTQALKMAEGKRLNVYTDSRYAFATAHIHGEIYRRRGWLTSEGREIKNKSEILALLKALFLPKRLSIIHCLGHQKGDSAEARGNRLADQAAREAAIKTPPDTSTLLAGKRTADGSEFEKRTADGSEFESPKKKAKVE

SEQ ID NO: 7013 - protein, 2086 aa, synthetic construct
MPAAKRVKLDGGDKKYSIGLDIGTNSVGWAVITDEYKVPSKKFKVLGNTDRHSIKKNLIGALLFDSGETAEATRLKRTARRRYTRRKNRICYLQEIFSNEMAKVDDSFFHRLEESFLVEEDKKHERHPIFGNIVDEVAYHEKYPTIYHLRKKLVDSTDKADLRLIYLALAHMIKFRGHFLIEGDLNPDNSDVDKLFIQLVQTYNQLFEENPINASGVDAKAILSARLSKSRRLENLIAQLPGEKKNGLFGNLIALSLGLTPNFKSNFDLAEDAKLQLSKDTYDDDLDNLLAQIGDQYADLFLAAKNLSDAILLSDILRVNTEITKAPLSASMIKRYDEHHQDLTLLKALVRQQLPEKYKEIFFDQSKNGYAGYIDGGASQEEFYKFIKPILEKMDGTEELLVKLNREDLLRKQRTFDNGSIPHQIHLGELHAILRRQEDFYPFLKDNREKIEKILTFRIPYYVGPLARGNSRFAWMTRKSEETITPWNFEEVVDKGASAQSFIERMTNFDKNLPNEKVLPKHSLLYEYFTVYNELTKVKYVTEGMRKPAFLSGEQKKAIVDLLFKTNRKVTVKQLKEDYFKKIECFDSVEISGVEDRFNASLGTYHDLLKIIKDKDFLDNEENEDILEDIVLTLTLFEDREMIEERLKTYAHLFDDKVMKQLKRRRYTGWGRLSRKLINGIRDKQSGKTILDFLKSDGFANRNFMQLIHDDSLTFKEDIQKAQVSGQGDSLHEHIANLAGSPAIKKGILQTVKVVDELVKVMGRHKPENIVIEMARENQTTQKGQKNSRERMKRIEEGIKELGSQILKEHPVENTQLQNEKLYLYYLQNGRDMYVDQELDINRLSDYDVDHIVPQSFLKDDSIDNKVLTRSDKARGKSDNVPSEEVVKKMKNYWRQLLNAKLITQRKFDNLTKAERGGLSELDKAGFIKRQLVETRQITKHVAQILDSRMNTKYDENDKLIREVKVITLKSKLVSDFRKDFQFYKVREINNYHHAHDAYLNAVVGTALIKKYPKLESEFVYGDYKVYDVRKMIAKSEQEIGKATAKYFFYSNIMNFFKTEITLANGEIRKRPLIETNGETGEIVWDKGRDFATVRKVLSMPQVNIVKKTEVQTGGFSKESILPKRNSDKLIARKKDWDPKKYGGFDSPTVAYSVLVVAKVEKGKSKKLKSVKELLGITIMERSSFEKNPIDFLEAKGYKEVKKDLIIKLPKYSLFELENGRKRMLASAGELQKGNELALPSKYVNFLYLASHYEKLKGSPEDNEQKQLFVEQHKHYLDEIIEQISEFSKRVILADANLDKVLSAYNKHRDKPIREQAENIIHLFTLTNLGAPAAFKYFDTTIDRKRYTSTKEVLDATLIHQSITGLYETRIDLSQLGGDGGGGGPAPGGSGGLDDEYRLYSPLVKPDQNIQFWLEQFPQAWAETAGMGLAKQVPPQVIQLKASATPVSVRQYPLSKEAQEGIRPHVQRLIQQGILVPVQSPWNTPLLPVRKPGTNDYRPVQDLREVNKRVQDIHPTVPNPYNLLCALPPQRSWYTVLDLKDAFFCLRLHPTSQPLFAFEWRDPGTGRTGQLTWTRLPQGFKNSPTIFNEALHRDLANFRIQHPQVTLLQYVDDLLLAGATKQDCLEGTKALLLELSDLGYRASAKKAQICRREVTYLGYSLRDGQRWLTEARKKTVVQIPAPTTAKQVREFLGKAGFCRLFIPGFATLAAPLYPLTKPKGEFSWAPEHQKAFDAIKKALLSAPALALPDVTKPFTLYVDERKGVARGVLTQTLGPWRRPVAYLSKKLDPVASGWPVCLKAIAAVAILVKDADKLTLGQNITVIAPHALENIVRQPPDRWMTNARMTHYQSLLLTERVTFAPPAALNPATLLPEETDEPVTHDCHQLLIEETGVRKDLTDIPLTGEVLTWFTDGSSYVVEGKRMAGAAVVDGTRTIWASSLPEGTSAQKAELMALTQALRLAEGKSINIYTDSRYAFATAHVHGAIYKQRGWLTSAGREIKNKEEILSLLEALHLPKRLAIIHCPGHQKAKDPISRGNQMADRVAKQAAQGVNLLPAGKRTADGSEFEKRTADGSEFESPKKKAKVE

SEQ ID NO: 7014 - protein, 2088 aa, synthetic construct
MPAAKRVKLDGGDKKYSIGLDIGTNSVGWAVITDEYKVPSKKFKVLGNTDRHSIKKNLIGALLFDSGETAEATRLKRTARRRYTRRKNRICYLQEIFSNEMAKVDDSFFHRLEESFLVEEDKKHERHPIFGNIVDEVAYHEKYPTIYHLRKKLVDSTDKADLRLIYLALAHMIKFRGHFLIEGDLNPDNSDVDKLFIQLVQTYNQLFEENPINASGVDAKAILSARLSKSRRLENLIAQLPGEKKNGLFGNLIALSLGLTPNFKSNFDLAEDAKLQLSKDTYDDDLDNLLAQIGDQYADLFLAAKNLSDAILLSDILRVNTEITKAPLSASMIKRYDEHHQDLTLLKALVRQQLPEKYKEIFFDQSKNGYAGYIDGGASQEEFYKFIKPILEKMDGTEELLVKLNREDLLRKQRTFDNGSIPHQIHLGELHAILRRQEDFYPFLKDNREKIEKILTFRIPYYVGPLARGNSRFAWMTRKSEETITPWNFEEVVDKGASAQSFIERMTNFDKNLPNEKVLPKHSLLYEYFTVYNELTKVKYVTEGMRKPAFLSGEQKKAIVDLLFKTNRKVTVKQLKEDYFKKIECFDSVEISGVEDRFNASLGTYHDLLKIIKDKDFLDNEENEDILEDIVLTLTLFEDREMIEERLKTYAHLFDDKVMKQLKRRRYTGWGRLSRKLINGIRDKQSGKTILDFLKSDGFANRNFMQLIHDDSLTFKEDIQKAQVSGQGDSLHEHIANLAGSPAIKKGILQTVKVVDELVKVMGRHKPENIVIEMARENQTTQKGQKNSRERMKRIEEGIKELGSQILKEHPVENTQLQNEKLYLYYLQNGRDMYVDQELDINRLSDYDVDHIVPQSFLKDDSIDNKVLTRSDKARGKSDNVPSEEVVKKMKNYWRQLLNAKLITQRKFDNLTKAERGGLSELDKAGFIKRQLVETRQITKHVAQILDSRMNTKYDENDKLIREVKVITLKSKLVSDFRKDFQFYKVREINNYHHAHDAYLNAVVGTALIKKYPKLESEFVYGDYKVYDVRKMIAKSEQEIGKATAKYFFYSNIMNFFKTEITLANGEIRKRPLIETNGETGEIVWDKGRDFATVRKVLSMPQVNIVKKTEVQTGGFSKESILPKRNSDKLIARKKDWDPKKYGGFDSPTVAYSVLVVAKVEKGKSKKLKSVKELLGITIMERSSFEKNPIDFLEAKGYKEVKKDLIIKLPKYSLFELENGRKRMLASAGELQKGNELALPSKYVNFLYLASHYEKLKGSPEDNEQKQLFVEQHKHYLDEIIEQISEFSKRVILADANLDKVLSAYNKHRDKPIREQAENIIHLFTLTNLGAPAAFKYFDTTIDRKRYTSTKEVLDATLIHQSITGLYETRIDLSQLGGDGGGGGPAPGGSGGTLQLDDEYRLYSPLVKPDQNIQFWLEQFPQAWAETAGMGLAKQVPPQVIQLKASATPVSVRQYPLSKEAQEGIRPHVQRLIQQGILVPVQSPWNTPLLPVRKPGTNDYRPVQDLREVNKRVQDIHPTVPNPYNLLCALPPQRSWYTVLDLKDAFFCLRLHPTSQPLFAFEWRDPGTGRTGQLTWTRLPQGFKNSPTIFDEALHRDLANFRIQHPQVTLLQYVDDLLLAGATKQDCLEGTKALLLELSDLGYRASAKKAQICRREVTYLGYSLRDGQRWLTEARKKTVVQIPAPTTAKQVREFLGTAGFCRLWIPGFATLAAPLYPLTKEKGEFSWAPEHQKAFDAIKKALLSAPALALPDVTKPFTLYVDERKGVARGVLTQTLGPWRRPVAYLSKKLDPVASGWPVCLKAIAAVAILVKDADKLTLGQNITVIAPHALENIVRQPPDRWMTNARMTHYQSLLLTERVTFAPPAALNPATLLPEETDEPVTHDCHQLLIEETGVRKDLTDIPLTGEVLTWFTDGSSYVVEGKRMAGAAVVDGTRTIWASSLPEGTSAQKAELMALTQALRLAEGKSINIYTDSRYAFATAHVHGAIYKQRGLLTSAGREIKNKEEILSLLEALHLPKRLAIIHCPGHQKAKDPISRGNQMADRVAKQAAQGVNLLAGKRTADGSEFEKRTADGSEFESPKKKAKVE

SEQ ID NO: 7015 - protein, 2086 aa, synthetic construct; identical to SEQ ID NO: 7013

SEQ ID NO: 7016 - protein, 2085 aa, synthetic construct
MPAAKRVKLDGGDKKYSIGLDIGTNSVGWAVITDEYKVPSKKFKVLGNTDRHSIKKNLIGALLFDSGETAEATRLKRTARRRYTRRKNRICYLQEIFSNEMAKVDDSFFHRLEESFLVEEDKKHERHPIFGNIVDEVAYHEKYPTIYHLRKKLVDSTDKADLRLIYLALAHMIKFRGHFLIEGDLNPDNSDVDKLFIQLVQTYNQLFEENPINASGVDAKAILSARLSKSRRLENLIAQLPGEKKNGLFGNLIALSLGLTPNFKSNFDLAEDAKLQLSKDTYDDDLDNLLAQIGDQYADLFLAAKNLSDAILLSDILRVNTEITKAPLSASMIKRYDEHHQDLTLLKALVRQQLPEKYKEIFFDQSKNGYAGYIDGGASQEEFYKFIKPILEKMDGTEELLVKLNREDLLRKQRTFDNGSIPHQIHLGELHAILRRQEDFYPFLKDNREKIEKILTFRIPYYVGPLARGNSRFAWMTRKSEETITPWNFEEVVDKGASAQSFIERMTNFDKNLPNEKVLPKHSLLYEYFTVYNELTKVKYVTEGMRKPAFLSGEQKKAIVDLLFKTNRKVTVKQLKEDYFKKIECFDSVEISGVEDRFNASLGTYHDLLKIIKDKDFLDNEENEDILEDIVLTLTLFEDREMIEERLKTYAHLFDDKVMKQLKRRRYTGWGRLSRKLINGIRDKQSGKTILDFLKSDGFANRNFMQLIHDDSLTFKEDIQKAQVSGQGDSLHEHIANLAGSPAIKKGILQTVKVVDELVKVMGRHKPENIVIEMARENQTTQKGQKNSRERMKRIEEGIKELGSQILKEHPVENTQLQNEKLYLYYLQNGRDMYVDQELDINRLSDYDVDHIVPQSFLKDDSIDNKVLTRSDKARGKSDNVPSEEVVKKMKNYWRQLLNAKLITQRKFDNLTKAERGGLSELDKAGFIKRQLVETRQITKHVAQILDSRMNTKYDENDKLIREVKVITLKSKLVSDFRKDFQFYKVREINNYHHAHDAYLNAVVGTALIKKYPKLESEFVYGDYKVYDVRKMIAKSEQEIGKATAKYFFYSNIMNFFKTEITLANGEIRKRPLIETNGETGEIVWDKGRDFATVRKVLSMPQVNIVKKTEVQTGGFSKESILPKRNSDKLIARKKDWDPKKYGGFDSPTVAYSVLVVAKVEKGKSKKLKSVKELLGITIMERSSFEKNPIDFLEAKGYKEVKKDLIIKLPKYSLFELENGRKRMLASAGELQKGNELALPSKYVNFLYLASHYEKLKGSPEDNEQKQLFVEQHKHYLDEIIEQISEFSKRVILADANLDKVLSAYNKHRDKPIREQAENIIHLFTLTNLGAPAAFKYFDTTIDRKRYTSTKEVLDATLIHQSITGLYETRIDLSQLGGDGGGGGPAPGGSGGIPWLMKKPLQLTTLVPLQEYEERLLKQTMLTGSYKEKLQSLFLKYDALWQHWENQVGHRRIKPHHIATGTVNPRPQKQYPINPKAKASIQTVINDLLKQGVLIQQNSIMNTPVYPVPKPDGKWRMVLDYREVNKTIPLIAAQNQHSAGILSSIFRGKYKTTLDLSNGFWAHSITPESYWLTAFTWLGQQYCWTRLPQGFLNSPALFNADVVDLLKEVPNVQVYVDDIYISHDDPREHLEQLEKVFSLLLNAGYVVSLKKSEIAQHEVEFLGFNITKEGRGLTETFKQKLLNITPPRDLKQLQSILGLLNFARNFIPNFSELVKPLYNIIATAPGKYITWTTDNSQQLQNIISMLNSAENLEERNPEVRLIMKVNTSPSAGYIRFYNEFAKRPIMYLNYVYTKAEVKFTNTEKLLTTIHKGLIKALDLGMGQEILVYSPIVSMTKIQKTPLPERKALPIRWITWMSYLEDPRIQFHYDKTLPELQQVPTVTDDIIAKIKHPSEFSMVFYTDGSAIKHPNVNKSHNAGMGIAQVQFKPEFTVINTWSIPLGDHTAQLAEVAAVEFACKKALKIDGPVLIVTDSFYVAESVNKELPYWQSNGFFNNKKKPLKHVSKWKSIADCIQLKPDIIIIHEKGHQPTASTFHTEGNNLADKLATQGSYVVNAGKRTADGSEFEKRTADGSEFESPKKKAKVE

SEQ ID NO: 7017 - protein, 2092 aa, synthetic construct
MPAAKRVKLDGGDKKYSIGLDIGTNSVGWAVITDEYKVPSKKFKVLGNTDRHSIKKNLIGALLFDSGETAEATRLKRTARRRYTRRKNRICYLQEIFSNEMAKVDDSFFHRLEESFLVEEDKKHERHPIFGNIVDEVAYHEKYPTIYHLRKKLVDSTDKADLRLIYLALAHMIKFRGHFLIEGDLNPDNSDVDKLFIQLVQTYNQLFEENPINASGVDAKAILSARLSKSRRLENLIAQLPGEKKNGLFGNLIALSLGLTPNFKSNFDLAEDAKLQLSKDTYDDDLDNLLAQIGDQYADLFLAAKNLSDAILLSDILRVNTEITKAPLSASMIKRYDEHHQDLTLLKALVRQQLPEKYKEIFFDQSKNGYAGYIDGGASQEEFYKFIKPILEKMDGTEELLVKLNREDLLRKQRTFDNGSIPHQIHLGELHAILRRQEDFYPFLKDNREKIEKILTFRIPYYVGPLARGNSRFAWMTRKSEETITPWNFEEVVDKGASAQSFIERMTNFDKNLPNEKVLPKHSLLYEYFTVYNELTKVKYVTEGMRKPAFLSGEQKKAIVDLLFKTNRKVTVKQLKEDYFKKIECFDSVEISGVEDRFNASLGTYHDLLKIIKDKDFLDNEENEDILEDIVLTLTLFEDREMIEERLKTYAHLFDDKVMKQLKRRRYTGWGRLSRKLINGIRDKQSGKTILDFLKSDGFANRNFMQLIHDDSLTFKEDIQKAQVSGQGDSLHEHIANLAGSPAIKKGILQTVKVVDELVKVMGRHKPENIVIEMARENQTTQKGQKNSRERMKRIEEGIKELGSQILKEHPVENTQLQNEKLYLYYLQNGRDMYVDQELDINRLSDYDVDHIVPQSFLKDDSIDNKVLTRSDKARGKSDNVPSEEVVKKMKNYWRQLLNAKLITQRKFDNLTKAERGGLSELDKAGFIKRQLVETRQITKHVAQILDSRMNTKYDENDKLIREVKVITLKSKLVSDFRKDFQFYKVREINNYHHAHDAYLNAVVGTALIKKYPKLESEFVYGDYKVYDVRKMIAKSEQEIGKATAKYFFYSNIMNFFKTEITLANGEIRKRPLIETNGETGEIVWDKGRDFATVRKVLSMPQVNIVKKTEVQTGGFSKESILPKRNSDKLIARKKDWDPKKYGGFDSPTVAYSVLVVAKVEKGKSKKLKSVKELLGITIMERSSFEKNPIDFLEAKGYKEVKKDLIIKLPKYSLFELENGRKRMLASAGELQKGNELALPSKYVNFLYLASHYEKLKGSPEDNEQKQLFVEQHKHYLDEIIEQISEFSKRVILADANLDKVLSAYNKHRDKPIREQAENIIHLFTLTNLGAPAAFKYFDTTIDRKRYTSTKEVLDATLIHQSITGLYETRIDLSQLGGDGGGGGPAPGGSGGVLNLEEEYRLHEKPVPSSIDPSWLQLFPTVWAERAGMGLANQVPPVVVELRSGASPVAVRQYPMSKEAREGIRPHIQRFLDLGVLVPCQSPWNTPLLPVKKPGTNDYRPVQDLREINKRVQDIHPTVPNPYNLLSSLPPSHTWYSVLDLKDAFFCLKLHPNSQPLFAFEWRDPEKGNTGQLTWTRLPQGFKNSPTLFNEALHRDLAPFRALNPQVVLLQYVDDLLVAAPTYRDCKEGTQKLLQELSKLGYRVSAKKAQLCQKEVTYLGYLLKEGKRWLTPARKATVMKIPPPTTPRQVREFLGTAGFCRLWIPGFASLAAPLYPLTKPSIPFIWTEEHQKAFDRIKEALLSAPALALPDLTKPFTLYVDERAGVARGVLTQTLGPWRRPVAYLSKKLDPVASGWPTCLKAVAAVALLLKDADKLTLGQNVTVIASHSLESIVRQPPDRWMTNARMTHYQSLLLNERVSFAPPAVLNPATLLPVESEATPVHRCSEILAEETGTRRDLKDQPLPGVPAWYTDGSSFIAEGKRRAGAAIVDGKRTVWASSLPEGTSAQKAELVALTQALRLAEGKDINIYTDSRYAFATAHIHGAIYKQRGWLTSAGKDIKNKEEILALLEAIHLPKRVAIIHCPGHQKGNDPVATGNRRADEAAKQAALSTRVLAETTKPAGKRTADGSEFEKRTADGSEFESPKKKAKVE

SEQ ID NO: 7018 - protein, 2096 aa, synthetic construct
MPAAKRVKLDGGDKKYSIGLDIGTNSVGWAVITDEYKVPSKKFKVLGNTDRHSIKKNLIGALLFDSGETAEATRLKRTARRRYTRRKNRICYLQEIFSNEMAKVDDSFFHRLEESFLVEEDKKHERHPIFGNIVDEVAYHEKYPTIYHLRKKLVDSTDKADLRLIYLALAHMIKFRGHFLIEGDLNPDNSDVDKLFIQLVQTYNQLFEENPINASGVDAKAILSARLSKSRRLENLIAQLPGEKKNGLFGNLIALSLGLTPNFKSNFDLAEDAKLQLSKDTYDDDLDNLLAQIGDQYADLFLAAKNLSDAILLSDILRVNTEITKAPLSASMIKRYDEHHQDLTLLKALVRQQLPEKYKEIFFDQSKNGYAGYIDGGASQEEFYKFIKPILEKMDGTEELLVKLNREDLLRKQRTFDNGSIPHQIHLGELHAILRRQEDFYPFLKDNREKIEKILTFRIPYYVGPLARGNSRFAWMTRKSEETITPWNFEEVVDKGASAQSFIERMTNFDKNLPNEKVLPKHSLLYEYFTVYNELTKVKYVTEGMRKPAFLSGEQKKAIVDLLFKTNRKVTVKQLKEDYFKKIECFDSVEISGVEDRFNASLGTYHDLLKIIKDKDFLDNEENEDILEDIVLTLTLFEDREMIEERLKTYAHLFDDKVMKQLKRRRYTGWGRLSRKLINGIRDKQSGKTILDFLKSDGFANRNFMQLIHDDSLTFKEDIQKAQVSGQGDSLHEHIANLAGSPAIKKGILQTVKVVDELVKVMGRHKPENIVIEMARENQTTQKGQKNSRERMKRIEEGIKELGSQILKEHPVENTQLQNEKLYLYYLQNGRDMYVDQELDINRLSDYDVDHIVPQSFLKDDSIDNKVLTRSDKARGKSDNVPSEEVVKKMKNYWRQLLNAKLITQRKFDNLTKAERGGLSELDKAGFIKRQLVETRQITKHVAQILDSRMNTKYDENDKLIREVKVITLKSKLVSDFRKDFQFYKVREINNYHHAHDAYLNAVVGTALIKKYPKLESEFVYGDYKVYDVRKMIAKSEQEIGKATAKYFFYSNIMNFFKTEITLANGEIRKRPLIETNGETGEIVWDKGRDFATVRKVLSMPQVNIVKKTEVQTGGFSKESILPKRNSDKLIARKKDWDPKKYGGFDSPTVAYSVLVVAKVEKGKSKKLKSVKELLGITIMERSSFEKNPIDFLEAKGYKEVKKDLIIKLPKYSLFELENGRKRMLASAGELQKGNELALPSKYVNFLYLASHYEKLKGSPEDNEQKQLFVEQHKHYLDEIIEQISEFSKRVILADANLDKVLSAYNKHRDKPIREQAENIIHLFTLTNLGAPAAFKYFDTTIDRKRYTSTKEVLDATLIHQSITGLYETRIDLSQLGGDGGPAPGGSGGGGGTAPLEEEYRLFLEAPIQNVTLLEQWKREIPKVWAEINPPGLASTQAPIHVQLLSTALPVRVRQYPITLEAKRSLRETIRKFRAAGILRPVHSPWNTPLLPVRKSGTSEYRMVQDLREVNKRVETIHPTVPNPYTLLSLLPPDRIWYSVLDLKDAFFCIPLAPESQLIFAFEWADAEEGESGQLTWTRLPQGFKNSPTLFNEALNRDLQGFRLDHPSVSLLQYVDDLLIAADTQAACLSATRDLLMTLAELGYRVSGKKAQLCQEEVTYLGFKIHKGSRSLSNSRTQAILQIPVPKTKRQVREFLGTIGYCRLWIPGFAELAQPLYAATRPGNDPLVWGEKEEEAFQSLKLALTQPPALALPSLDKPFQLFVEETSGAAKGVLTQALGPWKRPVAYLSKRLDPVAAGWPRCLRAIAAAALLTREASKLTFGQDIEITSSHNLESLLRSPPDKWLTNARITQYQVLLLDPPRVRFKQTAALNPATLLPETDDTLPIHHCLDTLDSLTSTRPDLTDQPLAQAEATLFTDGSSYIRDGKRYAGAAVVTLDSVIWAEPLPIGTSAQKAELIALTKALEWSKDKSVNIYTDSRYAFATLHVHGMIYRERGWLTAGGKAIKNAPEILALLTAVWLPKRVAVMHCKGHQKDDAPTSTGNRRADEVAREVAIRPLSTQATISAGKRTADGSEFEKRTADGSEFESPKKKAKVE

SEQ ID NO: 7019 - protein, 2092 aa, synthetic construct
MPAAKRVKLDGGDKKYSIGLDIGTNSVGWAVITDEYKVPSKKFKVLGNTDRHSIKKNLIGALLFDSGETAEATRLKRTARRRYTRRKNRICYLQEIFSNEMAKVDDSFFHRLEESFLVEEDKKHERHPIFGNIVDEVAYHEKYPTIYHLRKKLVDSTDKADLRLIYLALAHMIKFRGHFLIEGDLNPDNSDVDKLFIQLVQTYNQLFEENPINASGVDAKAILSARLSKSRRLENLIAQLPGEKKNGLFGNLIALSLGLTPNFKSNFDLAEDAKLQLSKDTYDDDLDNLLAQIGDQYADLFLAAKNLSDAILLSDILRVNTEITKAPLSASMIKRYDEHHQDLTLLKALVRQQLPEKYKEIFFDQSKNGYAGYIDGGASQEEFYKFIKPILEKMDGTEELLVKLNREDLLRKQRTFDNGSIPHQIHLGELHAILRRQEDFYPFLKDNREKIEKILTFRIPYYVGPLARGNSRFAWMTRKSEETITPWNFEEVVDKGASAQSFIERMTNFDKNLPNEKVLPKHSLLYEYFTVYNELTKVKYVTEGMRKPAFLSGEQKKAIVDLLFKTNRKVTVKQLKEDYFKKIECFDSVEISGVEDRFNASLGTYHDLLKIIKDKDFLDNEENEDILEDIVLTLTLFEDREMIEERLKTYAHLFDDKVMKQLKRRRYTGWGRLSRKLINGIRDKQSGKTILDFLKSDGFANRNFMQLIHDDSLTFKEDIQKAQVSGQGDSLHEHIANLAGSPAIKKGILQTVKVVDELVKVMGRHKPENIVIEMARENQTTQKGQKNSRERMKRIEEGIKELGSQILKEHPVENTQLQNEKLYLYYLQNGRDMYVDQELDINRLSDYDVDHIVPQSFLKDDSIDNKVLTRSDKARGKSDNVPSEEVVKKMKNYWRQLLNAKLITQRKFDNLTKAERGGLSELDKAGFIKRQLVETRQITKHVAQILDSRMNTKYDENDKLIREVKVITLKSKLVSDFRKDFQFYKVREINNYHHAHDAYLNAVVGTALIKKYPKLESEFVYGDYKVYDVRKMIAKSEQEIGKATAKYFFYSNIMNFFKTEITLANGEIRKRPLIETNGETGEIVWDKGRDFATVRKVLSMPQVNIVKKTEVQTGGFSKESILPKRNSDKLIARKKDWDPKKYGGFDSPTVAYSVLVVAKVEKGKSKKLKSVKELLGITIMERSSFEKNPIDFLEAKGYKEVKKDLIIKLPKYSLFELENGRKRMLASAGELQKGNELALPSKYVNFLYLASHYEKLKGSPEDNEQKQLFVEQHKHYLDEIIEQISEFSKRVILADANLDKVLSAYNKHRDKPIREQAENIIHLFTLTNLGAPAAFKYFDTTIDRKRYTSTKEVLDATLIHQSITGLYETRIDLSQLGGDGGPAPGGSGGGGGVLNLEEEYRLHEKPVPSSIDPSWLQLFPTVWAERAGMGLANQVPPVVVELRSGASPVAVRQYPMSKEAREGIRPHIQKFLDLGVLVPCRSPWNTPLLPVKKPGTNDYRPVQDLREINKRVQDIHPTVPNPYNLLSSLPPSYTWYSVLDLKDAFFCLRLHPNSQPLFAFEWKDPEKGNTGQLTWTRLPQGFKNSPTLFNEALHRDLAPFRALNPQVVLLQYVDDLLVAAPTYEDCKKGTQKLLQELSKLGYRVSAKKAQLCQREVTYLGYLLKEGKRWLTPARKATVMKIPVPTTPRQVREFLGKAGFCRLFIPGFASLAAPLYPLTKPSIPFIWTEEHQQAFDHIKKALLSAPALALPDLTKPFTLYIDERAGVARGVLTQTLGPWRRPVAYLSKKLDPVASGWPTCLKAVAAVALLLKDADKLTLGQNVTVIASHSLESIVRQPPDRWMTNARMTHYQSLLLNERVSFAPPAVLNPATLLPVESEATPVHRCSEILAEETGTRRDLEDQPLPGVPTWYTDGSSFITEGKRRAGAPIVDGKRTVWASSLPEGTSAQKAELVALTQALRLAEGKNINIYTDSRYAFATAHIHGAIYKQRGWLTSAGKDIKNKEEILALLEAIHLPRRVAIIHCPGHQRGSNPVATGNRRADEAAKQAALSTRVLAGTTKPAGKRTADGSEFEKRTADGSEFESPKKKAKVE

SEQ ID NO: 7020 - protein, 2094 aa, synthetic construct
MPAAKRVKLDGGDKKYSIGLDIGTNSVGWAVITDEYKVPSKKFKVLGNTDRHSIKKNLIGALLFDSGETAEATRLKRTARRRYTRRKNRICYLQEIFSNEMAKVDDSFFHRLEESFLVEEDKKHERHPIFGNIVDEVAYHEKYPTIYHLRKKLVDSTDKADLRLIYLALAHMIKFRGHFLIEGDLNPDNSDVDKLFIQLVQTYNQLFEENPINASGVDAKAILSARLSKSRRLENLIAQLPGEKKNGLFGNLIALSLGLTPNFKSNFDLAEDAKLQLSKDTYDDDLDNLLAQIGDQYADLFLAAKNLSDAILLSDILRVNTEITKAPLSASMIKRYDEHHQDLTLLKALVRQQLPEKYKEIFFDQSKNGYAGYIDGGASQEEFYKFIKPILEKMDGTEELLVKLNREDLLRKQRTFDNGSIPHQIHLGELHAILRRQEDFYPFLKDNREKIEKILTFRIPYYVGPLARGNSRFAWMTRKSEETITPWNFEEVVDKGASAQSFIERMTNFDKNLPNEKVLPKHSLLYEYFTVYNELTKVKYVTEGMRKPAFLSGEQKKAIVDLLFKTNRKVTVKQLKEDYFKKIECFDSVEISGVEDRFNASLGTYHDLLKIIKDKDFLDNEENEDILEDIVLTLTLFEDREMIEERLKTYAHLFDDKVMKQLKRRRYTGWGRLSRKLINGIRDKQSGKTILDFLKSDGFANRNFMQLIHDDSLTFKEDIQKAQVSGQGDSLHEHIANLAGSPAIKKGILQTVKVVDELVKVMGRHKPENIVIEMARENQTTQKGQKNSRERMKRIEEGIKELGSQILKEHPVENTQLQNEKLYLYYLQNGRDMYVDQELDINRLSDYDVDHIVPQSFLKDDSIDNKVLTRSDKARGKSDNVPSEEVVKKMKNYWRQLLNAKLITQRKFDNLTKAERGGLSELDKAGFIKRQLVETRQITKHVAQILDSRMNTKYDENDKLIREVKVITLKSKLVSDFRKDFQFYKVREINNYHHAHDAYLNAVVGTALIKKYPKLESEFVYGDYKVYDVRKMIAKSEQEIGKATAKYFFYSNIMNFFKTEITLANGEIRKRPLIETNGETGEIVWDKGRDFATVRKVLSMPQVNIVKKTEVQTGGFSKESILPKRNSDKLIARKKDWDPKKYGGFDSPTVAYSVLVVAKVEKGKSKKLKSVKELLGITIMERSSFEKNPIDFLEAKGYKEVKKDLIIKLPKYSLFELENGRKRMLASAGELQKGNELALPSKYVNFLYLASHYEKLKGSPEDNEQKQLFVEQHKHYLDEIIEQISEFSKRVILADANLDKVLSAYNKHRDKPIREQAENIIHLFTLTNLGAPAAFKYFDTTIDRKRYTSTKEVLDATLIHQSITGLYETRIDLSQLGGDGGPAPGGSGGGGGTLNLEDEYRLYETSAEPEVSPGSTWLSDFPQAWAETGGMGLAVRQAPLIIPLKATSTPVSIKQYPMSQEAKLGIKPHIQRLLDQGILVPCQSPWNTPLLPVKKPGTNDYRPVQDLREVNKRVEDIHPTVPNPYNLLSGLPPSHRWYTVLDLKDAFFCLRLHPTSQPLFAFEWRDPGMGISGQLTWTRLPQGFKNSPTLFNEALHRDLADFRIQHPDLILLQYVDDILLAATSELDCQQGTRALLLTLGNLGYRASAKKAQLCQKQVKYLGYLLKEGQRWLTEARKETVMGQPTPKTPRQLREFLGKAGFCRLFIPGFAEMAAPLYPLTKPGTLFNWGPDQQKAYQEIKQALLTAPALGLPDLTKPFELFVDEKQGYAKGVLTQKLGPWRRPVAYLSKKLDPVAAGWPPCLRMVAAIAVLRKDAGKLTMGQPLVILAPHAVEALVKQPPDRWLSNARMTHYQAMLLDTDRVQFGPVVALNPATLLPLPEEGAPHDCLEILAETHGTRPDLTDQPIPDADHTWYTDGSSFLQEGQRKAGAAVTTETEVIWARALPAGTSAQRAELIALTQALKMAEGKRLNVYTDSRYAFATAHIHGEIYRRRGWLTSEGREIKNKSEILALLKALFLPKRLSIIHCLGHQKGDSAEARGNRLADQAAREAAIKTPPDTSTLLAGKRTADGSEFEKRTADGSEFESPKKKAKVE

SEQ ID NO: 7021 - protein, 2094 aa, synthetic construct
MPAAKRVKLDGGDKKYSIGLDIGTNSVGWAVITDEYKVPSKKFKVLGNTDRHSIKKNLIGALLFDSGETAEATRLKRTARRRYTRRKNRICYLQEIFSNEMAKVDDSFFHRLEESFLVEEDKKHERHPIFGNIVDEVAYHEKYPTIYHLRKKLVDSTDKADLRLIYLALAHMIKFRGHFLIEGDLNPDNSDVDKLFIQLVQTYNQLFEENPINASGVDAKAILSARLSKSRRLENLIAQLPGEKKNGLFGNLIALSLGLTPNFKSNFDLAEDAKLQLSKDTYDDDLDNLLAQIGDQYADLFLAAKNLSDAILLSDILRVNTEITKAPLSASMIKRYDEHHQDLTLLKALVRQQLPEKYKEIFFDQSKNGYAGYIDGGASQEEFYKFIKPILEKMDGTEELLVKLNREDLLRKQRTFDNGSIPHQIHLGELHAILRRQEDFYPFLKDNREKIEKILTFRIPYYVGPLARGNSRFAWMTRKSEETITPWNFEEVVDKGASAQSFIERMTNFDKNLPNEKVLPKHSLLYEYFTVYNELTKVKYVTEGMRKPAFLSGEQKKAIVDLLFKTNRKVTVKQLKEDYFKKIECFDSVEISGVEDRFNASLGTYHDLLKIIKDKDFLDNEENEDILEDIVLTLTLFEDREMIEERLKTYAHLFDDKVMKQLKRRRYTGWGRLSRKLINGIRDKQSGKTILDFLKSDGFANRNFMQLIHDDSLTFKEDIQKAQVSGQGDSLHEHIANLAGSPAIKKGILQTVKVVDELVKVMGRHKPENIVIEMARENQTTQKGQKNSRERMKRIEEGIKELGSQILKEHPVENTQLQNEKLYLYYLQNGRDMYVDQELDINRLSDYDVDHIVPQSFLKDDSIDNKVLTRSDKARGKSDNVPSEEVVKKMKNYWRQLLNAKLITQRKFDNLTKAERGGLSELDKAGFIKRQLVETRQITKHVAQILDSRMNTKYDENDKLIREVKVITLKSKLVSDFRKDFQFYKVREINNYHHAHDAYLNAVVGTALIKKYPKLESEFVYGDYKVYDVRKMIAKSEQEIGKATAKYFFYSNIMNFFKTEITLANGEIRKRPLIETNGETGEIVWDKGRDFATVRKVLSMPQVNIVKKTEVQTGGFSKESILPKRNSDKLIARKKDWDPKKYGGFDSPTVAYSVLVVAKVEKGKSKKLKSVKELLGITIMERSSFEKNPIDFLEAKGYKEVKKDLIIKLPKYSLFELENGRKRMLASAGELQKGNELALPSKYVNFLYLASHYEKLKGSPEDNEQKQLFVEQHKHYLDEIIEQISEFSKRVILADANLDKVLSAYNKHRDKPIREQAENIIHLFTLTNLGAPAAFKYFDTTIDRKRYTSTKEVLDATLIHQSITGLYETRIDLSQLGGDGGPAPGGSGGGGGTLGIEDEYRLHETSTEPDVSLGSTWLSDFPQAWAETGGMGLAVRQAPLIIPLKATSTPVSIQQYPMSHEARLGIKPHIQRLLDQGILVPCQSPWNTPLLPVKKPGTNDYRPVQDLREVNKRVEDIHPTVPNPYNLLSGLPPSHQWYTVLDLKDAFFCLRLHPTSQPLFAFEWRDPGMGISGQLTWTRLPQGFKNSPTLFDEALHRDLADFRIQHPDLILLQYVDDILLAATSELDCQQGTRALLQTLGDLGYRASAKKAQICQKQVKYLGYLLREGQRWLTEARKETVMGQPVPKTPRQLREFLGTAGFCRLWIPGFAEMAAPLYPLTKTGTLFSWGPDQQKAYQEIKQALLTAPALGLPDLTKPFELFVDEKQGYAKGVLTQKLGPWRRPVAYLSKKLDPVAAGWPPCLRMVAAIAVLTKDAGKLTMGQPLVILAPHAVEALVKQPPDRWLSNARMTHYQAMLLDTDRVQFGPVVALNPATLLPLPEEGAPHDCLEILAETHGTRPDLTDQPIPDADHTWYTDGSSFLQEGQRKAGAAVTTETEVIWAGALPAGTSAQRAELIALTQALKMAEGKRLNVYTDSRYAFATAHIHGEIYRRRGLLTSEGREIKNKSEILALLKALFLPKRLSIIHCLGHQKGDSAEARGNRLADQAAREAAIKTPPDTSTLLAGKRTADGSEFEKRTADGSEFESPKKKAKVE

SEQ ID NO: 7022 - protein, 2094 aa, synthetic construct
MPAAKRVKLDGGDKKYSIGLDIGTNSVGWAVITDEYKVPSKKFKVLGNTDRHSIKKNLIGALLFDSGETAEATRLKRTARRRYTRRKNRICYLQEIFSNEMAKVDDSFFHRLEESFLVEEDKKHERHPIFGNIVDEVAYHEKYPTIYHLRKKLVDSTDKADLRLIYLALAHMIKFRGHFLIEGDLNPDNSDVDKLFIQLVQTYNQLFEENPINASGVDAKAILSARLSKSRRLENLIAQLPGEKKNGLFGNLIALSLGLTPNFKSNFDLAEDAKLQLSKDTYDDDLDNLLAQIGDQYADLFLAAKNLSDAILLSDILRVNTEITKAPLSASMIKRYDEHHQDLTLLKALVRQQLPEKYKEIFFDQSKNGYAGYIDGGASQEEFYKFIKPILEKMDGTEELLVKLNREDLLRKQRTFDNGSIPHQIHLGELHAILRRQEDFYPFLKDNREKIEKILTFRIPYYVGPLARGNSRFAWMTRKSEETITPWNFEEVVDKGASAQSFIERMTNFDKNLPNEKVLPKHSLLYEYFTVYNELTKVKYVTEGMRKPAFLSGEQKKAIVDLLFKTNRKVTVKQLKEDYFKKIECFDSVEISGVEDRFNASLGTYHDLLKIIKDKDFLDNEENEDILEDIVLTLTLFEDREMIEERLKTYAHLFDDKVMKQLKRRRYTGWGRLSRKLINGIRDKQSGKTILDFLKSDGFANRNFMQLIHDDSLTFKEDIQKAQVSGQGDSLHEHIANLAGSPAIKKGILQTVKVVDELVKVMGRHKPENIVIEMARENQTTQKGQKNSRERMKRIEEGIKELGSQILKEHPVENTQLQNEKLYLYYLQNGRDMYVDQELDINRLSDYDVDHIVPQSFLKDDSIDNKVLTRSDKARGKSDNVPSEEVVKKMKNYWRQLLNAKLITQRKFDNLTKAERGGLSELDKAGFIKRQLVETRQITKHVAQILDSRMNTKYDENDKLIREVKVITLKSKLVSDFRKDFQFYKVREINNYHHAHDAYLNAVVGTALIKKYPKLESEFVYGDYKVYDVRKMIAKSEQEIGKATAKYFFYSNIMNFFKTEITLANGEIRKRPLIETNGETGEIVWDKGRDFATVRKVLSMPQVNIVKKTEVQTGGFSKESILPKRNSDKLIARKKDWDPKKYGGFDSPTVAYSVLVVAKVEKGKSKKLKSVKELLGITIMERSSFEKNPIDFLEAKGYKEVKKDLIIKLPKYSLFELENGRKRMLASAGELQKGNELALPSKYVNFLYLASHYEKLKGSPEDNEQKQLFVEQHKHYLDEIIEQISEFSKRVILADANLDKVLSAYNKHRDKPIREQAENIIHLFTLTNLGAPAAFKYFDTTIDRKRYTSTKEVLDATLIHQSITGLYETRIDLSQLGGDGGPAPGGSGGGGGTLNIEDEHRLHETSKEPDVSLGSTWLSDFPQAWAETGGMGLAVRQAPLIIPLKATSTPVSIKQYPMSQEARLGIKPHIQRLLDQGILVPCQSPWNTPLLPVKKPGTNDYRPVQDLREVNKRVEDIHPTVPNPYNLLSGLPPSHQWYTVLDLKDAFFCLRLHPTSQPLFAFEWRDPEMGISGQLTWTRLPQGFKNSPTLFDEALHRDLADFRIQHPDLILLQYVDDLLLAATSELDCQQGTRALLQTLGNLGYRASAKKAQICQKQVKYLGYLLKEGQRWLTEARKETVMGQPTPKTPRQLREFLGTAGFCRLWIPGFAEMAAPLYPLTKTGTLFNWGPDQQKAYQEIKQALLTAPALGLPDLTKPFELFVDEKQGYAKGVLTQKLGPWRRPVAYLSKKLDPVAAGWPPCLRMVAAIAVLTKDAGKLTMGQPLVILAPHAVEALVKQPPDRWLSNARMTHYQALLLDTDRVQFGPVVALNPATLLPLPEEGLQHNCLDILAEAHGTRPDLTDQPLPDADHTWYTDGSSLLQEGQRKAGAAVTTETEVIWAKALPAGTSAQRAELIALTQALKMAEGKKLNVYTDSRYAFATAHIHGEIYRRRGLLTSEGKEIKNKDEILALLKALFLPKRLSIIHCPGHQKGHSAEARGNRMADQAARKAAITETPDTSTLLAGKRTADGSEFEKRTADGSEFESPKKKAKVE

SEQ ID NO: 7023 - protein, 2088 aa, synthetic construct
MPAAKRVKLDGGDKKYSIGLDIGTNSVGWAVITDEYKVPSKKFKVLGNTDRHSIKKNLIGALLFDSGETAEATRLKRTARRRYTRRKNRICYLQEIFSNEMAKVDDSFFHRLEESFLVEEDKKHERHPIFGNIVDEVAYHEKYPTIYHLRKKLVDSTDKADLRLIYLALAHMIKFRGHFLIEGDLNPDNSDVDKLFIQLVQTYNQLFEENPINASGVDAKAILSARLSKSRRLENLIAQLPGEKKNGLFGNLIALSLGLTPNFKSNFDLAEDAKLQLSKDTYDDDLDNLLAQIGDQYADLFLAAKNLSDAILLSDILRVNTEITKAPLSASMIKRYDEHHQDLTLLKALVRQQLPEKYKEIFFDQSKNGYAGYIDGGASQEEFYKFIKPILEKMDGTEELLVKLNREDLLRKQRTFDNGSIPHQIHLGELHAILRRQEDFYPFLKDNREKIEKILTFRIPYYVGPLARGNSRFAWMTRKSEETITPWNFEEVVDKGASAQSFIERMTNFDKNLPNEKVLPKHSLLYEYFTVYNELTKVKYVTEGMRKPAFLSGEQKKAIVDLLFKTNRKVTVKQLKEDYFKKIECFDSVEISGVEDRFNASLGTYHDLLKIIKDKDFLDNEENEDILEDIVLTLTLFEDREMIEERLKTYAHLFDDKVMKQLKRRRYTGWGRLSRKLINGIRDKQSGKTILDFLKSDGFANRNFMQLIHDDSLTFKEDIQKAQVSGQGDSLHEHIANLAGSPAIKKGILQTVKVVDELVKVMGRHKPENIVIEMARENQTTQKGQKNSRERMKRIEEGIKELGSQILKEHPVENTQLQNEKLYLYYLQNGRDMYVDQELDINRLSDYDVDHIVPQSFLKDDSIDNKVLTRSDKARGKSDNVPSEEVVKKMKNYWRQLLNAKLITQRKFDNLTKAERGGLSELDKAGFIKRQLVETRQITKHVAQILDSRMNTKYDENDKLIREVKVITLKSKLVSDFRKDFQFYKVREINNYHHAHDAYLNAVVGTALIKKYPKLESEFVYGDYKVYDVRKMIAKSEQEIGKATAKYFFYSNIMNFFKTEITLANGEIRKRPLIETNGETGEIVWDKGRDFATVRKVLSMPQVNIVKKTEVQTGGFSKESILPKRNSDKLIARKKDWDPKKYGGFDSPTVAYSVLVVAKVEKGKSKKLKSVKELLGITIMERSSFEKNPIDFLEAKGYKEVKKDLIIKLPKYSLFELENGRKRMLASAGELQKGNELALPSKYVNFLYLASHYEKLKGSPEDNEQKQLFVEQHKHYLDEIIEQISEFSKRVILADANLDKVLSAYNKHRDKPIREQAENIIHLFTLTNLGAPAAFKYFDTTIDRKRYTSTKEVLDATLIHQSITGLYETRIDLSQLGGDGGPAPGGSGGGGGTLQLDDEYRLYSPLVKPDQNIQFWLEQFPQAWAETAGMGLAKQVPPQVIQLKASATPVSVRQYPLSKEAQEGIRPHVQRLIQQGILVPVQSPWNTPLLPVRKPGTNDYRPVQDLREVNKRVQDIHPTVPNPYNLLCALPPQRSWYTVLDLKDAFFCLRLHPTSQPLFAFEWRDPGTGRTGQLTWTRLPQGFKNSPTIFDEALHRDLANFRIQHPQVTLLQYVDDLLLAGATKQDCLEGTKALLLELSDLGYRASAKKAQICRREVTYLGYSLRDGQRWLTEARKKTVVQIPAPTTAKQVREFLGTAGFCRLWIPGFATLAAPLYPLTKEKGEFSWAPEHQKAFDAIKKALLSAPALALPDVTKPFTLYVDERKGVARGVLTQTLGPWRRPVAYLSKKLDPVASGWPVCLKAIAAVAILVKDADKLTLGQNITVIAPHALENIVRQPPDRWMTNARMTHYQSLLLTERVTFAPPAALNPATLLPEETDEPVTHDCHQLLIEETGVRKDLTDIPLTGEVLTWFTDGSSYVVEGKRMAGAAVVDGTRTIWASSLPEGTSAQKAELMALTQALRLAEGKSINIYTDSRYAFATAHVHGAIYKQRGLLTSAGREIKNKEEILSLLEALHLPKRLAIIHCPGHQKAKDPISRGNQMADRVAKQAAQGVNLLAGKRTADGSEFEKRTADGSEFESPKKKAKVE

SEQ ID NO: 7024 - protein, 2085 aa, synthetic construct
MPAAKRVKLDGGDKKYSIGLDIGTNSVGWAVITDEYKVPSKKFKVLGNTDRHSIKKNLIGALLFDSGETAEATRLKRTARRRYTRRKNRICYLQEIFSNEMAKVDDSFFHRLEESFLVEEDKKHERHPIFGNIVDEVAYHEKYPTIYHLRKKLVDSTDKADLRLIYLALAHMIKFRGHFLIEGDLNPDNSDVDKLFIQLVQTYNQLFEENPINASGVDAKAILSARLSKSRRLENLIAQLPGEKKNGLFGNLIALSLGLTPNFKSNFDLAEDAKLQLSKDTYDDDLDNLLAQIGDQYADLFLAAKNLSDAILLSDILRVNTEITKAPLSASMIKRYDEHHQDLTLLKALVRQQLPEKYKEIFFDQSKNGYAGYIDGGASQEEFYKFIKPILEKMDGTEELLVKLNREDLLRKQRTFDNGSIPHQIHLGELHAILRRQEDFYPFLKDNREKIEKILTFRIPYYVGPLARGNSRFAWMTRKSEETITPWNFEEVVDKGASAQSFIERMTNFDKNLPNEKVLPKHSLLYEYFTVYNELTKVKYVTEGMRKPAFLSGEQKKAIVDLLFKTNRKVTVKQLKEDYFKKIECFDSVEISGVEDRFNASLGTYHDLLKIIKDKDFLDNEENEDILEDIVLTLTLFEDREMIEERLKTYAHLFDDKVMKQLKRRRYTGWGRLSRKLINGIRDKQSGKTILDFLKSDGFANRNFMQLIHDDSLTFKEDIQKAQVSGQGDSLHEHIANLAGSPAIKKGILQTVKVVDELVKVMGRHKPENIVIEMARENQTTQKGQKNSRERMKRIEEGIKELGSQILKEHPVENTQLQNEKLYLYYLQNGRDMYVDQELDINRLSDYDVDHIVPQSFLKDDSIDNKVLTRSDKARGKSDNVPSEEVVKKMKNYWRQLLNAKLITQRKFDNLTKAERGGLSELDKAGFIKRQLVETRQITKHVAQILDSRMNTKYDENDKLIREVKVITLKSKLVSDFRKDFQFYKVREINNYHHAHDAYLNAVVGTALIKKYPKLESEFVYGDYKVYDVRKMIAKSEQEIGKATAKYFFYSNIMNFFKTEITLANGEIRKRPLIETNGETGEIVWDKGRDFATVRKVLSMPQVNIVKKTEVQTGGFSKESILPKRNSDKLIARKKDWDPKKYGGFDSPTVAYSVLVVAKVEKGKSKKLKSVKELLGITIMERSSFEKNPIDFLEAKGYKEVKKDLIIKLPKYSLFELENGRKRMLASAGELQKGNELALPSKYVNFLYLASHYEKLKGSPEDNEQKQLFVEQHKHYLDEIIEQISEFSKRVILADANLDKVLSAYNKHRDKPIREQAENIIHLFTLTNLGAPAAFKYFDTTIDRKRYTSTKEVLDATLIHQSITGLYETRIDLSQLGGDGGPAPGGSGGGGGIPWLMKKPLQLTTLVPLQEYEERLLKQTMLTGSYKEKLQSLFLKYDALWQHWENQVGHRRIKPHHIATGTVNPRPQKQYPINPKAKASIQTVINDLLKQGVLIQQNSIMNTPVYPVPKPDGKWRMVLDYREVNKTIPLIAAQNQHSAGILSSIFRGKYKTTLDLSNGFWAHSITPESYWLTAFTWLGQQYCWTRLPQGFLNSPALFNADVVDLLKEVPNVQVYVDDIYISHDDPREHLEQLEKVFSLLLNAGYVVSLKKSEIAQHEVEFLGFNITKEGRGLTETFKQKLLNITPPRDLKQLQSILGKLNFARNFIPNFSELVKPLYNIIATAPGKYITWTTDNSQQLQNIISMLNSAENLEERNPEVRLIMKVNTSPSAGYIRFYNEFAKRPIMYLNYVYTKAEVKFTNTEKLLTTIHKGLIKALDLGMGQEILVYSPIVSMTKIQKTPLPERKALPIRWITWMSYLEDPRIQFHYDKTLPELQQVPTVTDDIIAKIKHPSEFSMVFYTDGSAIKHPNVNKSHNAGMGIAQVQFKPEFTVINTWSIPLGDHTAQLAEVAAVEFACKKALKIDGPVLIVTDSFYVAESVNKELPYWQSNGFFNNKKKPLKHVSKWKSIADCIQLKPDIIIIHEKGHQPTASTFHTEGNNLADKLATQGSYVVNAGKRTADGSEFEKRTADGSEFESPKKKAKVE

SEQ ID NO: 7025 - protein, 2096 aa, synthetic construct
MPAAKRVKLDGGDKKYSIGLDIGTNSVGWAVITDEYKVPSKKFKVLGNTDRHSIKKNLIGALLFDSGETAEATRLKRTARRRYTRRKNRICYLQEIFSNEMAKVDDSFFHRLEESFLVEEDKKHERHPIFGNIVDEVAYHEKYPTIYHLRKKLVDSTDKADLRLIYLALAHMIKFRGHFLIEGDLNPDNSDVDKLFIQLVQTYNQLFEENPINASGVDAKAILSARLSKSRRLENLIAQLPGEKKNGLFGNLIALSLGLTPNFKSNFDLAEDAKLQLSKDTYDDDLDNLLAQIGDQYADLFLAAKNLSDAILLSDILRVNTEITKAPLSASMIKRYDEHHQDLTLLKALVRQQLPEKYKEIFFDQSKNGYAGYIDGGASQEEFYKFIKPILEKMDGTEELLVKLNREDLLRKQRTFDNGSIPHQIHLGELHAILRRQEDFYPFLKDNREKIEKILTFRIPYYVGPLARGNSRFAWMTRKSEETITPWNFEEVVDKGASAQSFIERMTNFDKNLPNEKVLPKHSLLYEYFTVYNELTKVKYVTEGMRKPAFLSGEQKKAIVDLLFKTNRKVTVKQLKEDYFKKIECFDSVEISGVEDRFNASLGTYHDLLKIIKDKDFLDNEENEDILEDIVLTLTLFEDREMIEERLKTYAHLFDDKVMKQLKRRRYTGWGRLSRKLINGIRDKQSGKTILDFLKSDGFANRNFMQLIHDDSLTFKEDIQKAQVSGQGDSLHEHIANLAGSPAIKKGILQTVKVVDELVKVMGRHKPENIVIEMARENQTTQKGQKNSRERMKRIEEGIKELGSQILKEHPVENTQLQNEKLYLYYLQNGRDMYVDQELDINRLSDYDVDHIVPQSFLKDDSIDNKVLTRSDKARGKSDNVPSEEVVKKMKNYWRQLLNAKLITQRKFDNLTKAERGGLSELDKAGFIKRQLVETRQITKHVAQILDSRMNTKYDENDKLIREVKVITLKSKLVSDFRKDFQFYKVREINNYHHAHDAYLNAVVGTALIKKYPKLESEFVYGDYKVYDVRKMIAKSEQEIGKATAKYFFYSNIMNFFKTEITLANGEIRKRPLIETNGETGEIVWDKGRDFATVRKVLSMPQVNIVKKTEVQTGGFSKESILPKRNSDKLIARKKDWDPKKYGGFDSPTVAYSVLVVAKVEKGKSKKLKSVKELLGITIMERSSFEKNPIDFLEAKGYKEVKKDLIIKLPKYSLFELENGRKRMLASAGELQKGNELALPSKYVNFLYLASHYEKLKGSPEDNEQKQLFVEQHKHYLDEIIEQISEFSKRVILADANLDKVLSAYNKHRDKPIREQAENIIHLFTLTNLGAPAAFKYFDTTIDRKRYTSTKEVLDATLIHQSITGLYETRIDLSQLGGDGGPAPGGGGGSGGTAPLEEEYRLFLEAPIQNVTLLEQWKREIPKVWAEINPPGLASTQAPIHVQLLSTALPVRVRQYPITLEAKRSLRETIRKFRAAGILRPVHSPWNTPLLPVRKSGTSEYRMVQDLREVNKRVETIHPTVPNPYTLLSLLPPDRIWYSVLDLKDAFFCIPLAPESQLIFAFEWADAEEGESGQLTWTRLPQGFKNSPTLFDEALNRDLQGFRLDHPSVSLLQYVDDLLIAADTQAACLSATRDLLMTLAELGYRVSGKKAQLCQEEVTYLGFKIHKGSRSLSNSRTQAILQIPVPKTKRQVREFLGTIGYCRLWIPGFAELAQPLYAATRGGNDPLVWGEKEEEAFQSLKLALTQPPALALPSLDKPFQLFVEETSGAAKGVLTQALGPWKRPVAYLSKRLDPVAAGWPRCLRAIAAAALLTREASKLTFGQDIEITSSHNLESLLRSPPDKWLTNARITQYQVLLLDPPRVRFKQTAALNPATLLPETDDTLPIHHCLDTLDSLTSTRPDLTDQPLAQAEATLFTDGSSYIRDGKRYAGAAVVTLDSVIWAEPLPIGTSAQKAELIALTKALEWSKDKSVNIYTDSRYAFATLHVHGMIYRERGLLTAGGKAIKNAPEILALLTAVWLPKRVAVMHCKGHQKDDAPTSTGNRRADEVAREVAIRPLSTQATISAGKRTADGSEFEKRTADGSEFESPKKKAKVE

SEQ ID NO: 7026 - protein, 2100 aa, synthetic construct
MPAAKRVKLDGGDKKYSIGLDIGTNSVGWAVITDEYKVPSKKFKVLGNTDRHSIKKNLIGALLFDSGETAEATRLKRTARRRYTRRKNRICYLQEIFSNEMAKVDDSFFHRLEESFLVEEDKKHERHPIFGNIVDEVAYHEKYPTIYHLRKKLVDSTDKADLRLIYLALAHMIKFRGHFLIEGDLNPDNSDVDKLFIQLVQTYNQLFEENPINASGVDAKAILSARLSKSRRLENLIAQLPGEKKNGLFGNLIALSLGLTPNFKSNFDLAEDAKLQLSKDTYDDDLDNLLAQIGDQYADLFLAAKNLSDAILLSDILRVNTEITKAPLSASMIKRYDEHHQDLTLLKALVRQQLPEKYKEIFFDQSKNGYAGYIDGGASQEEFYKFIKPILEKMDGTEELLVKLNREDLLRKQRTFDNGSIPHQIHLGELHAILRRQEDFYPFLKDNREKIEKILTFRIPYYVGPLARGNSRFAWMTRKSEETITPWNFEEVVDKGASAQSFIERMTNFDKNLPNEKVLPKHSLLYEYFTVYNELTKVKYVTEGMRKPAFLSGEQKKAIVDLLFKTNRKVTVKQLKEDYFKKIECFDSVEISGVEDRFNASLGTYHDLLKIIKDKDFLDNEENEDILEDIVLTLTLFEDREMIEERLKTYAHLFDDKVMKQLKRRRYTGWGRLSRKLINGIRDKQSGKTILDFLKSDGFANRNFMQLIHDDSLTFKEDIQKAQVSGQGDSLHEHIANLAGSPAIKKGILQTVKVVDELVKVMGRHKPENIVIEMARENQTTQKGQKNSRERMKRIEEGIKELGSQILKEHPVENTQLQNEKLYLYYLQNGRDMYVDQELDINRLSDYDVDHIVPQSFLKDDSIDNKVLTRSDKARGKSDNVPSEEVVKKMKNYWRQLLNAKLITQRKFDNLTKAERGGLSELDKAGFIKRQLVETRQITKHVAQILDSRMNTKYDENDKLIREVKVITLKSKLVSDFRKDFQFYKVREINNYHHAHDAYLNAVVGTALIKKYPKLESEFVYGDYKVYDVRKMIAKSEQEIGKATAKYFFYSNIMNFFKTEITLANGEIRKRPLIETNGETGEIVWDKGRDFATVRKVLSMPQVNIVKKTEVQTGGFSKESILPKRNSDKLIARKKDWDPKKYGGFDSPTVAYSVLVVAKVEKGKSKKLKSVKELLGITIMERSSFEKNPIDFLEAKGYKEVKKDLIIKLPKYSLFELENGRKRMLASAGELQKGNELALPSKYVNFLYLASHYEKLKGSPEDNEQKQLFVEQHKHYLDEIIEQISEFSKRVILADANLDKVLSAYNKHRDKPIREQAENIIHLFTLTNLGAPAAFKYFDTTIDRKRYTSTKEVLDATLIHQSITGLYETRIDLSQLGGDGGPAPGGGGGSGGTVSLQDEHRLFDIPVTTSLPDVWLQDFPQAWAETGGLGRAKCQAPIIIDLKPTAVPVSIKQYPMSLEAHMGIRQHIIKFLELGVLRPCRSPWNTPLLPVKKPGTQDYRPVQDLREINKRTVDIHPTVPNPYNLLSTLKPDYSWYTVLDLKDAFFCLPLAPQSQELFAFEWKDPERGISGQLTWTRLPQGFKNSPTLFNEALHRDLTDFRTQHPEVTLLQYVDDLLLAAPTKKACTQGTRHLLQELGEKGYRASAKKAQICQTKVTYLGYILSEGKRWLTPGRIETVARIPPPRNPREVREFLGTAGFCRLWIPGFAELAAPLYALTKPSTPFTWQTEHQLAFEALKKALLSAPALGLPDTSKPFTLFLDERQGIAKGVLTQKLGPWKRPVAYLSKKLDPVAAGWPPCLRIMAATAMLVKDSAKLTLGQPLTVITPHTLEAIVRQPPDRWITNARLTHYQALLLDTDRVQFGPPVTLNPATLLPVPENQPSPHDCRQVLAETHGTREDLKDQELPDADHTWYTDGSSYLDSGTRRAGAAVVDGHNTIWAQSLPPGTSAQKAELIALTKALELSKGKKANIYTDSRYAFATAHTHGSIYERRGWLTSEGKEIKNKAEIIALLKALFLPQEVAIIHCPGHQKGQDPVAVGNRQADRVARQAAMAEVLTLATEPDNTSHITAGKRTADGSEFEKRTADGSEFESPKKKAKVE

SEQ ID NO: 7027 - protein, 2171 aa, synthetic construct
MPAAKRVKLDGGDKKYSIGLDIGTNSVGWAVITDEYKVPSKKFKVLGNTDRHSIKKNLIGALLFDSGETAEATRLKRTARRRYTRRKNRICYLQEIFSNEMAKVDDSFFHRLEESFLVEEDKKHERHPIFGNIVDEVAYHEKYPTIYHLRKKLVDSTDKADLRLIYLALAHMIKFRGHFLIEGDLNPDNSDVDKLFIQLVQTYNQLFEENPINASGVDAKAILSARLSKSRRLENLIAQLPGEKKNGLFGNLIALSLGLTPNFKSNFDLAEDAKLQLSKDTYDDDLDNLLAQIGDQYADLFLAAKNLSDAILLSDILRVNTEITKAPLSASMIKRYDEHHQDLTLLKALVRQQLPEKYKEIFFDQSKNGYAGYIDGGASQEEFYKFIKPILEKMDGTEELLVKLNREDLLRKQRTFDNGSIPHQIHLGELHAILRRQEDFYPFLKDNREKIEKILTFRIPYYVGPLARGNSRFAWMTRKSEETITPWNFEEVVDKGASAQSFIERMTNFDKNLPNEKVLPKHSLLYEYFTVYNELTKVKYVTEGMRKPAFLSGEQKKAIVDLLFKTNRKVTVKQLKEDYFKKIECFDSVEISGVEDRFNASLGTYHDLLKIIKDKDFLDNEENEDILEDIVLTLTLFEDREMIEERLKTYAHLFDDKVMKQLKRRRYTGWGRLSRKLINGIRDKQSGKTILDFLKSDGFANRNFMQLIHDDSLTFKEDIQKAQVSGQGDSLHEHIANLAGSPAIKKGILQTVKVVDELVKVMGRHKPENIVIEMARENQTTQKGQKNSRERMKRIEEGIKELGSQILKEHPVENTQLQNEKLYLYYLQNGRDMYVDQELDINRLSDYDVDHIVPQSFLKDDSIDNKVLTRSDKARGKSDNVPSEEVVKKMKNYWRQLLNAKLITQRKFDNLTKAERGGLSELDKAGFIKRQLVETRQITKHVAQILDSRMNTKYDENDKLIREVKVITLKSKLVSDFRKDFQFYKVREINNYHHAHDAYLNAVVGTALIKKYPKLESEFVYGDYKVYDVRKMIAKSEQEIGKATAKYFFYSNIMNFFKTEITLANGEIRKRPLIETNGETGEIVWDKGRDFATVRKVLSMPQVNIVKKTEVQTGGFSKESILPKRNSDKLIARKKDWDPKKYGGFDSPTVAYSVLVVAKVEKGKSKKLKSVKELLGITIMERSSFEKNPIDFLEAKGYKEVKKDLIIKLPKYSLFELENGRKRMLASAGELQKGNELALPSKYVNFLYLASHYEKLKGSPEDNEQKQLFVEQHKHYLDEIIEQISEFSKRVILADANLDKVLSAYNKHRDKPIREQAENIIHLFTLTNLGAPAAFKYFDTTIDRKRYTSTKEVLDATLIHQSITGLYETRIDLSQLGGDGGPAPGGGGGSGGMDLLKPLTVERKGVKIKGYWNSQADITCVPKDLLQGEEPVRQQNVTTIHGTQEGDVYYVNLKIDGRRINTEVIGTTLDYAIITPGDVPWILKKPLELTIKLDLEEQQGTLLNNSILSKKGKEELKQLFEKYSALWQSWENQVGHRRIRPHKIATGTVKPTPQKQYHINPKAKPDIQIVINDLLKQGVLIQKESTMNTPVYPVPKPNGRWRMVLDYRAVNKVTPLIAVQNQHSYGILGSLFKGRYKTTIDLSNGFWAHPIVPEDYWITAFTWQGKQYCWTVLPQGFLNSPGLFTGDVVDLLQGIPNVEVYVDDVYISHDSEKEHLEYLDILFNRLKEAGYIISLKKSNIANSIVDFLGFQITNEGRGLTDTFKEKLENITAPTTLKQLQSILGLLNFARNFIPDFTELIAPLYALIPKSTKNYVPWQIEHSTTLETLITKLNGAEYLQGRKGDKTLIMKVNASYTTGYIRYYNEGEKKPISYVSIVFSKTELKFTELEKLLTTVHKGLLKALDLSMGQNIHVYSPIVSMQNIQKTPQTAKKALASRWLSWLSYLEDPRIRFFYDPQMPALKDLPAVDTGKDNKKHPSNFQHIFYTDGSAITSPTKEGHLNAGMGIVYFINKDGNLQKQQEWSISLGNHTAQFAEIAAFEFALKKCLPLGGNILVVTDSNYVAKAYNEELDVWASNGFVNNRKKPLKHISKWKSVADLKRLRPDVVVTHEPGHQKLDSSPHAYGNNLADQLATQASFKVHAGKRTADGSEFEKRTADGSEFESPKKKAKVE

SEQ ID NO: 7028 - protein, 2085 aa, synthetic construct
MPAAKRVKLDGGDKKYSIGLDIGTNSVGWAVITDEYKVPSKKFKVLGNTDRHSIKKNLIGALLFDSGETAEATRLKRTARRRYTRRKNRICYLQEIFSNEMAKVDDSFFHRLEESFLVEEDKKHERHPIFGNIVDEVAYHEKYPTIYHLRKKLVDSTDKADLRLIYLALAHMIKFRGHFLIEGDLNPDNSDVDKLFIQLVQTYNQLFEENPINASGVDAKAILSARLSKSRRLENLIAQLPGEKKNGLFGNLIALSLGLTPNFKSNFDLAEDAKLQLSKDTYDDDLDNLLAQIGDQYADLFLAAKNLSDAILLSDILRVNTEITKAPLSASMIKRYDEHHQDLTLLKALVRQQLPEKYKEIFFDQSKNGYAGYIDGGASQEEFYKFIKPILEKMDGTEELLVKLNREDLLRKQRTFDNGSIPHQIHLGELHAILRRQEDFYPFLKDNREKIEKILTFRIPYYVGPLARGNSRFAWMTRKSEETITPWNFEEVVDKGASAQSFIERMTNFDKNLPNEKVLPKHSLLYEYFTVYNELTKVKYVTEGMRKPAFLSGEQKKAIVDLLFKTNRKVTVKQLKEDYFKKIECFDSVEISGVEDRFNASLGTYHDLLKIIKDKDFLDNEENEDILEDIVLTLTLFEDREMIEERLKTYAHLFDDKVMKQLKRRRYTGWGRLSRKLINGIRDKQSGKTILDFLKSDGFANRNFMQLIHDDSLTFKEDIQKAQVSGQGDSLHEHIANLAGSPAIKKGILQTVKVVDELVKVMGRHKPENIVIEMARENQTTQKGQKNSRERMKRIEEGIKELGSQILKEHPVENTQLQNEKLYLYYLQNGRDMYVDQELDINRLSDYDVDHIVPQSFLKDDSIDNKVLTRSDKARGKSDNVPSEEVVKKMKNYWRQLLNAKLITQRKFDNLTKAERGGLSELDKAGFIKRQLVETRQITKHVAQILDSRMNTKYDENDKLIREVKVITLKSKLVSDFRKDFQFYKVREINNYHHAHDAYLNAVVGTALIKKYPKLESEFVYGDYKVYDVRKMIAKSEQEIGKATAKYFFYSNIMNFFKTEITLANGEIRKRPLIETNGETGEIVWDKGRDFATVRKVLSMPQVNIVKKTEVQTGGFSKESILPKRNSDKLIARKKDWDPKKYGGFDSPTVAYSVLVVAKVEKGKSKKLKSVKELLGITIMERSSFEKNPIDFLEAKGYKEVKKDLIIKLPKYSLFELENGRKRMLASAGELQKGNELALPSKYVNFLYLASHYEKLKGSPEDNEQKQLFVEQHKHYLDEIIEQISEFSKRVILADANLDKVLSAYNKHRDKPIREQAENIIHLFTLTNLGAPAAFKYFDTTIDRKRYTSTKEVLDATLIHQSITGLYETRIDLSQLGGDGGPAPGGGGGSGGVPWILKKPLELTIKLDLEEQQGTLLNNSILSKKGKEELKQLFEKYSALWQSWENQVGHRRIRPHKIATGTVKPTPQKQYHINPKAKPDIQIVINDLLKQGVLIQKESTMNTPVYPVPKPNGRWRMVLDYRAVNKVTPLIAVQNQHSYGILGSLFKGRYKTTIDLSNGFWAHPIVPEDYWITAFTWQGKQYCWTVLPQGFLNSPGLFTGDVVDLLQGIPNVEVYVDDVYISHDSEKEHLEYLDILFNRLKEAGYIISLKKSNIANSIVDFLGFQITNEGRGLTDTFKEKLENITAPTTLKQLQSILGLLNFARNFIPDFTELIAPLYALIPKSTKNYVPWQIEHSTTLETLITKLNGAEYLQGRKGDKTLIMKVNASYTTGYIRYYNEGEKKPISYVSIVFSKTELKFTELEKLLTTVHKGLLKALDLSMGQNIHVYSPIVSMQNIQKTPQTAKKALASRWLSWLSYLEDPRIRFFYDPQMPALKDLPAVDTGKDNKKHPSNFQHIFYTDGSAITSPTKEGHLNAGMGIVYFINKDGNLQKQQEWSISLGNHTAQFAEIAAFEFALKKCLPLGGNILVVTDSNYVAKAYNEELDVWASNGFVNNRKKPLKHISKWKSVADLKRLRPDVVVTHEPGHQKLDSSPHAYGNNLADQLATQASFKVHAGKRTADGSEFEKRTADGSEFESPKKKAKVE

SEQ ID NO: 7029 - protein, 2093 aa, synthetic construct
MPAAKRVKLDGGDKKYSIGLDIGTNSVGWAVITDEYKVPSKKFKVLGNTDRHSIKKNLIGALLFDSGETAEATRLKRTARRRYTRRKNRICYLQEIFSNEMAKVDDSFFHRLEESFLVEEDKKHERHPIFGNIVDEVAYHEKYPTIYHLRKKLVDSTDKADLRLIYLALAHMIKFRGHFLIEGDLNPDNSDVDKLFIQLVQTYNQLFEENPINASGVDAKAILSARLSKSRRLENLIAQLPGEKKNGLFGNLIALSLGLTPNFKSNFDLAEDAKLQLSKDTYDDDLDNLLAQIGDQYADLFLAAKNLSDAILLSDILRVNTEITKAPLSASMIKRYDEHHQDLTLLKALVRQQLPEKYKEIFFDQSKNGYAGYIDGGASQEEFYKFIKPILEKMDGTEELLVKLNREDLLRKQRTFDNGSIPHQIHLGELHAILRRQEDFYPFLKDNREKIEKILTFRIPYYVGPLARGNSRFAWMTRKSEETITPWNFEEVVDKGASAQSFIERMTNFDKNLPNEKVLPKHSLLYEYFTVYNELTKVKYVTEGMRKPAFLSGEQKKAIVDLLFKTNRKVTVKQLKEDYFKKIECFDSVEISGVEDRFNASLGTYHDLLKIIKDKDFLDNEENEDILEDIVLTLTLFEDREMIEERLKTYAHLFDDKVMKQLKRRRYTGWGRLSRKLINGIRDKQSGKTILDFLKSDGFANRNFMQLIHDDSLTFKEDIQKAQVSGQGDSLHEHIANLAGSPAIKKGILQTVKVVDELVKVMGRHKPENIVIEMARENQTTQKGQKNSRERMKRIEEGIKELGSQILKEHPVENTQLQNEKLYLYYLQNGRDMYVDQELDINRLSDYDVDHIVPQSFLKDDSIDNKVLTRSDKARGKSDNVPSEEVVKKMKNYWRQLLNAKLITQRKFDNLTKAERGGLSELDKAGFIKRQLVETRQITKHVAQILDSRMNTKYDENDKLIREVKVITLKSKLVSDFRKDFQFYKVREINNYHHAHDAYLNAVVGTALIKKYPKLESEFVYGDYKVYDVRKMIAKSEQEIGKATAKYFFYSNIMNFFKTEITLANGEIRKRPLIETNGETGEIVWDKGRDFATVRKVLSMPQVNIVKKTEVQTGGFSKESILPKRNSDKLIARKKDWDPKKYGGFDSPTVAYSVLVVAKVEKGKSKKLKSVKELLGITIMERSSFEKNPIDFLEAKGYKEVKKDLIIKLPKYSLFELENGRKRMLASAGELQKGNELALPSKYVNFLYLASHYEKLKGSPEDNEQKQLFVEQHKHYLDEIIEQISEFSKRVILADANLDKVLSAYNKHRDKPIREQAENIIHLFTLTNLGAPAAFKYFDTTIDRKRYTSTKEVLDATLIHQSITGLYETRIDLSQLGGDGGPAPGGGGGSGGTLQLEEEYRLFEPESTQKQEMDIWLKNFPQAWAETGGMGTAHCQAPVLIQLKATATPISIRQYPMPHEAYQGIKPHIRRMLDQGILKPCQSPWNTPLLPVKKPGTEDYRPVQDLREVNKRVEDIHPTVPNPYNLLSTLPPSHPWYTVLDLKDAFFCLRLHSESQLLFAFEWRDPEIGLSGQLTWTRLPQGFKNSPTLFNEALHSDLADFRVRYPALVLLQYVDDLLLAAATRTECLEGTKALLETLGNKGYRASAKKAQICLQEVTYLGYSLKDGQRWLTKARKEAILSIPVPKNSRQVREFLGTAGYCRLWIPGFAELAAPLYPLTRPGTLFQWGTEQQLAFEDIKKALLSSPALGLPDITKPFELFIDENSGFAKGVLVQKLGPWKRPVAYLSKKLDTVASGWPPCLRMVAAIAILVKDAGKLTLGQPLTILTSHPVEALVRQPPNKWLSNARMTHYQAMLLDAERVHFGPTVSLNPATLLPLPSGGNHHDCLQILAETHGTRPDLTDQPLPDADLTWYTDGSSFIRNGEREAGAAVTTESEVIWAAPLPPGTSAQRAELIALTQALKMAEGKKLTVYTDSRYAFATTHVHGEIYRRRGWLTSEGKEIKNKNEILALLEALFLPKRLSIIHCPGHQKGDSPQAKGNRLADDTAKKAATETHSSLTVLPAGKRTADGSEFEKRTADGSEFESPKKKAKVE

SEQ ID NO: 7030 - protein, 2125 aa, synthetic construct
MPAAKRVKLDGGDKKYSIGLDIGTNSVGWAVITDEYKVPSKKFKVLGNTDRHSIKKNLIGALLFDSGETAEATRLKRTARRRYTRRKNRICYLQEIFSNEMAKVDDSFFHRLEESFLVEEDKKHERHPIFGNIVDEVAYHEKYPTIYHLRKKLVDSTDKADLRLIYLALAHMIKFRGHFLIEGDLNPDNSDVDKLFIQLVQTYNQLFEENPINASGVDAKAILSARLSKSRRLENLIAQLPGEKKNGLFGNLIALSLGLTPNFKSNFDLAEDAKLQLSKDTYDDDLDNLLAQIGDQYADLFLAAKNLSDAILLSDILRVNTEITKAPLSASMIKRYDEHHQDLTLLKALVRQQLPEKYKEIFFDQSKNGYAGYIDGGASQEEFYKFIKPILEKMDGTEELLVKLNREDLLRKQRTFDNGSIPHQIHLGELHAILRRQEDFYPFLKDNREKIEKILTFRIPYYVGPLARGNSRFAWMTRKSEETITPWNFEEVVDKGASAQSFIERMTNFDKNLPNEKVLPKHSLLYEYFTVYNELTKVKYVTEGMRKPAFLSGEQKKAIVDLLFKTNRKVTVKQLKEDYFKKIECFDSVEISGVEDRFNASLGTYHDLLKIIKDKDFLDNEENEDILEDIVLTLTLFEDREMIEERLKTYAHLFDDKVMKQLKRRRYTGWGRLSRKLINGIRDKQSGKTILDFLKSDGFANRNFMQLIHDDSLTFKEDIQKAQVSGQGDSLHEHIANLAGSPAIKKGILQTVKVVDELVKVMGRHKPENIVIEMARENQTTQKGQKNSRERMKRIEEGIKELGSQILKEHPVENTQLQNEKLYLYYLQNGRDMYVDQELDINRLSDYDVDHIVPQSFLKDDSIDNKVLTRSDKARGKSDNVPSEEVVKKMKNYWRQLLNAKLITQRKFDNLTKAERGGLSELDKAGFIKRQLVETRQITKHVAQILDSRMNTKYDENDKLIREVKVITLKSKLVSDFRKDFQFYKVREINNYHHAHDAYLNAVVGTALIKKYPKLESEFVYGDYKVYDVRKMIAKSEQEIGKATAKYFFYSNIMNFFKTEITLANGEIRKRPLIETNGETGEIVWDKGRDFATVRKVLSMPQVNIVKKTEVQTGGFSKESILPKRNSDKLIARKKDWDPKKYGGFDSPTVAYSVLVVAKVEKGKSKKLKSVKELLGITIMERSSFEKNPIDFLEAKGYKEVKKDLIIKLPKYSLFELENGRKRMLASAGELQKGNELALPSKYVNFLYLASHYEKLKGSPEDNEQKQLFVEQHKHYLDEIIEQISEFSKRVILADANLDKVLSAYNKHRDKPIREQAENIIHLFTLTNLGAPAAFKYFDTTIDRKRYTSTKEVLDATLIHQSITGLYETRIDLSQLGGDGGPAPGGGGGSGGLLGRDLLTKLKAQIQFSTEGPQVTWEDRPAMCLVLNLEEEYRLHEKPVPPSIDPSWLQLFPMVWAEKAGMGLANQVPPVVVELKSDASPVAVRQYPMSKEAREGIRPHIQRFLDLGILVPCQSPWNTPLLPVKKPGTNDYRPVQDLREVNKRVQDIHPTVPNPYNLLSSLPPSHTWYSVLDLKDAFFCLKLHPNSQPLFAFEWRDPEKGNTGQLTWTRLPQGFKNSPTLFNEALHRDLASFRALNPQVVMLQYVDDLLVAAPTYRDCKEGTRRLLQELSKLGYRVSAKKAQLCREEVTYLGYLLKGGKRWLTPARKATVMKIPTPTTPRQVREFLGTAGFCRLWIPGFASLAAPLYPLTRPKVPFTWTEAHQEAFGRIKEALLSAPALALPDLTKPFALYVDEKEGVARGVLTQTLGPWRRPVAYLSKKLDPVASGWPTCLKAIAAVALLLKDADKLTLGQNVLVIAPHNLESIVRQPPDRWMTNARMTHYQSLLLNERVSFAPPAILNPATLLPVESDDTPIHICSEILAEETGTRPDLRDQPLPGVPAWYTDGSSFIMDGRRQAGAAIVDNKRTVWASNLPEGTSAQKAELIALTQALRLAEGKSINIYTDSRYAFATAHVHGAIYKQRGWLTSAGKDIKNKEEILALLEAIHLPKRVAIIHCPGHQRGTDPVATGNRKADEAAKQAAQSTRILTETTKNAGKRTADGSEFEKRTADGSEFESPKKKAKVE

SEQ ID NO: 7031 - protein, 2125 aa, synthetic construct
MPAAKRVKLDGGDKKYSIGLDIGTNSVGWAVITDEYKVPSKKFKVLGNTDRHSIKKNLIGALLFDSGETAEATRLKRTARRRYTRRKNRICYLQEIFSNEMAKVDDSFFHRLEESFLVEEDKKHERHPIFGNIVDEVAYHEKYPTIYHLRKKLVDSTDKADLRLIYLALAHMIKFRGHFLIEGDLNPDNSDVDKLFIQLVQTYNQLFEENPINASGVDAKAILSARLSKSRRLENLIAQLPGEKKNGLFGNLIALSLGLTPNFKSNFDLAEDAKLQLSKDTYDDDLDNLLAQIGDQYADLFLAAKNLSDAILLSDILRVNTEITKAPLSASMIKRYDEHHQDLTLLKALVRQQLPEKYKEIFFDQSKNGYAGYIDGGASQEEFYKFIKPILEKMDGTEELLVKLNREDLLRKQRTFDNGSIPHQIHLGELHAILRRQEDFYPFLKDNREKIEKILTFRIPYYVGPLARGNSRFAWMTRKSEETITPWNFEEVVDKGASAQSFIERMTNFDKNLPNEKVLPKHSLLYEYFTVYNELTKVKYVTEGMRKPAFLSGEQKKAIVDLLFKTNRKVTVKQLKEDYFKKIECFDSVEISGVEDRFNASLGTYHDLLKIIKDKDFLDNEENEDILEDIVLTLTLFEDREMIEERLKTYAHLFDDKVMKQLKRRRYTGWGRLSRKLINGIRDKQSGKTILDFLKSDGFANRNFMQLIHDDSLTFKEDIQKAQVSGQGDSLHEHIANLAGSPAIKKGILQTVKVVDELVKVMGRHKPENIVIEMARENQTTQKGQKNSRERMKRIEEGIKELGSQILKEHPVENTQLQNEKLYLYYLQNGRDMYVDQELDINRLSDYDVDHIVPQSFLKDDSIDNKVLTRSDKARGKSDNVPSEEVVKKMKNYWRQLLNAKLITQRKFDNLTKAERGGLSELDKAGFIKRQLVETRQITKHVAQILDSRMNTKYDENDKLIREVKVITLKSKLVSDFRKDFQFYKVREINNYHHAHDAYLNAVVGTALIKKYPKLESEFVYGDYKVYDVRKMIAKSEQEIGKATAKYFFYSNIMNFFKTEITLANGEIRKRPLIETNGETGEIVWDKGRDFATVRKVLSMPQVNIVKKTEVQTGGFSKESILPKRNSDKLIARKKDWDPKKYGGFDSPTVAYSVLVVAKVEKGKSKKLKSVKELLGITIMERSSFEKNPIDFLEAKGYKEVKKDLIIKLPKYSLFELENGRKRMLASAGELQKGNELALPSKYVNFLYLASHYEKLKGSPEDNEQKQLFVEQHKHYLDEIIEQISEFSKRVILADANLDKVLSAYNKHRDKPIREQAENIIHLFTLTNLGAPAAFKYFDTTIDRKRYTSTKEVLDATLIHQSITGLYETRIDLSQLGGDGGPAPGGGGGSGGLLGRDLLTKLKAQIQFSTEGPQVTWEDRPAMCLVLNLEEEYRLHEKPVPPSIDPSWLQLFPMVWAEKAGMGLANQVPPVVVELKSDASPVAVRQYPMSKEAREGIRPHIQRFLDLGILVPCQSPWNTPLLPVKKPGTNDYRPVQDLREVNKRVQDIHPTVPNPYNLLSSLPPSHTWYSVLDLKDAFFCLKLHPNSQPLFAFEWRDPEKGNTGQLTWTRLPQGFKNSPTLFNEALHRDLASFRALNPQVVMLQYVDDLLVAAPTYRDCKEGTRRLLQELSKLGYRVSAKKAQLCREEVTYLGYLLKGGKRWLTPARKATVMKIPTPTTPRQVREFLGKAGFCRLFIPGFASLAAPLYPLTRPKVPFTWTEAHQEAFGRIKEALLSAPALALPDLTKPFALYVDEKEGVARGVLTQTLGPWRRPVAYLSKKLDPVASGWPTCLKAIAAVALLLKDADKLTLGQNVLVIAPHNLESIVRQPPDRWMTNARMTHYQSLLLNERVSFAPPAILNPATLLPVESDDTPIHICSEILAEETGTRPDLRDQPLPGVPAWYTDGSSFIMDGRRQAGAAIVDNKRTVWASNLPEGTSAQKAELIALTQALRLAEGKSINIYTDSRYAFATAHVHGAIYKQRGWLTSAGKDIKNKEEILALLEAIHLPKRVAIIHCPGHQRGTDPVATGNRKADEAAKQAAQSTRILTETTKNAGKRTADGSEFEKRTADGSEFESPKKKAKVE

SEQ ID NO: 7032 - protein, 2094 aa, synthetic construct
MPAAKRVKLDGGDKKYSIGLDIGTNSVGWAVITDEYKVPSKKFKVLGNTDRHSIKKNLIGALLFDSGETAEATRLKRTARRRYTRRKNRICYLQEIFSNEMAKVDDSFFHRLEESFLVEEDKKHERHPIFGNIVDEVAYHEKYPTIYHLRKKLVDSTDKADLRLIYLALAHMIKFRGHFLIEGDLNPDNSDVDKLFIQLVQTYNQLFEENPINASGVDAKAILSARLSKSRRLENLIAQLPGEKKNGLFGNLIALSLGLTPNFKSNFDLAEDAKLQLSKDTYDDDLDNLLAQIGDQYADLFLAAKNLSDAILLSDILRVNTEITKAPLSASMIKRYDEHHQDLTLLKALVRQQLPEKYKEIFFDQSKNGYAGYIDGGASQEEFYKFIKPILEKMDGTEELLVKLNREDLLRKQRTFDNGSIPHQIHLGELHAILRRQEDFYPFLKDNREKIEKILTFRIPYYVGPLARGNSRFAWMTRKSEETITPWNFEEVVDKGASAQSFIERMTNFDKNLPNEKVLPKHSLLYEYFTVYNELTKVKYVTEGMRKPAFLSGEQKKAIVDLLFKTNRKVTVKQLKEDYFKKIECFDSVEISGVEDRFNASLGTYHDLLKIIKDKDFLDNEENEDILEDIVLTLTLFEDREMIEERLKTYAHLFDDKVMKQLKRRRYTGWGRLSRKLINGIRDKQSGKTILDFLKSDGFANRNFMQLIHDDSLTFKEDIQKAQVSGQGDSLHEHIANLAGSPAIKKGILQTVKVVDELVKVMGRHKPENIVIEMARENQTTQKGQKNSRERMKRIEEGIKELGSQILKEHPVENTQLQNEKLYLYYLQNGRDMYVDQELDINRLSDYDVDHIVPQSFLKDDSIDNKVLTRSDKARGKSDNVPSEEVVKKMKNYWRQLLNAKLITQRKFDNLTKAERGGLSELDKAGFIKRQLVETRQITKHVAQILDSRMNTKYDENDKLIREVKVITLKSKLVSDFRKDFQFYKVREINNYHHAHDAYLNAVVGTALIKKYPKLESEFVYGDYKVYDVRKMIAKSEQEIGKATAKYFFYSNIMNFFKTEITLANGEIRKRPLIETNGETGEIVWDKGRDFATVRKVLSMPQVNIVKKTEVQTGGFSKESILPKRNSDKLIARKKDWDPKKYGGFDSPTVAYSVLVVAKVEKGKSKKLKSVKELLGITIMERSSFEKNPIDFLEAKGYKEVKKDLIIKLPKYSLFELENGRKRMLASAGELQKGNELALPSKYVNFLYLASHYEKLKGSPEDNEQKQLFVEQHKHYLDEIIEQISEFSKRVILADANLDKVLSAYNKHRDKPIREQAENIIHLFTLTNLGAPAAFKYFDTTIDRKRYTSTKEVLDATLIHQSITGLYETRIDLSQLGGDGGPAPGGGGGSGGTLNLEDEYRLYETSAEPEVSPGSTWLSDFPQAWAETGGMGLAVRQAPLIIPLKATSTPVSIKQYPMSQEAKLGIKPHIQRLLDQGILVPCQSPWNTPLLPVKKPGTNDYRPVQDLREVNKRVEDIHPTVPNPYNLLSGLPPSHRWYTVLDLKDAFFCLRLHPTSQPLFAFEWRDPGMGISGQLTWTRLPQGFKNSPTLFNEALHRDLADFRIQHPDLILLQYVDDILLAATSELDCQQGTRALLLTLGNLGYRASAKKAQLCQKQVKYLGYLLKEGQRWLTEARKETVMGQPTPKTPRQLREFLGKAGFCRLFIPGFAEMAAPLYPLTKPGTLFNWGPDQQKAYQEIKQALLTAPALGLPDLTKPFELFVDEKQGYAKGVLTQKLGPWRRPVAYLSKKLDPVAAGWPPCLRMVAAIAVLRKDAGKLTMGQPLVILAPHAVEALVKQPPDRWLSNARMTHYQAMLLDTDRVQFGPVVALNPATLLPLPEEGAPHDCLEILAETHGTRPDLTDQPIPDADHTWYTDGSSFLQEGQRKAGAAVTTETEVIWARALPAGTSAQRAELIALTQALKMAEGKRLNVYTDSRYAFATAHIHGEIYRRRGWLTSEGREIKNKSEILALLKALFLPKRLSIIHCLGHQKGDSAEARGNRLADQAAREAAIKTPPDTSTLLAGKRTADGSEFEKRTADGSEFESPKKKAKVE

SEQ ID NO: 7033 - protein, 2094 aa, synthetic construct
MPAAKRVKLDGGDKKYSIGLDIGTNSVGWAVITDEYKVPSKKFKVLGNTDRHSIKKNLIGALLFDSGETAEATRLKRTARRRYTRRKNRICYLQEIFSNEMAKVDDSFFHRLEESFLVEEDKKHERHPIFGNIVDEVAYHEKYPTIYHLRKKLVDSTDKADLRLIYLALAHMIKFRGHFLIEGDLNPDNSDVDKLFIQLVQTYNQLFEENPINASGVDAKAILSARLSKSRRLENLIAQLPGEKKNGLFGNLIALSLGLTPNFKSNFDLAEDAKLQLSKDTYDDDLDNLLAQIGDQYADLFLAAKNLSDAILLSDILRVNTEITKAPLSASMIKRYDEHHQDLTLLKALVRQQLPEKYKEIFFDQSKNGYAGYIDGGASQEEFYKFIKPILEKMDGTEELLVKLNREDLLRKQRTFDNGSIPHQIHLGELHAILRRQEDFYPFLKDNREKIEKILTFRIPYYVGPLARGNSRFAWMTRKSEETITPWNFEEVVDKGASAQSFIERMTNFDKNLPNEKVLPKHSLLYEYFTVYNELTKVKYVTEGMRKPAFLSGEQKKAIVDLLFKTNRKVTVKQLKEDYFKKIECFDSVEISGVEDRFNASLGTYHDLLKIIKDKDFLDNEENEDILEDIVLTLTLFEDREMIEERLKTYAHLFDDKVMKQLKRRRYTGWGRLSRKLINGIRDKQSGKTILDFLKSDGFANRNFMQLIHDDSLTFKEDIQKAQVSGQGDSLHEHIANLAGSPAIKKGILQTVKVVDELVKVMGRHKPENIVIEMARENQTTQKGQKNSRERMKRIEEGIKELGSQILKEHPVENTQLQNEKLYLYYLQNGRDMYVDQELDINRLSDYDVDHIVPQSFLKDDSIDNKVLTRSDKARGKSDNVPSEEVVKKMKNYWRQLLNAKLITQRKFDNLTKAERGGLSELDKAGFIKRQLVETRQITKHVAQILDSRMNTKYDENDKLIREVKVITLKSKLVSDFRKDFQFYKVREINNYHHAHDAYLNAVVGTALIKKYPKLESEFVYGDYKVYDVRKMIAKSEQEIGKATAKYFFYSNIMNFFKTEITLANGEIRKRPLIETNGETGEIVWDKGRDFATVRKVLSMPQVNIVKKTEVQTGGFSKESILPKRNSDKLIARKKDWDPKKYGGFDSPTVAYSVLVVAKVEKGKSKKLKSVKELLGITIMERSSFEKNPIDFLEAKGYKEVKKDLIIKLPKYSLFELENGRKRMLASAGELQKGNELALPSKYVNFLYLASHYEKLKGSPEDNEQKQLFVEQHKHYLDEIIEQISEFSKRVILADANLDKVLSAYNKHRDKPIREQAENIIHLFTLTNLGAPAAFKYFDTTIDRKRYTSTKEVLDATLIHQSITGLYETRIDLSQLGGDGGPAPGGGGGSGGTLGIEDEYRLHETSTEPDVSLGSTWLSDFPQAWAETGGMGLAVRQAPLIIPLKATSTPVSIQQYPMSHEARLGIKPHIQRLLDQGILVPCQSPWNTPLLPVKKPGTNDYRPVQDLREVNKRVEDIHPTVPNPYNLLSGLPPSHQWYTVLDLKDAFFCLRLHPTSQPLFAFEWRDPGMGISGQLTWTRLPQGFKNSPTLFNEALHRDLADFRIQHPDLILLQYVDDILLAATSELDCQQGTRALLQTLGDLGYRASAKKAQICQKQVKYLGYLLREGQRWLTEARKETVMGQPVPKTPRQLREFLGTAGFCRLWIPGFAEMAAPLYPLTKPGTLFSWGPDQQKAYQEIKQALLTAPALGLPDLTKPFELFVDEKQGYAKGVLTQKLGPWRRPVAYLSKKLDPVAAGWPPCLRMVAAIAVLTKDAGKLTMGQPLVILAPHAVEALVKQPPDRWLSNARMTHYQAMLLDTDRVQFGPVVALNPATLLPLPEEGAPHDCLEILAETHGTRPDLTDQPIPDADHTWYTDGSSFLQEGQRKAGAAVTTETEVIWAGALPAGTSAQRAELIALTQALKMAEGKRLNVYTDSRYAFATAHIHGEIYRRRGWLTSEGREIKNKSEILALLKALFLPKRLSIIHCLGHQKGDSAEARGNRLADQAAREAAIKTPPDTSTLLAGKRTADGSEFEKRTADGSEFESPKKKAKVE

SEQ ID NO: 7034 - protein, 2094 aa, synthetic construct
MPAAKRVKLDGGDKKYSIGLDIGTNSVGWAVITDEYKVPSKKFKVLGNTDRHSIKKNLIGALLFDSGETAEATRLKRTARRRYTRRKNRICYLQEIFSNEMAKVDDSFFHRLEESFLVEEDKKHERHPIFGNIVDEVAYHEKYPTIYHLRKKLVDSTDKADLRLIYLALAHMIKFRGHFLIEGDLNPDNSDVDKLFIQLVQTYNQLFEENPINASGVDAKAILSARLSKSRRLENLIAQLPGEKKNGLFGNLIALSLGLTPNFKSNFDLAEDAKLQLSKDTYDDDLDNLLAQIGDQYADLFLAAKNLSDAILLSDILRVNTEITKAPLSASMIKRYDEHHQDLTLLKALVRQQLPEKYKEIFFDQSKNGYAGYIDGGASQEEFYKFIKPILEKMDGTEELLVKLNREDLLRKQRTFDNGSIPHQIHLGELHAILRRQEDFYPFLKDNREKIEKILTFRIPYYVGPLARGNSRFAWMTRKSEETITPWNFEEVVDKGASAQSFIERMTNFDKNLPNEKVLPKHSLLYEYFTVYNELTKVKYVTEGMRKPAFLSGEQKKAIVDLLFKTNRKVTVKQLKEDYFKKIECFDSVEISGVEDRFNASLGTYHDLLKIIKDKDFLDNEENEDILEDIVLTLTLFEDREMIEERLKTYAHLFDDKVMKQLKRRRYTGWGRLSRKLINGIRDKQSGKTILDFLKSDGFANRNFMQLIHDDSLTFKEDIQKAQVSGQGDSLHEHIANLAGSPAIKKGILQTVKVVDELVKVMGRHKPENIVIEMARENQTTQKGQKNSRERMKRIEEGIKELGSQILKEHPVENTQLQNEKLYLYYLQNGRDMYVDQELDINRLSDYDVDHIVPQSFLKDDSIDNKVLTRSDKARGKSDNVPSEEVVKKMKNYWRQLLNAKLITQRKFDNLTKAERGGLSELDKAGFIKRQLVETRQITKHVAQILDSRMNTKYDENDKLIREVKVITLKSKLVSDFRKDFQFYKVREINNYHHAHDAYLNAVVGTALIKKYPKLESEFVYGDYKVYDVRKMIAKSEQEIGKATAKYFFYSNIMNFFKTEITLANGEIRKRPLIETNGETGEIVWDKGRDFATVRKVLSMPQVNIVKKTEVQTGGFSKESILPKRNSDKLIARKKDWDPKKYGGFDSPTVAYSVLVVAKVEKGKSKKLKSVKELLGITIMERSSFEKNPIDFLEAKGYKEVKKDLIIKLPKYSLFELENGRKRMLASAGELQKGNELALPSKYVNFLYLASHYEKLKGSPEDNEQKQLFVEQHKHYLDEIIEQISEFSKRVILADANLDKVLSAYNKHRDKPIREQAENIIHLFTLTNLGAPAAFKYFDTTIDRKRYTSTKEVLDATLIHQSITGLYETRIDLSQLGGDGGPAPGGGGGSGGTLNIEDEYRLHETSKEPDVSLGSTWLSDFPQAWAETGGMGLAVRQAPLIIPLKATSTPVSIKQYPMSQEARLGIKPHIQRLLDQGILVPCQSPWNTPLLPVKKPGTNDYRPVQDLREVNKRVEDIHPTVPNPYNLLSGLPPSHQWYTVLDLKDAFFCLRLHPTSQPLFAFEWRDPEMGISGQLTWTRLPQGFKNSPTLFNEALHRDLAGFRIQHPDLILLQYVDDLLLAATSELDCQQGTRALLQTLGDLGYRASAKKAQICQKQVKYLGYLLKEGQRWLTEARKETVMGQPIPKTPRQLREFLGTAGFCRLWIPGFAEMAAPLYPLTKPGTLFNWGPDQQKAFQEIKQALLTAPALGLPDLTKPFELFVDEKQGYAKGVLTQKLGPWRRPVAYLSKKLDPVAAGWPPCLRMVAAIAVLTKDAGKLTMGQPLVILAPHAVEALVKQPPDRWLSNARMTHYQALLLDTDRVQFGPVVALNPATLLPLPEEGLQHDCLDILAEAHGTRSDLMDQPLPDADHTWYTDGSSFLQEGQRKAGAAVTTETEVIWARALPAGTSAQRAELIALTQALKMAEGKKLNVYTDSRYAFATAHIHGEIYRRRGWLTSEGKEIKNKDEILALLKALFLPKRLSIIHCPGHQKGNSAEARGNRMADQAAREVATRETPETSTLLAGKRTADGSEFEKRTADGSEFESPKKKAKVE

SEQ ID NO: 7035 - protein, 2094 aa, synthetic construct
MPAAKRVKLDGGDKKYSIGLDIGTNSVGWAVITDEYKVPSKKFKVLGNTDRHSIKKNLIGALLFDSGETAEATRLKRTARRRYTRRKNRICYLQEIFSNEMAKVDDSFFHRLEESFLVEEDKKHERHPIFGNIVDEVAYHEKYPTIYHLRKKLVDSTDKADLRLIYLALAHMIKFRGHFLIEGDLNPDNSDVDKLFIQLVQTYNQLFEENPINASGVDAKAILSARLSKSRRLENLIAQLPGEKKNGLFGNLIALSLGLTPNFKSNFDLAEDAKLQLSKDTYDDDLDNLLAQIGDQYADLFLAAKNLSDAILLSDILRVNTEITKAPLSASMIKRYDEHHQDLTLLKALVRQQLPEKYKEIFFDQSKNGYAGYIDGGASQEEFYKFIKPILEKMDGTEELLVKLNREDLLRKQRTFDNGSIPHQIHLGELHAILRRQEDFYPFLKDNREKIEKILTFRIPYYVGPLARGNSRFAWMTRKSEETITPWNFEEVVDKGASAQSFIERMTNFDKNLPNEKVLPKHSLLYEYFTVYNELTKVKYVTEGMRKPAFLSGEQKKAIVDLLFKTNRKVTVKQLKEDYFKKIECFDSVEISGVEDRFNASLGTYHDLLKIIKDKDFLDNEENEDILEDIVLTLTLFEDREMIEERLKTYAHLFDDKVMKQLKRRRYTGWGRLSRKLINGIRDKQSGKTILDFLKSDGFANRNFMQLIHDDSLTFKEDIQKAQVSGQGDSLHEHIANLAGSPAIKKGILQTVKVVDELVKVMGRHKPENIVIEMARENQTTQKGQKNSRERMKRIEEGIKELGSQILKEHPVENTQLQNEKLYLYYLQNGRDMYVDQELDINRLSDYDVDHIVPQSFLKDDSIDNKVLTRSDKARGKSDNVPSEEVVKKMKNYWRQLLNAKLITQRKFDNLTKAERGGLSELDKAGFIKRQLVETRQITKHVAQILDSRMNTKYDENDKLIREVKVITLKSKLVSDFRKDFQFYKVREINNYHHAHDAYLNAVVGTALIKKYPKLESEFVYGDYKVYDVRKMIAKSEQEIGKATAKYFFYSNIMNFFKTEITLANGEIRKRPLIETNGETGEIVWDKGRDFATVRKVLSMPQVNIVKKTEVQTGGFSKESILPKRNSDKLIARKKDWDPKKYGGFDSPTVAYSVLVVAKVEKGKSKKLKSVKELLGITIMERSSFEKNPIDFLEAKGYKEVKKDLIIKLPKYSLFELENGRKRMLASAGELQKGNELALPSKYVNFLYLASHYEKLKGSPEDNEQKQLFVEQHKHYLDEIIEQISEFSKRVILADANLDKVLSAYNKHRDKPIREQAENIIHLFTLTNLGAPAAFKYFDTTIDRKRYTSTKEVLDATLIHQSITGLYETRIDLSQLGGDGGPAPGGGGGSGGTLNIEDEYRLHETSKGPDVPLGSTWLSDFPQAWAETGGMGLAVRQAPLIIPLKATSTPVSIKQYPMSQEARLGIKPHIQRLLDQGILVPCQSPWNTPLLPVKKPGTNDYRPVQDLREVNKRVEDIHPTVPNPYNLLSGLPPSHQWYTVLDLKDAFFCLRLHPTSQSLFAFEWRDPEMGISGQLTWTRLPQGFKNSPTLFNEALHRDLADFRIQHPDLILLQYVDDLLLAATSELDCQQGTRALLQTLGDLGYRASAKKAQICQKQVKYLGYLLKEGQRWLTEARKETVMGQPTPKTPRQLREFLGKAGFCRLFIPGFAEMAAPLYPLTKPGTLFEWGPDQQKAYQEIKQALLTAPALGLPDLTKPFELFVDEKQGYAKGVLTQKLGPWRRPVAYLSKKLDPVAAGWPPCLRMVAAIAVLTKDAGKLTMGQPLVILAPHAVEALVKQPPDRWLSNARMTHYQALLLDTDRVQFGPIVALNPATLLPLPEEGLQHDCLDILAEAHGTRPDLTDQPLPDADHTWYTDGSSFLQEGQRKAGAAVTTETEVVWAKALPAGTSAQRAELIALTQALKMAEGKKLNVYTDSRYAFATAHIHGEIYRRRGWLTSEGKEIKNKDEILALLKALFLPKRLSIIHCPGHQKGNRAEARGNRMADQAAREVATRETPETSTLLAGKRTADGSEFEKRTADGSEFESPKKKAKVE

SEQ ID NO: 7036 - protein, 2094 aa, synthetic construct; identical to SEQ ID NO: 4521

SEQ ID NO: 7037 - protein, 2094 aa, synthetic construct
MPAAKRVKLDGGDKKYSIGLDIGTNSVGWAVITDEYKVPSKKFKVLGNTDRHSIKKNLIGALLFDSGETAEATRLKRTARRRYTRRKNRICYLQEIFSNEMAKVDDSFFHRLEESFLVEEDKKHERHPIFGNIVDEVAYHEKYPTIYHLRKKLVDSTDKADLRLIYLALAHMIKFRGHFLIEGDLNPDNSDVDKLFIQLVQTYNQLFEENPINASGVDAKAILSARLSKSRRLENLIAQLPGEKKNGLFGNLIALSLGLTPNFKSNFDLAEDAKLQLSKDTYDDDLDNLLAQIGDQYADLFLAAKNLSDAILLSDILRVNTEITKAPLSASMIKRYDEHHQDLTLLKALVRQQLPEKYKEIFFDQSKNGYAGYIDGGASQEEFYKFIKPILEKMDGTEELLVKLNREDLLRKQRTFDNGSIPHQIHLGELHAILRRQEDFYPFLKDNREKIEKILTFRIPYYVGPLARGNSRFAWMTRKSEETITPWNFEEVVDKGASAQSFIERMTNFDKNLPNEKVLPKHSLLYEYFTVYNELTKVKYVTEGMRKPAFLSGEQKKAIVDLLFKTNRKVTVKQLKEDYFKKIECFDSVEISGVEDRFNASLGTYHDLLKIIKDKDFLDNEENEDILEDIVLTLTLFEDREMIEERLKTYAHLFDDKVMKQLKRRRYTGWGRLSRKLINGIRDKQSGKTILDFLKSDGFANRNFMQLIHDDSLTFKEDIQKAQVSGQGDSLHEHIANLAGSPAIKKGILQTVKVVDELVKVMGRHKPENIVIEMARENQTTQKGQKNSRERMKRIEEGIKELGSQILKEHPVENTQLQNEKLYLYYLQNGRDMYVDQELDINRLSDYDVDHIVPQSFLKDDSIDNKVLTRSDKARGKSDNVPSEEVVKKMKNYWRQLLNAKLITQRKFDNLTKAERGGLSELDKAGFIKRQLVETRQITKHVAQILDSRMNTKYDENDKLIREVKVITLKSKLVSDFRKDFQFYKVREINNYHHAHDAYLNAVVGTALIKKYPKLESEFVYGDYKVYDVRKMIAKSEQEIGKATAKYFFYSNIMNFFKTEITLANGEIRKRPLIETNGETGEIVWDKGRDFATVRKVLSMPQVNIVKKTEVQTGGFSKESILPKRNSDKLIARKKDWDPKKYGGFDSPTVAYSVLVVAKVEKGKSKKLKSVKELLGITIMERSSFEKNPIDFLEAKGYKEVKKDLIIKLPKYSLFELENGRKRMLASAGELQKGNELALPSKYVNFLYLASHYEKLKGSPEDNEQKQLFVEQHKHYLDEIIEQISEFSKRVILADANLDKVLSAYNKHRDKPIREQAENIIHLFTLTNLGAPAAFKYFDTTIDRKRYTSTKEVLDATLIHQSITGLYETRIDLSQLGGDGGPAPGGGGGSGGTLNIEDEHRLHETSKEPDVSLGSTWLSDFPQAWAETGGMGLAVRQAPLIIPLKATSTPVSIKQYPMSQEARLGIKPHIQRLLDQGILVPCQSPWNTPLLPVKKPGTNDYRPVQDLREVNKRVEDIHPTVPNPYNLLSGLPPSHQWYTVLDLKDAFFCLRLHPTSQPLFAFEWRDPEMGISGQLTWTRLPQGFKNSPTLFDEALHRDLADFRIQHPDLILLQYVDDLLLAATSELDCQQGTRALLQTLGNLGYRASAKKAQICQKQVKYLGYLLKEGQRWLTEARKETVMGQPTPKTPRQLREFLGTAGFCRLWIPGFAEMAAPLYPLTKTGTLFNWGPDQQKAYQEIKQALLTAPALGLPDLTKPFELFVDEKQGYAKGVLTQKLGPWRRPVAYLSKKLDPVAAGWPPCLRMVAAIAVLTKDAGKLTMGQPLVILAPHAVEALVKQPPDRWLSNARMTHYQALLLDTDRVQFGPVVALNPATLLPLPEEGLQHNCLDILAEAHGTRPDLTDQPLPDADHTWYTDGSSLLQEGQRKAGAAVTTETEVIWAKALPAGTSAQRAELIALTQALKMAEGKKLNVYTDSRYAFATAHIHGEIYRRRGLLTSEGKEIKNKDEILALLKALFLPKRLSIIHCPGHQKGHSAEARGNRMADQAARKAAITETPDTSTLLAGKRTADGSEFEKRTADGSEFESPKKKAKVE

SEQ ID NO: 7038 - protein, 2094 aa, synthetic construct; identical to SEQ ID NO: 4521

SEQ ID NO: 7039 - protein, 2022 aa, synthetic construct
MPAAKRVKLDGGDKKYSIGLDIGTNSVGWAVITDEYKVPSKKFKVLGNTDRHSIKKNLIGALLFDSGETAEATRLKRTARRRYTRRKNRICYLQEIFSNEMAKVDDSFFHRLEESFLVEEDKKHERHPIFGNIVDEVAYHEKYPTIYHLRKKLVDSTDKADLRLIYLALAHMIKFRGHFLIEGDLNPDNSDVDKLFIQLVQTYNQLFEENPINASGVDAKAILSARLSKSRRLENLIAQLPGEKKNGLFGNLIALSLGLTPNFKSNFDLAEDAKLQLSKDTYDDDLDNLLAQIGDQYADLFLAAKNLSDAILLSDILRVNTEITKAPLSASMIKRYDEHHQDLTLLKALVRQQLPEKYKEIFFDQSKNGYAGYIDGGASQEEFYKFIKPILEKMDGTEELLVKLNREDLLRKQRTFDNGSIPHQIHLGELHAILRRQEDFYPFLKDNREKIEKILTFRIPYYVGPLARGNSRFAWMTRKSEETITPWNFEEVVDKGASAQSFIERMTNFDKNLPNEKVLPKHSLLYEYFTVYNELTKVKYVTEGMRKPAFLSGEQKKAIVDLLFKTNRKVTVKQLKEDYFKKIECFDSVEISGVEDRFNASLGTYHDLLKIIKDKDFLDNEENEDILEDIVLTLTLFEDREMIEERLKTYAHLFDDKVMKQLKRRRYTGWGRLSRKLINGIRDKQSGKTILDFLKSDGFANRNFMQLIHDDSLTFKEDIQKAQVSGQGDSLHEHIANLAGSPAIKKGILQTVKVVDELVKVMGRHKPENIVIEMARENQTTQKGQKNSRERMKRIEEGIKELGSQILKEHPVENTQLQNEKLYLYYLQNGRDMYVDQELDINRLSDYDVDHIVPQSFLKDDSIDNKVLTRSDKARGKSDNVPSEEVVKKMKNYWRQLLNAKLITQRKFDNLTKAERGGLSELDKAGFIKRQLVETRQITKHVAQILDSRMNTKYDENDKLIREVKVITLKSKLVSDFRKDFQFYKVREINNYHHAHDAYLNAVVGTALIKKYPKLESEFVYGDYKVYDVRKMIAKSEQEIGKATAKYFFYSNIMNFFKTEITLANGEIRKRPLIETNGETGEIVWDKGRDFATVRKVLSMPQVNIVKKTEVQTGGFSKESILPKRNSDKLIARKKDWDPKKYGGFDSPTVAYSVLVVAKVEKGKSKKLKSVKELLGITIMERSSFEKNPIDFLEAKGYKEVKKDLIIKLPKYSLFELENGRKRMLASAGELQKGNELALPSKYVNFLYLASHYEKLKGSPEDNEQKQLFVEQHKHYLDEIIEQISEFSKRVILADANLDKVLSAYNKHRDKPIREQAENIIHLFTLTNLGAPAAFKYFDTTIDRKRYTSTKEVLDATLIHQSITGLYETRIDLSQLGGDGGPAPGGGGGSGGGRDIMKDIKVRLMTDSPDDSQDLMIGAIESNLFADQISWKSDQPVWLNQWPLKQEKLQALQQLVTEQLQLGHLEESNSPWNTPVFVIKKKSGKWRLLQDLRAVNATMHDMGALQPGLPSPVAPPKGWEIIIIDLQDCFFNIKLHPEDCKRFAFSVPSPNFKRPYQRFQWKVLPQGMKNSPTLCQKFVDKAILTVRDKYQDSYIVHYMDDILLAHPSRSIVDEILTSMIQALNKHGLVVSTEKIQKYDNLKYLGTHIQGDSVSYQKLQIRTDKLRTLNDFQKLLGNINWIRPFLKLTTGELKPLFEILNPDSNPISTRKLTPEACKALQLMNERLSTARVKRLDLSQPWSLCILKTEYTPTACLWQDGVVEWIHLPHISPKVITPYDIFCTQLIIKGRHRSKELFSKDPDYIVVPYTKVQFDLLLQEKEDWPISLLGFLGEVHFHLPKDPLLTFTLQTAIIFPHMTSTTPLEKGIVIFTDGSANGRSVTYIQGREPIIKENTQNTAQQAEIVAVITAFEEVSQPFNLYTDSKYVTGLFPEIETATLSPRTKIYTELKHLQRLIHKRQEKFYIGHIRGHTGLPGPLAQGNAYADSLTRILTAGKRTADGSEFEKRTADGSEFESPKKKAKVE

SEQ ID NO: 7040 - protein, 2086 aa, synthetic construct
MPAAKRVKLDGGDKKYSIGLDIGTNSVGWAVITDEYKVPSKKFKVLGNTDRHSIKKNLIGALLFDSGETAEATRLKRTARRRYTRRKNRICYLQEIFSNEMAKVDDSFFHRLEESFLVEEDKKHERHPIFGNIVDEVAYHEKYPTIYHLRKKLVDSTDKADLRLIYLALAHMIKFRGHFLIEGDLNPDNSDVDKLFIQLVQTYNQLFEENPINASGVDAKAILSARLSKSRRLENLIAQLPGEKKNGLFGNLIALSLGLTPNFKSNFDLAEDAKLQLSKDTYDDDLDNLLAQIGDQYADLFLAAKNLSDAILLSDILRVNTEITKAPLSASMIKRYDEHHQDLTLLKALVRQQLPEKYKEIFFDQSKNGYAGYIDGGASQEEFYKFIKPILEKMDGTEELLVKLNREDLLRKQRTFDNGSIPHQIHLGELHAILRRQEDFYPFLKDNREKIEKILTFRIPYYVGPLARGNSRFAWMTRKSEETITPWNFEEVVDKGASAQSFIERMTNFDKNLPNEKVLPKHSLLYEYFTVYNELTKVKYVTEGMRKPAFLSGEQKKAIVDLLFKTNRKVTVKQLKEDYFKKIECFDSVEISGVEDRFNASLGTYHDLLKIIKDKDFLDNEENEDILEDIVLTLTLFEDREMIEERLKTYAHLFDDKVMKQLKRRRYTGWGRLSRKLINGIRDKQSGKTILDFLKSDGFANRNFMQLIHDDSLTFKEDIQKAQVSGQGDSLHEHIANLAGSPAIKKGILQTVKVVDELVKVMGRHKPENIVIEMARENQTTQKGQKNSRERMKRIEEGIKELGSQILKEHPVENTQLQNEKLYLYYLQNGRDMYVDQELDINRLSDYDVDHIVPQSFLKDDSIDNKVLTRSDKARGKSDNVPSEEVVKKMKNYWRQLLNAKLITQRKFDNLTKAERGGLSELDKAGFIKRQLVETRQITKHVAQILDSRMNTKYDENDKLIREVKVITLKSKLVSDFRKDFQFYKVREINNYHHAHDAYLNAVVGTALIKKYPKLESEFVYGDYKVYDVRKMIAKSEQEIGKATAKYFFYSNIMNFFKTEITLANGEIRKRPLIETNGETGEIVWDKGRDFATVRKVLSMPQVNIVKKTEVQTGGFSKESILPKRNSDKLIARKKDWDPKKYGGFDSPTVAYSVLVVAKVEKGKSKKLKSVKELLGITIMERSSFEKNPIDFLEAKGYKEVKKDLIIKLPKYSLFELENGRKRMLASAGELQKGNELALPSKYVNFLYLASHYEKLKGSPEDNEQKQLFVEQHKHYLDEIIEQISEFSKRVILADANLDKVLSAYNKHRDKPIREQAENIIHLFTLTNLGAPAAFKYFDTTIDRKRYTSTKEVLDATLIHQSITGLYETRIDLSQLGGDGGPAPGGGGGSGGLDDEYRLYSPLVKPDQNIQFWLEQFPQAWAETAGMGLAKQVPPQVIQLKASATPVSVRQYPLSKEAQEGIRPHVQRLIQQGILVPVQSPWNTPLLPVRKPGTNDYRPVQDLREVNKRVQDIHPTVPNPYNLLCALPPQRSWYTVLDLKDAFFCLRLHPTSQPLFAFEWRDPGTGRTGQLTWTRLPQGFKNSPTIFNEALHRDLANFRIQHPQVTLLQYVDDLLLAGATKQDCLEGTKALLLELSDLGYRASAKKAQICRREVTYLGYSLRDGQRWLTEARKKTVVQIPAPTTAKQVREFLGKAGFCRLFIPGFATLAAPLYPLTKPKGEFSWAPEHQKAFDAIKKALLSAPALALPDVTKPFTLYVDERKGVARGVLTQTLGPWRRPVAYLSKKLDPVASGWPVCLKAIAAVAILVKDADKLTLGQNITVIAPHALENIVRQPPDRWMTNARMTHYQSLLLTERVTFAPPAALNPATLLPEETDEPVTHDCHQLLIEETGVRKDLTDIPLTGEVLTWFTDGSSYVVEGKRMAGAAVVDGTRTIWASSLPEGTSAQKAELMALTQALRLAEGKSINIYTDSRYAFATAHVHGAIYKQRGWLTSAGREIKNKEEILSLLEALHLPKRLAIIHCPGHQKAKDPISRGNQMADRVAKQAAQGVNLLPAGKRTADGSEFEKRTADGSEFESPKKKAKVE

SEQ ID NO: 7041 - protein, 2174 aa, synthetic construct
MPAAKRVKLDGGDKKYSIGLDIGTNSVGWAVITDEYKVPSKKFKVLGNTDRHSIKKNLIGALLFDSGETAEATRLKRTARRRYTRRKNRICYLQEIFSNEMAKVDDSFFHRLEESFLVEEDKKHERHPIFGNIVDEVAYHEKYPTIYHLRKKLVDSTDKADLRLIYLALAHMIKFRGHFLIEGDLNPDNSDVDKLFIQLVQTYNQLFEENPINASGVDAKAILSARLSKSRRLENLIAQLPGEKKNGLFGNLIALSLGLTPNFKSNFDLAEDAKLQLSKDTYDDDLDNLLAQIGDQYADLFLAAKNLSDAILLSDILRVNTEITKAPLSASMIKRYDEHHQDLTLLKALVRQQLPEKYKEIFFDQSKNGYAGYIDGGASQEEFYKFIKPILEKMDGTEELLVKLNREDLLRKQRTFDNGSIPHQIHLGELHAILRRQEDFYPFLKDNREKIEKILTFRIPYYVGPLARGNSRFAWMTRKSEETITPWNFEEVVDKGASAQSFIERMTNFDKNLPNEKVLPKHSLLYEYFTVYNELTKVKYVTEGMRKPAFLSGEQKKAIVDLLFKTNRKVTVKQLKEDYFKKIECFDSVEISGVEDRFNASLGTYHDLLKIIKDKDFLDNEENEDILEDIVLTLTLFEDREMIEERLKTYAHLFDDKVMKQLKRRRYTGWGRLSRKLINGIRDKQSGKTILDFLKSDGFANRNFMQLIHDDSLTFKEDIQKAQVSGQGDSLHEHIANLAGSPAIKKGILQTVKVVDELVKVMGRHKPENIVIEMARENQTTQKGQKNSRERMKRIEEGIKELGSQILKEHPVENTQLQNEKLYLYYLQNGRDMYVDQELDINRLSDYDVDHIVPQSFLKDDSIDNKVLTRSDKARGKSDNVPSEEVVKKMKNYWRQLLNAKLITQRKFDNLTKAERGGLSELDKAGFIKRQLVETRQITKHVAQILDSRMNTKYDENDKLIREVKVITLKSKLVSDFRKDFQFYKVREINNYHHAHDAYLNAVVGTALIKKYPKLESEFVYGDYKVYDVRKMIAKSEQEIGKATAKYFFYSNIMNFFKTEITLANGEIRKRPLIETNGETGEIVWDKGRDFATVRKVLSMPQVNIVKKTEVQTGGFSKESILPKRNSDKLIARKKDWDPKKYGGFDSPTVAYSVLVVAKVEKGKSKKLKSVKELLGITIMERSSFEKNPIDFLEAKGYKEVKKDLIIKLPKYSLFELENGRKRMLASAGELQKGNELALPSKYVNFLYLASHYEKLKGSPEDNEQKQLFVEQHKHYLDEIIEQISEFSKRVILADANLDKVLSAYNKHRDKPIREQAENIIHLFTLTNLGAPAAFKYFDTTIDRKRYTSTKEVLDATLIHQSITGLYETRIDLSQLGGDGGPAPGGGGGSGGMDPLQLLQPLEAEIKGTKLKAHWNSGATITCVPEAFLEDERPIQTMLIKTIHGEKQQDVYYLTFKVQGRKVEAEVLASPYDYILLNPSDVPWLMKKPLQLTVLVPLHEYQERLLQQTALPKEQKELLQKLFLKYDALWQHWENQVGHRRIKPHNIATGTLAPRPQKQYPINPKAKPSIQIVIDDLLKQGVLIQQNSTMNTPVYPVPKPDGKWRMVLDYREVNKTIPLIAAQNQHSAGILSSIYRGKYKTTLDLTNGFWAHPITPESYWLTAFTWQGKQYCWTRLPQGFLNSPALFTADVVDLLKEIPNVQAYVDDIYISHDDPQEHLEQLEKIFSILLNAGYVVSLKKSEIAQREVEFLGFNITKEGRGLTDTFKQKLLNITPPKDLKQLQSILGLLNFARNFIPNYSELVKPLYTIVANANGKFISWTEDNSNQLQHIISVLNQADNLEERNPETRLIIKVNSSPSAGYIRYYNEGSKRPIMYVNYIFSKAEAKFTQTEKLLTTMHKGLIKAMDLAMGQEILVYSPIVSMTKIQRTPLPERKALPVRWITWMTYLEDPRIQFHYDKSLPELQQIPNVTEDVIAKTKHPSEFAMVFYTDGSAIKHPDVNKSHSAGMGIAQVQFIPEYKIVHQWSIPLGDHTAQLAEIAAVEFACKKALKISGPVLIVTDSFYVAESANKELPYWKSNGFLNNKKKPLRHVSKWKSIAECLQLKPDIIIMHEKGHQQPMTTLHTEGNNLADKLATQGSYVVHAGKRTADGSEFEKRTADGSEFESPKKKAKVE

SEQ ID NO: 7042 - protein, 2092 aa, synthetic construct
MPAAKRVKLDGGDKKYSIGLDIGTNSVGWAVITDEYKVPSKKFKVLGNTDRHSIKKNLIGALLFDSGETAEATRLKRTARRRYTRRKNRICYLQEIFSNEMAKVDDSFFHRLEESFLVEEDKKHERHPIFGNIVDEVAYHEKYPTIYHLRKKLVDSTDKADLRLIYLALAHMIKFRGHFLIEGDLNPDNSDVDKLFIQLVQTYNQLFEENPINASGVDAKAILSARLSKSRRLENLIAQLPGEKKNGLFGNLIALSLGLTPNFKSNFDLAEDAKLQLSKDTYDDDLDNLLAQIGDQYADLFLAAKNLSDAILLSDILRVNTEITKAPLSASMIKRYDEHHQDLTLLKALVRQQLPEKYKEIFFDQSKNGYAGYIDGGASQEEFYKFIKPILEKMDGTEELLVKLNREDLLRKQRTFDNGSIPHQIHLGELHAILRRQEDFYPFLKDNREKIEKILTFRIPYYVGPLARGNSRFAWMTRKSEETITPWNFEEVVDKGASAQSFIERMTNFDKNLPNEKVLPKHSLLYEYFTVYNELTKVKYVTEGMRKPAFLSGEQKKAIVDLLFKTNRKVTVKQLKEDYFKKIECFDSVEISGVEDRFNASLGTYHDLLKIIKDKDFLDNEENEDILEDIVLTLTLFEDREMIEERLKTYAHLFDDKVMKQLKRRRYTGWGRLSRKLINGIRDKQSGKTILDFLKSDGFANRNFMQLIHDDSLTFKEDIQKAQVSGQGDSLHEHIANLAGSPAIKKGILQTVKVVDELVKVMGRHKPENIVIEMARENQTTQKGQKNSRERMKRIEEGIKELGSQILKEHPVENTQLQNEKLYLYYLQNGRDMYVDQELDINRLSDYDVDHIVPQSFLKDDSIDNKVLTRSDKARGKSDNVPSEEVVKKMKNYWRQLLNAKLITQRKFDNLTKAERGGLSELDKAGFIKRQLVETRQITKHVAQILDSRMNTKYDENDKLIREVKVITLKSKLVSDFRKDFQFYKVREINNYHHAHDAYLNAVVGTALIKKYPKLESEFVYGDYKVYDVRKMIAKSEQEIGKATAKYFFYSNIMNFFKTEITLANGEIRKRPLIETNGETGEIVWDKGRDFATVRKVLSMPQVNIVKKTEVQTGGFSKESILPKRNSDKLIARKKDWDPKKYGGFDSPTVAYSVLVVAKVEKGKSKKLKSVKELLGITIMERSSFEKNPIDFLEAKGYKEVKKDLIIKLPKYSLFELENGRKRMLASAGELQKGNELALPSKYVNFLYLASHYEKLKGSPEDNEQKQLFVEQHKHYLDEIIEQISEFSKRVILADANLDKVLSAYNKHRDKPIREQAENIIHLFTLTNLGAPAAFKYFDTTIDRKRYTSTKEVLDATLIHQSITGLYETRIDLSQLGGDGGPAPGGGGGSGGVLNLEEEYRLHEKPVPSSIDPSWLQLFPTVWAERAGMGLANQVPPVVVELRSGASPVAVRQYPMSKEAREGIRPHIQRFLDLGVLVPCQSPWNTPLLPVKKPGTNDYRPVQDLREINKRVQDIHPTVPNPYNLLSSLPPSHTWYSVLDLKDAFFCLKLHPNSQPLFAFEWRDPEKGNTGQLTWTRLPQGFKNSPTLFDEALHRDLAPFRALNPQVVLLQYVDDLLVAAPTYRDCKEGTQKLLQELSKLGYRVSAKKAQLCQKEVTYLGYLLKEGKRWLTPARKATVMKIPPPTTPRQVREFLGTAGFCRLWIPGFASLAAPLYPLTKESIPFIWTEEHQKAFDRIKEALLSAPALALPDLTKPFTLYVDERAGVARGVLTQTLGPWRRPVAYLSKKLDPVASGWPTCLKAVAAVALLLKDADKLTLGQNVTVIASHSLESIVRQPPDRWMTNARMTHYQSLLLNERVSFAPPAVLNPATLLPVESEATPVHRCSEILAEETGTRRDLKDQPLPGVPAWYTDGSSFIAEGKRRAGAAIVDGKRTVWASSLPEGTSAQKAELVALTQALRLAEGKDINIYTDSRYAFATAHIHGAIYKQRGLLTSAGKDIKNKEEILALLEAIHLPKRVAIIHCPGHQKGNDPVATGNRRADEAAKQAALSTRVLAETTKPAGKRTADGSEFEKRTADGSEFESPKKKAKVE

SEQ ID NO: 7043 - protein, 2092 aa, synthetic construct
MPAAKRVKLDGGDKKYSIGLDIGTNSVGWAVITDEYKVPSKKFKVLGNTDRHSIKKNLIGALLFDSGETAEATRLKRTARRRYTRRKNRICYLQEIFSNEMAKVDDSFFHRLEESFLVEEDKKHERHPIFGNIVDEVAYHEKYPTIYHLRKKLVDSTDKADLRLIYLALAHMIKFRGHFLIEGDLNPDNSDVDKLFIQLVQTYNQLFEENPINASGVDAKAILSARLSKSRRLENLIAQLPGEKKNGLFGNLIALSLGLTPNFKSNFDLAEDAKLQLSKDTYDDDLDNLLAQIGDQYADLFLAAKNLSDAILLSDILRVNTEITKAPLSASMIKRYDEHHQDLTLLKALVRQQLPEKYKEIFFDQSKNGYAGYIDGGASQEEFYKFIKPILEKMDGTEELLVKLNREDLLRKQRTFDNGSIPHQIHLGELHAILRRQEDFYPFLKDNREKIEKILTFRIPYYVGPLARGNSRFAWMTRKSEETITPWNFEEVVDKGASAQSFIERMTNFDKNLPNEKVLPKHSLLYEYFTVYNELTKVKYVTEGMRKPAFLSGEQKKAIVDLLFKTNRKVTVKQLKEDYFKKIECFDSVEISGVEDRFNASLGTYHDLLKIIKDKDFLDNEENEDILEDIVLTLTLFEDREMIEERLKTYAHLFDDKVMKQLKRRRYTGWGRLSRKLINGIRDKQSGKTILDFLKSDGFANRNFMQLIHDDSLTFKEDIQKAQVSGQGDSLHEHIANLAGSPAIKKGILQTVKVVDELVKVMGRHKPENIVIEMARENQTTQKGQKNSRERMKRIEEGIKELGSQILKEHPVENTQLQNEKLYLYYLQNGRDMYVDQELDINRLSDYDVDHIVPQSFLKDDSIDNKVLTRSDKARGKSDNVPSEEVVKKMKNYWRQLLNAKLITQRKFDNLTKAERGGLSELDKAGFIKRQLVETRQITKHVAQILDSRMNTKYDENDKLIREVKVITLKSKLVSDFRKDFQFYKVREINNYHHAHDAYLNAVVGTALIKKYPKLESEFVYGDYKVYDVRKMIAKSEQEIGKATAKYFFYSNIMNFFKTEITLANGEIRKRPLIETNGETGEIVWDKGRDFATVRKVLSMPQVNIVKKTEVQTGGFSKESILPKRNSDKLIARKKDWDPKKYGGFDSPTVAYSVLVVAKVEKGKSKKLKSVKELLGITIMERSSFEKNPIDFLEAKGYKEVKKDLIIKLPKYSLFELENGRKRMLASAGELQKGNELALPSKYVNFLYLASHYEKLKGSPEDNEQKQLFVEQHKHYLDEIIEQISEFSKRVILADANLDKVLSAYNKHRDKPIREQAENIIHLFTLTNLGAPAAFKYFDTTIDRKRYTSTKEVLDATLIHQSITGLYETRIDLSQLGGDGGPAPGGGGGSGGVLNLEEEYRLHEKPVPSSIDPSWLQLFPTVWAERAGMGLANQVPPVVVELRSGASPVAVRQYPMSKEAREGIRPHIQRFLDLGVLVPCQSPWNTPLLPVKKPGTNDYRPVQDLREINKRVQDIHPTVPNPYNLLSSLPPSHTWYSVLDLKDAFFCLKLHPNSQPLFAFEWRDPEKGNTGQLTWTRLPQGFKNSPTLFNEALHRDLAPFRALNPQVVLLQYVDDLLVAAPTYRDCKEGTQKLLQELSKLGYRVSAKKAQLCQKEVTYLGYLLKEGKRWLTPARKATVMKIPPPTTPRQVREFLGKAGFCRLFIPGFASLAAPLYPLTKPSIPFIWTEEHQKAFDRIKEALLSAPALALPDLTKPFTLYVDERAGVARGVLTQTLGPWRRPVAYLSKKLDPVASGWPTCLKAVAAVALLLKDADKLTLGQNVTVIASHSLESIVRQPPDRWMTNARMTHYQSLLLNERVSFAPPAVLNPATLLPVESEATPVHRCSEILAEETGTRRDLKDQPLPGVPAWYTDGSSFIAEGKRRAGAAIVDGKRTVWASSLPEGTSAQKAELVALTQALRLAEGKDINIYTDSRYAFATAHIHGAIYKQRGWLTSAGKDIKNKEEILALLEAIHLPKRVAIIHCPGHQKGNDPVATGNRRADEAAKQAALSTRVLAETTKPAGKRTADGSEFEKRTADGSEFESPKKKAKVE

SEQ ID NO: 7044 - protein, 2094 aa, synthetic construct
MPAAKRVKLDGGDKKYSIGLDIGTNSVGWAVITDEYKVPSKKFKVLGNTDRHSIKKNLIGALLFDSGETAEATRLKRTARRRYTRRKNRICYLQEIFSNEMAKVDDSFFHRLEESFLVEEDKKHERHPIFGNIVDEVAYHEKYPTIYHLRKKLVDSTDKADLRLIYLALAHMIKFRGHFLIEGDLNPDNSDVDKLFIQLVQTYNQLFEENPINASGVDAKAILSARLSKSRRLENLIAQLPGEKKNGLFGNLIALSLGLTPNFKSNFDLAEDAKLQLSKDTYDDDLDNLLAQIGDQYADLFLAAKNLSDAILLSDILRVNTEITKAPLSASMIKRYDEHHQDLTLLKALVRQQLPEKYKEIFFDQSKNGYAGYIDGGASQEEFYKFIKPILEKMDGTEELLVKLNREDLLRKQRTFDNGSIPHQIHLGELHAILRRQEDFYPFLKDNREKIEKILTFRIPYYVGPLARGNSRFAWMTRKSEETITPWNFEEVVDKGASAQSFIERMTNFDKNLPNEKVLPKHSLLYEYFTVYNELTKVKYVTEGMRKPAFLSGEQKKAIVDLLFKTNRKVTVKQLKEDYFKKIECFDSVEISGVEDRFNASLGTYHDLLKIIKDKDFLDNEENEDILEDIVLTLTLFEDREMIEERLKTYAHLFDDKVMKQLKRRRYTGWGRLSRKLINGIRDKQSGKTILDFLKSDGFANRNFMQLIHDDSLTFKEDIQKAQVSGQGDSLHEHIANLAGSPAIKKGILQTVKVVDELVKVMGRHKPENIVIEMARENQTTQKGQKNSRERMKRIEEGIKELGSQILKEHPVENTQLQNEKLYLYYLQNGRDMYVDQELDINRLSDYDVDHIVPQSFLKDDSIDNKVLTRSDKARGKSDNVPSEEVVKKMKNYWRQLLNAKLITQRKFDNLTKAERGGLSELDKAGFIKRQLVETRQITKHVAQILDSRMNTKYDENDKLIREVKVITLKSKLVSDFRKDFQFYKVREINNYHHAHDAYLNAVVGTALIKKYPKLESEFVYGDYKVYDVRKMIAKSEQEIGKATAKYFFYSNIMNFFKTEITLANGEIRKRPLIETNGETGEIVWDKGRDFATVRKVLSMPQVNIVKKTEVQTGGFSKESILPKRNSDKLIARKKDWDPKKYGGFDSPTVAYSVLVVAKVEKGKSKKLKSVKELLGITIMERSSFEKNPIDFLEAKGYKEVKKDLIIKLPKYSLFELENGRKRMLASAGELQKGNELALPSKYVNFLYLASHYEKLKGSPEDNEQKQLFVEQHKHYLDEIIEQISEFSKRVILADANLDKVLSAYNKHRDKPIREQAENIIHLFTLTNLGAPAAFKYFDTTIDRKRYTSTKEVLDATLIHQSITGLYETRIDLSQLGGDGGPAPGGGGGSGGTLNIEDEYRLHETSKEPDVPLGSTWLSDFPQAWAETGGMGLAVRQAPLIIPLKATSTPVSIKQYPMSQEARLGIKPHIQRLLDQGILVPCQSPWNTPLLPVKKPGTNDYRPVQDLREVNKRVEDIHPTVPNPYNLLSGLPPSHQWYTVLDLKDAFFCLRLHPTSQPLFAFEWRDPEMGISGQLTWTRLPQGFKNSPTLFNEALHRDLADFRIQHPDLILLQYVDDLLLAATSEQDCQRGTRALLQTLGNLGYRASAKKAQICQKQVKYLGYLLKEGQRWLTEARKETVMGQPTPKTPRQLREFLGTAGFCRLWIPGFAEMAAPLYPLTKPGTLFNWGPDQQKAYQEIKQALLTAPALGLPDLTKPFELFVDEKQGYAKGVLTQKLGPWRRPVAYLSKKLDPVAAGWPPCLRMVAAIAVLTKDAGKLTMGQPLVILAPHAVEALVKQPPDRWLSNARMTHYQAMLLDTDRVQFGPVVALNPATLLPLPEKEAPHDCLEILAETHGTRPDLTDQPIPDADYTWYTDGSSFLQEGQRRAGAAVTTETEVIWARALPAGTSAQRAELIALTQALKMAEGKKLNVYTDSRYAFATAHVHGEIYRRRGWLTSEGREIKNKNEILALLKALFLPKRLSIIHCPGHQKGNSAEARGNRMADQAAREAAMKAVLETSTLLAGKRTADGSEFEKRTADGSEFESPKKKAKVE

SEQ ID NO: 7045 - protein, 2098 aa, synthetic construct
MPAAKRVKLDGGDKKYSIGLDIGTNSVGWAVITDEYKVPSKKFKVLGNTDRHSIKKNLIGALLFDSGETAEATRLKRTARRRYTRRKNRICYLQEIFSNEMAKVDDSFFHRLEESFLVEEDKKHERHPIFGNIVDEVAYHEKYPTIYHLRKKLVDSTDKADLRLIYLALAHMIKFRGHFLIEGDLNPDNSDVDKLFIQLVQTYNQLFEENPINASGVDAKAILSARLSKSRRLENLIAQLPGEKKNGLFGNLIALSLGLTPNFKSNFDLAEDAKLQLSKDTYDDDLDNLLAQIGDQYADLFLAAKNLSDAILLSDILRVNTEITKAPLSASMIKRYDEHHQDLTLLKALVRQQLPEKYKEIFFDQSKNGYAGYIDGGASQEEFYKFIKPILEKMDGTEELLVKLNREDLLRKQRTFDNGSIPHQIHLGELHAILRRQEDFYPFLKDNREKIEKILTFRIPYYVGPLARGNSRFAWMTRKSEETITPWNFEEVVDKGASAQSFIERMTNFDKNLPNEKVLPKHSLLYEYFTVYNELTKVKYVTEGMRKPAFLSGEQKKAIVDLLFKTNRKVTVKQLKEDYFKKIECFDSVEISGVEDRFNASLGTYHDLLKIIKDKDFLDNEENEDILEDIVLTLTLFEDREMIEERLKTYAHLFDDKVMKQLKRRRYTGWGRLSRKLINGIRDKQSGKTILDFLKSDGFANRNFMQLIHDDSLTFKEDIQKAQVSGQGDSLHEHIANLAGSPAIKKGILQTVKVVDELVKVMGRHKPENIVIEMARENQTTQKGQKNSRERMKRIEEGIKELGSQILKEHPVENTQLQNEKLYLYYLQNGRDMYVDQELDINRLSDYDVDHIVPQSFLKDDSIDNKVLTRSDKARGKSDNVPSEEVVKKMKNYWRQLLNAKLITQRKFDNLTKAERGGLSELDKAGFIKRQLVETRQITKHVAQILDSRMNTKYDENDKLIREVKVITLKSKLVSDFRKDFQFYKVREINNYHHAHDAYLNAVVGTALIKKYPKLESEFVYGDYKVYDVRKMIAKSEQEIGKATAKYFFYSNIMNFFKTEITLANGEIRKRPLIETNGETGEIVWDKGRDFATVRKVLSMPQVNIVKKTEVQTGGFSKESILPKRNSDKLIARKKDWDPKKYGGFDSPTVAYSVLVVAKVEKGKSKKLKSVKELLGITIMERSSFEKNPIDFLEAKGYKEVKKDLIIKLPKYSLFELENGRKRMLASAGELQKGNELALPSKYVNFLYLASHYEKLKGSPEDNEQKQLFVEQHKHYLDEIIEQISEFSKRVILADANLDKVLSAYNKHRDKPIREQAENIIHLFTLTNLGAPAAFKYFDTTIDRKRYTSTKEVLDATLIHQSITGLYETRIDLSQLGGDGGGGSGSSEAAAKGGTAPLEEEYRLFLEAPIQNVTLLEQWKREIPKVWAEINPPGLASTQAPIHVQLLSTALPVRVRQYPITLEAKRSLRETIRKFRAAGILRPVHSPWNTPLLPVRKSGTSEYRMVQDLREVNKRVETIHPTVPNPYTLLSLLPPDRIWYSVLDLKDAFFCIPLAPESQLIFAFEWADAEEGESGQLTWTRLPQGFKNSPTLFNEALNRDLQGFRLDHPSVSLLQYVDDLLIAADTQAACLSATRDLLMTLAELGYRVSGKKAQLCQEEVTYLGFKIHKGSRSLSNSRTQAILQIPVPKTKRQVREFLGTIGYCRLWIPGFAELAQPLYAATRPGNDPLVWGEKEEEAFQSLKLALTQPPALALPSLDKPFQLFVEETSGAAKGVLTQALGPWKRPVAYLSKRLDPVAAGWPRCLRAIAAAALLTREASKLTFGQDIEITSSHNLESLLRSPPDKWLTNARITQYQVLLLDPPRVRFKQTAALNPATLLPETDDTLPIHHCLDTLDSLTSTRPDLTDQPLAQAEATLFTDGSSYIRDGKRYAGAAVVTLDSVIWAEPLPIGTSAQKAELIALTKALEWSKDKSVNIYTDSRYAFATLHVHGMIYRERGWLTAGGKAIKNAPEILALLTAVWLPKRVAVMHCKGHQKDDAPTSTGNRRADEVAREVAIRPLSTQATISAGKRTADGSEFEKRTADGSEFESPKKKAKVE

SEQ ID NO: 7046 - protein, 2098 aa, synthetic construct
MPAAKRVKLDGGDKKYSIGLDIGTNSVGWAVITDEYKVPSKKFKVLGNTDRHSIKKNLIGALLFDSGETAEATRLKRTARRRYTRRKNRICYLQEIFSNEMAKVDDSFFHRLEESFLVEEDKKHERHPIFGNIVDEVAYHEKYPTIYHLRKKLVDSTDKADLRLIYLALAHMIKFRGHFLIEGDLNPDNSDVDKLFIQLVQTYNQLFEENPINASGVDAKAILSARLSKSRRLENLIAQLPGEKKNGLFGNLIALSLGLTPNFKSNFDLAEDAKLQLSKDTYDDDLDNLLAQIGDQYADLFLAAKNLSDAILLSDILRVNTEITKAPLSASMIKRYDEHHQDLTLLKALVRQQLPEKYKEIFFDQSKNGYAGYIDGGASQEEFYKFIKPILEKMDGTEELLVKLNREDLLRKQRTFDNGSIPHQIHLGELHAILRRQEDFYPFLKDNREKIEKILTFRIPYYVGPLARGNSRFAWMTRKSEETITPWNFEEVVDKGASAQSFIERMTNFDKNLPNEKVLPKHSLLYEYFTVYNELTKVKYVTEGMRKPAFLSGEQKKAIVDLLFKTNRKVTVKQLKEDYFKKIECFDSVEISGVEDRFNASLGTYHDLLKIIKDKDFLDNEENEDILEDIVLTLTLFEDREMIEERLKTYAHLFDDKVMKQLKRRRYTGWGRLSRKLINGIRDKQSGKTILDFLKSDGFANRNFMQLIHDDSLTFKEDIQKAQVSGQGDSLHEHIANLAGSPAIKKGILQTVKVVDELVKVMGRHKPENIVIEMARENQTTQKGQKNSRERMKRIEEGIKELGSQILKEHPVENTQLQNEKLYLYYLQNGRDMYVDQELDINRLSDYDVDHIVPQSFLKDDSIDNKVLTRSDKARGKSDNVPSEEVVKKMKNYWRQLLNAKLITQRKFDNLTKAERGGLSELDKAGFIKRQLVETRQITKHVAQILDSRMNTKYDENDKLIREVKVITLKSKLVSDFRKDFQFYKVREINNYHHAHDAYLNAVVGTALIKKYPKLESEFVYGDYKVYDVRKMIAKSEQEIGKATAKYFFYSNIMNFFKTEITLANGEIRKRPLIETNGETGEIVWDKGRDFATVRKVLSMPQVNIVKKTEVQTGGFSKESILPKRNSDKLIARKKDWDPKKYGGFDSPTVAYSVLVVAKVEKGKSKKLKSVKELLGITIMERSSFEKNPIDFLEAKGYKEVKKDLIIKLPKYSLFELENGRKRMLASAGELQKGNELALPSKYVNFLYLASHYEKLKGSPEDNEQKQLFVEQHKHYLDEIIEQISEFSKRVILADANLDKVLSAYNKHRDKPIREQAENIIHLFTLTNLGAPAAFKYFDTTIDRKRYTSTKEVLDATLIHQSITGLYETRIDLSQLGGDGGGGSGSSEAAAKGGTAPLEEEYRLFLEAPIQNVTLLEQWKREIPKVWAEINPPGLASTQAPIHVQLLSTALPVRVRQYPITLEAKRSLRETIRKFRAAGILRPVHSPWNTPLLPVRKSGTSEYRMVQDLREVNKRVETIHPTVPNPYTLLSLLPPDRIWYSVLDLKDAFFCIPLAPESQLIFAFEWADAEEGESGQLTWTRLPQGFKNSPTLFNEALNRDLQGFRLDHPSVSLLQYVDDLLIAADTQAACLSATRDLLMTLAELGYRVSGKKAQLCQEEVTYLGFKIHKGSRSLSNSRTQAILQIPVPKTKRQVREFLGKIGYCRLFIPGFAELAQPLYAATRPGNDPLVWGEKEEEAFQSLKLALTQPPALALPSLDKPFQLFVEETSGAAKGVLTQALGPWKRPVAYLSKRLDPVAAGWPRCLRAIAAAALLTREASKLTFGQDIEITSSHNLESLLRSPPDKWLTNARITQYQVLLLDPPRVRFKQTAALNPATLLPETDDTLPIHHCLDTLDSLTSTRPDLTDQPLAQAEATLFTDGSSYIRDGKRYAGAAVVTLDSVIWAEPLPIGTSAQKAELIALTKALEWSKDKSVNIYTDSRYAFATLHVHGMIYRERGWLTAGGKAIKNAPEILALLTAVWLPKRVAVMHCKGHQKDDAPTSTGNRRADEVAREVAIRPLSTQATISAGKRTADGSEFEKRTADGSEFESPKKKAKVE

SEQ ID NO: 7047 - protein, 2218 aa, synthetic construct
MPAAKRVKLDGGDKKYSIGLDIGTNSVGWAVITDEYKVPSKKFKVLGNTDRHSIKKNLIGALLFDSGETAEATRLKRTARRRYTRRKNRICYLQEIFSNEMAKVDDSFFHRLEESFLVEEDKKHERHPIFGNIVDEVAYHEKYPTIYHLRKKLVDSTDKADLRLIYLALAHMIKFRGHFLIEGDLNPDNSDVDKLFIQLVQTYNQLFEENPINASGVDAKAILSARLSKSRRLENLIAQLPGEKKNGLFGNLIALSLGLTPNFKSNFDLAEDAKLQLSKDTYDDDLDNLLAQIGDQYADLFLAAKNLSDAILLSDILRVNTEITKAPLSASMIKRYDEHHQDLTLLKALVRQQLPEKYKEIFFDQSKNGYAGYIDGGASQEEFYKFIKPILEKMDGTEELLVKLNREDLLRKQRTFDNGSIPHQIHLGELHAILRRQEDFYPFLKDNREKIEKILTFRIPYYVGPLARGNSRFAWMTRKSEETITPWNFEEVVDKGASAQSFIERMTNFDKNLPNEKVLPKHSLLYEYFTVYNELTKVKYVTEGMRKPAFLSGEQKKAIVDLLFKTNRKVTVKQLKEDYFKKIECFDSVEISGVEDRFNASLGTYHDLLKIIKDKDFLDNEENEDILEDIVLTLTLFEDREMIEERLKTYAHLFDDKVMKQLKRRRYTGWGRLSRKLINGIRDKQSGKTILDFLKSDGFANRNFMQLIHDDSLTFKEDIQKAQVSGQGDSLHEHIANLAGSPAIKKGILQTVKVVDELVKVMGRHKPENIVIEMARENQTTQKGQKNSRERMKRIEEGIKELGSQILKEHPVENTQLQNEKLYLYYLQNGRDMYVDQELDINRLSDYDVDHIVPQSFLKDDSIDNKVLTRSDKARGKSDNVPSEEVVKKMKNYWRQLLNAKLITQRKFDNLTKAERGGLSELDKAGFIKRQLVETRQITKHVAQILDSRMNTKYDENDKLIREVKVITLKSKLVSDFRKDFQFYKVREINNYHHAHDAYLNAVVGTALIKKYPKLESEFVYGDYKVYDVRKMIAKSEQEIGKATAKYFFYSNIMNFFKTEITLANGEIRKRPLIETNGETGEIVWDKGRDFATVRKVLSMPQVNIVKKTEVQTGGFSKESILPKRNSDKLIARKKDWDPKKYGGFDSPTVAYSVLVVAKVEKGKSKKLKSVKELLGITIMERSSFEKNPIDFLEAKGYKEVKKDLIIKLPKYSLFELENGRKRMLASAGELQKGNELALPSKYVNFLYLASHYEKLKGSPEDNEQKQLFVEQHKHYLDEIIEQISEFSKRVILADANLDKVLSAYNKHRDKPIREQAENIIHLFTLTNLGAPAAFKYFDTTIDRKRYTSTKEVLDATLIHQSITGLYETRIDLSQLGGDGGGGSGSSEAAAKGGTLGDQGSRGSDPLPEPRVTLTVEGIPTEFLVNTGAEHSVLTKPMGKMGSKRTVVAGATGSKVYPWTTKRLLKIGQKQVTHSFLVIPECPAPLLGRDLLTKLKAQIQFSTEGPQVTWEDRPAMCLVLNLEEEYRLHEKPVPPSIDPSWLQLFPMVWAEKAGMGLANQVPPVVVELKSDASPVAVRQYPMSKEAREGIRPHIQRFLDLGILVPCQSPWNTPLLPVKKPGTNDYRPVQDLREVNKRVQDIHPTVPNPYNLLSSLPPSHTWYSVLDLKDAFFCLKLHPNSQPLFAFEWRDPEKGNTGQLTWTRLPQGFKNSPTLFDEALHRDLASFRALNPQVVMLQYVDDLLVAAPTYRDCKEGTRRLLQELSKLGYRVSAKKAQLCREEVTYLGYLLKGGKRWLTPARKATVMKIPTPTTPRQVREFLGTAGFCRLWIPGFASLAAPLYPLTREKVPFTWTEAHQEAFGRIKEALLSAPALALPDLTKPFALYVDEKEGVARGVLTQTLGPWRRPVAYLSKKLDPVASGWPTCLKAIAAVALLLKDADKLTLGQNVLVIAPHNLESIVRQPPDRWMTNARMTHYQSLLLNERVSFAPPAILNPATLLPVESDDTPIHICSEILAEETGTRPDLRDQPLPGVPAWYTDGSSFIMDGRRQAGAAIVDNKRTVWASNLPEGTSAQKAELIALTQALRLAEGKSINIYTDSRYAFATAHVHGAIYKQRGLLTSAGKDIKNKEEILALLEAIHLPKRVAIIHCPGHQRGTDPVATGNRKADEAAKQAAQSTRILTETTKNAGKRTADGSEFEKRTADGSEFESPKKKAKVE

SEQ ID NO: 7048 - protein, 2096 aa, synthetic construct
MPAAKRVKLDGGDKKYSIGLDIGTNSVGWAVITDEYKVPSKKFKVLGNTDRHSIKKNLIGALLFDSGETAEATRLKRTARRRYTRRKNRICYLQEIFSNEMAKVDDSFFHRLEESFLVEEDKKHERHPIFGNIVDEVAYHEKYPTIYHLRKKLVDSTDKADLRLIYLALAHMIKFRGHFLIEGDLNPDNSDVDKLFIQLVQTYNQLFEENPINASGVDAKAILSARLSKSRRLENLIAQLPGEKKNGLFGNLIALSLGLTPNFKSNFDLAEDAKLQLSKDTYDDDLDNLLAQIGDQYADLFLAAKNLSDAILLSDILRVNTEITKAPLSASMIKRYDEHHQDLTLLKALVRQQLPEKYKEIFFDQSKNGYAGYIDGGASQEEFYKFIKPILEKMDGTEELLVKLNREDLLRKQRTFDNGSIPHQIHLGELHAILRRQEDFYPFLKDNREKIEKILTFRIPYYVGPLARGNSRFAWMTRKSEETITPWNFEEVVDKGASAQSFIERMTNFDKNLPNEKVLPKHSLLYEYFTVYNELTKVKYVTEGMRKPAFLSGEQKKAIVDLLFKTNRKVTVKQLKEDYFKKIECFDSVEISGVEDRFNASLGTYHDLLKIIKDKDFLDNEENEDILEDIVLTLTLFEDREMIEERLKTYAHLFDDKVMKQLKRRRYTGWGRLSRKLINGIRDKQSGKTILDFLKSDGFANRNFMQLIHDDSLTFKEDIQKAQVSGQGDSLHEHIANLAGSPAIKKGILQTVKVVDELVKVMGRHKPENIVIEMARENQTTQKGQKNSRERMKRIEEGIKELGSQILKEHPVENTQLQNEKLYLYYLQNGRDMYVDQELDINRLSDYDVDHIVPQSFLKDDSIDNKVLTRSDKARGKSDNVPSEEVVKKMKNYWRQLLNAKLITQRKFDNLTKAERGGLSELDKAGFIKRQLVETRQITKHVAQILDSRMNTKYDENDKLIREVKVITLKSKLVSDFRKDFQFYKVREINNYHHAHDAYLNAVVGTALIKKYPKLESEFVYGDYKVYDVRKMIAKSEQEIGKATAKYFFYSNIMNFFKTEITLANGEIRKRPLIETNGETGEIVWDKGRDFATVRKVLSMPQVNIVKKTEVQTGGFSKESILPKRNSDKLIARKKDWDPKKYGGFDSPTVAYSVLVVAKVEKGKSKKLKSVKELLGITIMERSSFEKNPIDFLEAKGYKEVKKDLIIKLPKYSLFELENGRKRMLASAGELQKGNELALPSKYVNFLYLASHYEKLKGSPEDNEQKQLFVEQHKHYLDEIIEQISEFSKRVILADANLDKVLSAYNKHRDKPIREQAENIIHLFTLTNLGAPAAFKYFDTTIDRKRYTSTKEVLDATLIHQSITGLYETRIDLSQLGGDGGGGSGSSEAAAKGGTLGIEDEYRLHETSTEPDVSLGSTWLSDFPQAWAETGGMGLAVRQAPLIIPLKATSTPVSIQQYPMSHEARLGIKPHIQRLLDQGILVPCQSPWNTPLLPVKKPGTNDYRPVQDLREVNKRVEDIHPTVPNPYNLLSGLPPSHQWYTVLDLKDAFFCLRLHPTSQPLFAFEWRDPGMGISGQLTWTRLPQGFKNSPTLFNEALHRDLADFRIQHPDLILLQYVDDILLAATSELDCQQGTRALLQTLGDLGYRASAKKAQICQKQVKYLGYLLREGQRWLTEARKETVMGQPVPKTPRQLREFLGTAGFCRLWIPGFAEMAAPLYPLTKPGTLFSWGPDQQKAYQEIKQALLTAPALGLPDLTKPFELFVDEKQGYAKGVLTQKLGPWRRPVAYLSKKLDPVAAGWPPCLRMVAAIAVLTKDAGKLTMGQPLVILAPHAVEALVKQPPDRWLSNARMTHYQAMLLDTDRVQFGPVVALNPATLLPLPEEGAPHDCLEILAETHGTRPDLTDQPIPDADHTWYTDGSSFLQEGQRKAGAAVTTETEVIWAGALPAGTSAQRAELIALTQALKMAEGKRLNVYTDSRYAFATAHIHGEIYRRRGWLTSEGREIKNKSEILALLKALFLPKRLSIIHCLGHQKGDSAEARGNRLADQAAREAAIKTPPDTSTLLAGKRTADGSEFEKRTADGSEFESPKKKAKVE

SEQ ID NO: 7049 - protein, 2096 aa, synthetic construct
MPAAKRVKLDGGDKKYSIGLDIGTNSVGWAVITDEYKVPSKKFKVLGNTDRHSIKKNLIGALLFDSGETAEATRLKRTARRRYTRRKNRICYLQEIFSNEMAKVDDSFFHRLEESFLVEEDKKHERHPIFGNIVDEVAYHEKYPTIYHLRKKLVDSTDKADLRLIYLALAHMIKFRGHFLIEGDLNPDNSDVDKLFIQLVQTYNQLFEENPINASGVDAKAILSARLSKSRRLENLIAQLPGEKKNGLFGNLIALSLGLTPNFKSNFDLAEDAKLQLSKDTYDDDLDNLLAQIGDQYADLFLAAKNLSDAILLSDILRVNTEITKAPLSASMIKRYDEHHQDLTLLKALVRQQLPEKYKEIFFDQSKNGYAGYIDGGASQEEFYKFIKPILEKMDGTEELLVKLNREDLLRKQRTFDNGSIPHQIHLGELHAILRRQEDFYPFLKDNREKIEKILTFRIPYYVGPLARGNSRFAWMTRKSEETITPWNFEEVVDKGASAQSFIERMTNFDKNLPNEKVLPKHSLLYEYFTVYNELTKVKYVTEGMRKPAFLSGEQKKAIVDLLFKTNRKVTVKQLKEDYFKKIECFDSVEISGVEDRFNASLGTYHDLLKIIKDKDFLDNEENEDILEDIVLTLTLFEDREMIEERLKTYAHLFDDKVMKQLKRRRYTGWGRLSRKLINGIRDKQSGKTILDFLKSDGFANRNFMQLIHDDSLTFKEDIQKAQVSGQGDSLHEHIANLAGSPAIKKGILQTVKVVDELVKVMGRHKPENIVIEMARENQTTQKGQKNSRERMKRIEEGIKELGSQILKEHPVENTQLQNEKLYLYYLQNGRDMYVDQELDINRLSDYDVDHIVPQSFLKDDSIDNKVLTRSDKARGKSDNVPSEEVVKKMKNYWRQLLNAKLITQRKFDNLTKAERGGLSELDKAGFIKRQLVETRQITKHVAQILDSRMNTKYDENDKLIREVKVITLKSKLVSDFRKDFQFYKVREINNYHHAHDAYLNAVVGTALIKKYPKLESEFVYGDYKVYDVRKMIAKSEQEIGKATAKYFFYSNIMNFFKTEITLANGEIRKRPLIETNGETGEIVWDKGRDFATVRKVLSMPQVNIVKKTEVQTGGFSKESILPKRNSDKLIARKKDWDPKKYGGFDSPTVAYSVLVVAKVEKGKSKKLKSVKELLGITIMERSSFEKNPIDFLEAKGYKEVKKDLIIKLPKYSLFELENGRKRMLASAGELQKGNELALPSKYVNFLYLASHYEKLKGSPEDNEQKQLFVEQHKHYLDEIIEQISEFSKRVILADANLDKVLSAYNKHRDKPIREQAENIIHLFTLTNLGAPAAFKYFDTTIDRKRYTSTKEVLDATLIHQSITGLYETRIDLSQLGGDGGGGSGSSEAAAKGGTLNIEDEYRLHEISTEPDVSPGSTWLSDFPQAWAETGGMGLAVRQAPLIIPLKATSTPVSIKQYPMSQEAKLGIKPHIQRLLDQGILVPCQSPWNTPLLPVKKPGTNDYRPVQGLREVNKRVEDIHPTVPNPYNLLSGLPTSHRWYTVLDLKDAFFCLRLHPTSQPLFASEWRDPGMGISGQLTWTRLPQGFKNSPTLFNEALHRGLADFRIQHPDLILLQYVDDLLLAATSELDCQQGTRALLKTLGNLGYRASAKKAQICQKQVKYLGYLLREGQRWLTEARKETVMGQPTPKTPRQLREFLGKAGFCRLFIPRFAEMAAPLYPLTKPGTLFNWGPDQQKAYHEIKQALLTAPALGLPDLTKPFELFVDEKQGYAKGVLTQKLGPWRRPVAYLSKKLDPVAAGWPPCLRMVAAIAVLTKDAGKLTMGQPLVILAPHAVEALVKQPPDRWLSNARMTHYQAMLLDTDRVQFGPVVALNPATLLPLPEEGAPHDCLEILAETHGTEPDLTDQPIPDADHTWYTDGSSFLQEGQRKAGAAVTTETEVIWARALPAGTSAQRAELIALTQALKMAEGKRLNVYTDSRYAFATAHIHGEIYKRRGWLTSEGREIKNKSEILALLKALFLPKRLSIIHCLGHQKGDSAEARGNRLADQAAREAAIKTPPDTSTLLAGKRTADGSEFEKRTADGSEFESPKKKAKVE

SEQ ID NO: 7050 - protein, 2090 aa, synthetic construct
MPAAKRVKLDGGDKKYSIGLDIGTNSVGWAVITDEYKVPSKKFKVLGNTDRHSIKKNLIGALLFDSGETAEATRLKRTARRRYTRRKNRICYLQEIFSNEMAKVDDSFFHRLEESFLVEEDKKHERHPIFGNIVDEVAYHEKYPTIYHLRKKLVDSTDKADLRLIYLALAHMIKFRGHFLIEGDLNPDNSDVDKLFIQLVQTYNQLFEENPINASGVDAKAILSARLSKSRRLENLIAQLPGEKKNGLFGNLIALSLGLTPNFKSNFDLAEDAKLQLSKDTYDDDLDNLLAQIGDQYADLFLAAKNLSDAILLSDILRVNTEITKAPLSASMIKRYDEHHQDLTLLKALVRQQLPEKYKEIFFDQSKNGYAGYIDGGASQEEFYKFIKPILEKMDGTEELLVKLNREDLLRKQRTFDNGSIPHQIHLGELHAILRRQEDFYPFLKDNREKIEKILTFRIPYYVGPLARGNSRFAWMTRKSEETITPWNFEEVVDKGASAQSFIERMTNFDKNLPNEKVLPKHSLLYEYFTVYNELTKVKYVTEGMRKPAFLSGEQKKAIVDLLFKTNRKVTVKQLKEDYFKKIECFDSVEISGVEDRFNASLGTYHDLLKIIKDKDFLDNEENEDILEDIVLTLTLFEDREMIEERLKTYAHLFDDKVMKQLKRRRYTGWGRLSRKLINGIRDKQSGKTILDFLKSDGFANRNFMQLIHDDSLTFKEDIQKAQVSGQGDSLHEHIANLAGSPAIKKGILQTVKVVDELVKVMGRHKPENIVIEMARENQTTQKGQKNSRERMKRIEEGIKELGSQILKEHPVENTQLQNEKLYLYYLQNGRDMYVDQELDINRLSDYDVDHIVPQSFLKDDSIDNKVLTRSDKARGKSDNVPSEEVVKKMKNYWRQLLNAKLITQRKFDNLTKAERGGLSELDKAGFIKRQLVETRQITKHVAQILDSRMNTKYDENDKLIREVKVITLKSKLVSDFRKDFQFYKVREINNYHHAHDAYLNAVVGTALIKKYPKLESEFVYGDYKVYDVRKMIAKSEQEIGKATAKYFFYSNIMNFFKTEITLANGEIRKRPLIETNGETGEIVWDKGRDFATVRKVLSMPQVNIVKKTEVQTGGFSKESILPKRNSDKLIARKKDWDPKKYGGFDSPTVAYSVLVVAKVEKGKSKKLKSVKELLGITIMERSSFEKNPIDFLEAKGYKEVKKDLIIKLPKYSLFELENGRKRMLASAGELQKGNELALPSKYVNFLYLASHYEKLKGSPEDNEQKQLFVEQHKHYLDEIIEQISEFSKRVILADANLDKVLSAYNKHRDKPIREQAENIIHLFTLTNLGAPAAFKYFDTTIDRKRYTSTKEVLDATLIHQSITGLYETRIDLSQLGGDGGGGSGSSEAAAKGGTLQLDDEYRLYSPLVKPDQNIQFWLEQFPQAWAETAGMGLAKQVPPQVIQLKASATPVSVRQYPLSKEAQEGIRPHVQRLIQQGILVPVQSPWNTPLLPVRKPGTNDYRPVQDLREVNKRVQDIHPTVPNPYNLLCALPPQRSWYTVLDLKDAFFCLRLHPTSQPLFAFEWRDPGTGRTGQLTWTRLPQGFKNSPTIFDEALHRDLANFRIQHPQVTLLQYVDDLLLAGATKQDCLEGTKALLLELSDLGYRASAKKAQICRREVTYLGYSLRDGQRWLTEARKKTVVQIPAPTTAKQVREFLGTAGFCRLWIPGFATLAAPLYPLTKEKGEFSWAPEHQKAFDAIKKALLSAPALALPDVTKPFTLYVDERKGVARGVLTQTLGPWRRPVAYLSKKLDPVASGWPVCLKAIAAVAILVKDADKLTLGQNITVIAPHALENIVRQPPDRWMTNARMTHYQSLLLTERVTFAPPAALNPATLLPEETDEPVTHDCHQLLIEETGVRKDLTDIPLTGEVLTWFTDGSSYVVEGKRMAGAAVVDGTRTIWASSLPEGTSAQKAELMALTQALRLAEGKSINIYTDSRYAFATAHVHGAIYKQRGLLTSAGREIKNKEEILSLLEALHLPKRLAIIHCPGHQKAKDPISRGNQMADRVAKQAAQGVNLLAGKRTADGSEFEKRTADGSEFESPKKKAKVE

SEQ ID NO: 7051 - protein, 2087 aa, synthetic construct
MPAAKRVKLDGGDKKYSIGLDIGTNSVGWAVITDEYKVPSKKFKVLGNTDRHSIKKNLIGALLFDSGETAEATRLKRTARRRYTRRKNRICYLQEIFSNEMAKVDDSFFHRLEESFLVEEDKKHERHPIFGNIVDEVAYHEKYPTIYHLRKKLVDSTDKADLRLIYLALAHMIKFRGHFLIEGDLNPDNSDVDKLFIQLVQTYNQLFEENPINASGVDAKAILSARLSKSRRLENLIAQLPGEKKNGLFGNLIALSLGLTPNFKSNFDLAEDAKLQLSKDTYDDDLDNLLAQIGDQYADLFLAAKNLSDAILLSDILRVNTEITKAPLSASMIKRYDEHHQDLTLLKALVRQQLPEKYKEIFFDQSKNGYAGYIDGGASQEEFYKFIKPILEKMDGTEELLVKLNREDLLRKQRTFDNGSIPHQIHLGELHAILRRQEDFYPFLKDNREKIEKILTFRIPYYVGPLARGNSRFAWMTRKSEETITPWNFEEVVDKGASAQSFIERMTNFDKNLPNEKVLPKHSLLYEYFTVYNELTKVKYVTEGMRKPAFLSGEQKKAIVDLLFKTNRKVTVKQLKEDYFKKIECFDSVEISGVEDRFNASLGTYHDLLKIIKDKDFLDNEENEDILEDIVLTLTLFEDREMIEERLKTYAHLFDDKVMKQLKRRRYTGWGRLSRKLINGIRDKQSGKTILDFLKSDGFANRNFMQLIHDDSLTFKEDIQKAQVSGQGDSLHEHIANLAGSPAIKKGILQTVKVVDELVKVMGRHKPENIVIEMARENQTTQKGQKNSRERMKRIEEGIKELGSQILKEHPVENTQLQNEKLYLYYLQNGRDMYVDQELDINRLSDYDVDHIVPQSFLKDDSIDNKVLTRSDKARGKSDNVPSEEVVKKMKNYWRQLLNAKLITQRKFDNLTKAERGGLSELDKAGFIKRQLVETRQITKHVAQILDSRMNTKYDENDKLIREVKVITLKSKLVSDFRKDFQFYKVREINNYHHAHDAYLNAVVGTALIKKYPKLESEFVYGDYKVYDVRKMIAKSEQEIGKATAKYFFYSNIMNFFKTEITLANGEIRKRPLIETNGETGEIVWDKGRDFATVRKVLSMPQVNIVKKTEVQTGGFSKESILPKRNSDKLIARKKDWDPKKYGGFDSPTVAYSVLVVAKVEKGKSKKLKSVKELLGITIMERSSFEKNPIDFLEAKGYKEVKKDLIIKLPKYSLFELENGRKRMLASAGELQKGNELALPSKYVNFLYLASHYEKLKGSPEDNEQKQLFVEQHKHYLDEIIEQISEFSKRVILADANLDKVLSAYNKHRDKPIREQAENIIHLFTLTNLGAPAAFKYFDTTIDRKRYTSTKEVLDATLIHQSITGLYETRIDLSQLGGDGGGGSGSSEAAAKGGIPWLMKKPLQLTTLVPLQEYEERLLKQTMLTGSYKEKLQSLFLKYDALWQHWENQVGHRRIKPHHIATGTVNPRPQKQYPINPKAKASIQTVINDLLKQGVLIQQNSIMNTPVYPVPKPDGKWRMVLDYREVNKTIPLIAAQNQHSAGILSSIFRGKYKTTLDLSNGFWAHSITPESYWLTAFTWLGQQYCWTRLPQGFLNSPALFNADVVDLLKEVPNVQVYVDDIYISHDDPREHLEQLEKVFSLLLNAGYVVSLKKSEIAQHEVEFLGFNITKEGRGLTETFKQKLLNITPPRDLKQLQSILGLLNFARNFIPNFSELVKPLYNIIATAPGKYITWTTDNSQQLQNIISMLNSAENLEERNPEVRLIMKVNTSPSAGYIRFYNEFAKRPIMYLNYVYTKAEVKFTNTEKLLTTIHKGLIKALDLGMGQEILVYSPIVSMTKIQKTPLPERKALPIRWITWMSYLEDPRIQFHYDKTLPELQQVPTVTDDIIAKIKHPSEFSMVFYTDGSAIKHPNVNKSHNAGMGIAQVQFKPEFTVINTWSIPLGDHTAQLAEVAAVEFACKKALKIDGPVLIVTDSFYVAESVNKELPYWQSNGFFNNKKKPLKHVSKWKSIADCIQLKPDIIIIHEKGHQPTASTFHTEGNNLADKLATQGSYVVNAGKRTADGSEFEKRTADGSEFESPKKKAKVE

SEQ ID NO: 7052 - protein, 2098 aa, synthetic construct
MPAAKRVKLDGGDKKYSIGLDIGTNSVGWAVITDEYKVPSKKFKVLGNTDRHSIKKNLIGALLFDSGETAEATRLKRTARRRYTRRKNRICYLQEIFSNEMAKVDDSFFHRLEESFLVEEDKKHERHPIFGNIVDEVAYHEKYPTIYHLRKKLVDSTDKADLRLIYLALAHMIKFRGHFLIEGDLNPDNSDVDKLFIQLVQTYNQLFEENPINASGVDAKAILSARLSKSRRLENLIAQLPGEKKNGLFGNLIALSLGLTPNFKSNFDLAEDAKLQLSKDTYDDDLDNLLAQIGDQYADLFLAAKNLSDAILLSDILRVNTEITKAPLSASMIKRYDEHHQDLTLLKALVRQQLPEKYKEIFFDQSKNGYAGYIDGGASQEEFYKFIKPILEKMDGTEELLVKLNREDLLRKQRTFDNGSIPHQIHLGELHAILRRQEDFYPFLKDNREKIEKILTFRIPYYVGPLARGNSRFAWMTRKSEETITPWNFEEVVDKGASAQSFIERMTNFDKNLPNEKVLPKHSLLYEYFTVYNELTKVKYVTEGMRKPAFLSGEQKKAIVDLLFKTNRKVTVKQLKEDYFKKIECFDSVEISGVEDRFNASLGTYHDLLKIIKDKDFLDNEENEDILEDIVLTLTLFEDREMIEERLKTYAHLFDDKVMKQLKRRRYTGWGRLSRKLINGIRDKQSGKTILDFLKSDGFANRNFMQLIHDDSLTFKEDIQKAQVSGQGDSLHEHIANLAGSPAIKKGILQTVKVVDELVKVMGRHKPENIVIEMARENQTTQKGQKNSRERMKRIEEGIKELGSQILKEHPVENTQLQNEKLYLYYLQNGRDMYVDQELDINRLSDYDVDHIVPQSFLKDDSIDNKVLTRSDKARGKSDNVPSEEVVKKMKNYWRQLLNAKLITQRKFDNLTKAERGGLSELDKAGFIKRQLVETRQITKHVAQILDSRMNTKYDENDKLIREVKVITLKSKLVSDFRKDFQFYKVREINNYHHAHDAYLNAVVGTALIKKYPKLESEFVYGDYKVYDVRKMIAKSEQEIGKATAKYFFYSNIMNFFKTEITLANGEIRKRPLIETNGETGEIVWDKGRDFATVRKVLSMPQVNIVKKTEVQTGGFSKESILPKRNSDKLIARKKDWDPKKYGGFDSPTVAYSVLVVAKVEKGKSKKLKSVKELLGITIMERSSFEKNPIDFLEAKGYKEVKKDLIIKLPKYSLFELENGRKRMLASAGELQKGNELALPSKYVNFLYLASHYEKLKGSPEDNEQKQLFVEQHKHYLDEIIEQISEFSKRVILADANLDKVLSAYNKHRDKPIREQAENIIHLFTLTNLGAPAAFKYFDTTIDRKRYTSTKEVLDATLIHQSITGLYETRIDLSQLGGDGGGGSEAAAKGSSGGTAPLEEEYRLFLEAPIQNVTLLEQWKREIPKVWAEINPPGLASTQAPIHVQLLSTALPVRVRQYPITLEAKRSLRETIRKFRAAGILRPVHSPWNTPLLPVRKSGTSEYRMVQDLREVNKRVETIHPTVPNPYTLLSLLPPDRIWYSVLDLKDAFFCIPLAPESQLIFAFEWADAEEGESGQLTWTRLPQGFKNSPTLFDEALNRDLQGFRLDHPSVSLLQYVDDLLIAADTQAACLSATRDLLMTLAELGYRVSGKKAQLCQEEVTYLGFKIHKGSRSLSNSRTQAILQIPVPKTKRQVREFLGTIGYCRLWIPGFAELAQPLYAATRGGNDPLVWGEKEEEAFQSLKLALTQPPALALPSLDKPFQLFVEETSGAAKGVLTQALGPWKRPVAYLSKRLDPVAAGWPRCLRAIAAAALLTREASKLTFGQDIEITSSHNLESLLRSPPDKWLTNARITQYQVLLLDPPRVRFKQTAALNPATLLPETDDTLPIHHCLDTLDSLTSTRPDLTDQPLAQAEATLFTDGSSYIRDGKRYAGAAVVTLDSVIWAEPLPIGTSAQKAELIALTKALEWSKDKSVNIYTDSRYAFATLHVHGMIYRERGLLTAGGKAIKNAPEILALLTAVWLPKRVAVMHCKGHQKDDAPTSTGNRRADEVAREVAIRPLSTQATISAGKRTADGSEFEKRTADGSEFESPKKKAKVE

SEQ ID NO: 7053 - protein, 2098 aa, synthetic construct
MPAAKRVKLDGGDKKYSIGLDIGTNSVGWAVITDEYKVPSKKFKVLGNTDRHSIKKNLIGALLFDSGETAEATRLKRTARRRYTRRKNRICYLQEIFSNEMAKVDDSFFHRLEESFLVEEDKKHERHPIFGNIVDEVAYHEKYPTIYHLRKKLVDSTDKADLRLIYLALAHMIKFRGHFLIEGDLNPDNSDVDKLFIQLVQTYNQLFEENPINASGVDAKAILSARLSKSRRLENLIAQLPGEKKNGLFGNLIALSLGLTPNFKSNFDLAEDAKLQLSKDTYDDDLDNLLAQIGDQYADLFLAAKNLSDAILLSDILRVNTEITKAPLSASMIKRYDEHHQDLTLLKALVRQQLPEKYKEIFFDQSKNGYAGYIDGGASQEEFYKFIKPILEKMDGTEELLVKLNREDLLRKQRTFDNGSIPHQIHLGELHAILRRQEDFYPFLKDNREKIEKILTFRIPYYVGPLARGNSRFAWMTRKSEETITPWNFEEVVDKGASAQSFIERMTNFDKNLPNEKVLPKHSLLYEYFTVYNELTKVKYVTEGMRKPAFLSGEQKKAIVDLLFKTNRKVTVKQLKEDYFKKIECFDSVEISGVEDRFNASLGTYHDLLKIIKDKDFLDNEENEDILEDIVLTLTLFEDREMIEERLKTYAHLFDDKVMKQLKRRRYTGWGRLSRKLINGIRDKQSGKTILDFLKSDGFANRNFMQLIHDDSLTFKEDIQKAQVSGQGDSLHEHIANLAGSPAIKKGILQTVKVVDELVKVMGRHKPENIVIEMARENQTTQKGQKNSRERMKRIEEGIKELGSQILKEHPVENTQLQNEKLYLYYLQNGRDMYVDQELDINRLSDYDVDHIVPQSFLKDDSIDNKVLTRSDKARGKSDNVPSEEVVKKMKNYWRQLLNAKLITQRKFDNLTKAERGGLSELDKAGFIKRQLVETRQITKHVAQILDSRMNTKYDENDKLIREVKVITLKSKLVSDFRKDFQFYKVREINNYHHAHDAYLNAVVGTALIKKYPKLESEFVYGDYKVYDVRKMIAKSEQEIGKATAKYFFYSNIMNFFKTEITLANGEIRKRPLIETNGETGEIVWDKGRDFATVRKVLSMPQVNIVKKTEVQTGGFSKESILPKRNSDKLIARKKDWDPKKYGGFDSPTVAYSVLVVAKVEKGKSKKLKSVKELLGITIMERSSFEKNPIDFLEAKGYKEVKKDLIIKLPKYSLFELENGRKRMLASAGELQKGNELALPSKYVNFLYLASHYEKLKGSPEDNEQKQLFVEQHKHYLDEIIEQISEFSKRVILADANLDKVLSAYNKHRDKPIREQAENIIHLFTLTNLGAPAAFKYFDTTIDRKRYTSTKEVLDATLIHQSITGLYETRIDLSQLGGDGGGGSEAAAKGSSGGTAPLEEEYRLFLEAPIQNVTLLEQWKREIPKVWAEINPPGLASTQAPIHVQLLSTALPVRVRQYPITLEAKRSLRETIRKFRAAGILRPVHSPWNTPLLPVRKSGTSEYRMVQDLREVNKRVETIHPTVPNPYTLLSLLPPDRIWYSVLDLKDAFFCIPLAPESQLIFAFEWADAEEGESGQLTWTRLPQGFKNSPTLFNEALNRDLQGFRLDHPSVSLLQYVDDLLIAADTQAACLSATRDLLMTLAELGYRVSGKKAQLCQEEVTYLGFKIHKGSRSLSNSRTQAILQIPVPKTKRQVREFLGTIGYCRLWIPGFAELAQPLYAATRPGNDPLVWGEKEEEAFQSLKLALTQPPALALPSLDKPFQLFVEETSGAAKGVLTQALGPWKRPVAYLSKRLDPVAAGWPRCLRAIAAAALLTREASKLTFGQDIEITSSHNLESLLRSPPDKWLTNARITQYQVLLLDPPRVRFKQTAALNPATLLPETDDTLPIHHCLDTLDSLTSTRPDLTDQPLAQAEATLFTDGSSYIRDGKRYAGAAVVTLDSVIWAEPLPIGTSAQKAELIALTKALEWSKDKSVNIYTDSRYAFATLHVHGMIYRERGWLTAGGKAIKNAPEILALLTAVWLPKRVAVMHCKGHQKDDAPTSTGNRRADEVAREVAIRPLSTQATISAGKRTADGSEFEKRTADGSEFESPKKKAKVE

SEQ ID NO: 7054 - protein, 2098 aa, synthetic construct
MPAAKRVKLDGGDKKYSIGLDIGTNSVGWAVITDEYKVPSKKFKVLGNTDRHSIKKNLIGALLFDSGETAEATRLKRTARRRYTRRKNRICYLQEIFSNEMAKVDDSFFHRLEESFLVEEDKKHERHPIFGNIVDEVAYHEKYPTIYHLRKKLVDSTDKADLRLIYLALAHMIKFRGHFLIEGDLNPDNSDVDKLFIQLVQTYNQLFEENPINASGVDAKAILSARLSKSRRLENLIAQLPGEKKNGLFGNLIALSLGLTPNFKSNFDLAEDAKLQLSKDTYDDDLDNLLAQIGDQYADLFLAAKNLSDAILLSDILRVNTEITKAPLSASMIKRYDEHHQDLTLLKALVRQQLPEKYKEIFFDQSKNGYAGYIDGGASQEEFYKFIKPILEKMDGTEELLVKLNREDLLRKQRTFDNGSIPHQIHLGELHAILRRQEDFYPFLKDNREKIEKILTFRIPYYVGPLARGNSRFAWMTRKSEETITPWNFEEVVDKGASAQSFIERMTNFDKNLPNEKVLPKHSLLYEYFTVYNELTKVKYVTEGMRKPAFLSGEQKKAIVDLLFKTNRKVTVKQLKEDYFKKIECFDSVEISGVEDRFNASLGTYHDLLKIIKDKDFLDNEENEDILEDIVLTLTLFEDREMIEERLKTYAHLFDDKVMKQLKRRRYTGWGRLSRKLINGIRDKQSGKTILDFLKSDGFANRNFMQLIHDDSLTFKEDIQKAQVSGQGDSLHEHIANLAGSPAIKKGILQTVKVVDELVKVMGRHKPENIVIEMARENQTTQKGQKNSRERMKRIEEGIKELGSQILKEHPVENTQLQNEKLYLYYLQNGRDMYVDQELDINRLSDYDVDHIVPQSFLKDDSIDNKVLTRSDKARGKSDNVPSEEVVKKMKNYWRQLLNAKLITQRKFDNLTKAERGGLSELDKAGFIKRQLVETRQITKHVAQILDSRMNTKYDENDKLIREVKVITLKSKLVSDFRKDFQFYKVREINNYHHAHDAYLNAVVGTALIKKYPKLESEFVYGDYKVYDVRKMIAKSEQEIGKATAKYFFYSNIMNFFKTEITLANGEIRKRPLIETNGETGEIVWDKGRDFATVRKVLSMPQVNIVKKTEVQTGGFSKESILPKRNSDKLIARKKDWDPKKYGGFDSPTVAYSVLVVAKVEKGKSKKLKSVKELLGITIMERSSFEKNPIDFLEAKGYKEVKKDLIIKLPKYSLFELENGRKRMLASAGELQKGNELALPSKYVNFLYLASHYEKLKGSPEDNEQKQLFVEQHKHYLDEIIEQISEFSKRVILADANLDKVLSAYNKHRDKPIREQAENIIHLFTLTNLGAPAAFKYFDTTIDRKRYTSTKEVLDATLIHQSITGLYETRIDLSQLGGDGGGGSEAAAKGSSGGTAPLEEEYRLFLEAPIQNVTLLEQWKREIPKVWAEINPPGLASTQAPIHVQLLSTALPVRVRQYPITLEAKRSLRETIRKFRAAGILRPVHSPWNTPLLPVRKSGTSEYRMVQDLREVNKRVETIHPTVPNPYTLLSLLPPDRIWYSVLDLKDAFFCIPLAPESQLIFAFEWADAEEGESGQLTWTRLPQGFKNSPTLFNEALNRDLQGFRLDHPSVSLLQYVDDLLIAADTQAACLSATRDLLMTLAELGYRVSGKKAQLCQEEVTYLGFKIHKGSRSLSNSRTQAILQIPVPKTKRQVREFLGKIGYCRLFIPGFAELAQPLYAATRPGNDPLVWGEKEEEAFQSLKLALTQPPALALPSLDKPFQLFVEETSGAAKGVLTQALGPWKRPVAYLSKRLDPVAAGWPRCLRAIAAAALLTREASKLTFGQDIEITSSHNLESLLRSPPDKWLTNARITQYQVLLLDPPRVRFKQTAALNPATLLPETDDTLPIHHCLDTLDSLTSTRPDLTDQPLAQAEATLFTDGSSYIRDGKRYAGAAVVTLDSVIWAEPLPIGTSAQKAELIALTKALEWSKDKSVNIYTDSRYAFATLHVHGMIYRERGWLTAGGKAIKNAPEILALLTAVWLPKRVAVMHCKGHQKDDAPTSTGNRRADEVAREVAIRPLSTQATISAGKRTADGSEFEKRTADGSEFESPKKKAKVE

SEQ ID NO: 7055 - protein, 2087 aa, synthetic construct
MPAAKRVKLDGGDKKYSIGLDIGTNSVGWAVITDEYKVPSKKFKVLGNTDRHSIKKNLIGALLFDSGETAEATRLKRTARRRYTRRKNRICYLQEIFSNEMAKVDDSFFHRLEESFLVEEDKKHERHPIFGNIVDEVAYHEKYPTIYHLRKKLVDSTDKADLRLIYLALAHMIKFRGHFLIEGDLNPDNSDVDKLFIQLVQTYNQLFEENPINASGVDAKAILSARLSKSRRLENLIAQLPGEKKNGLFGNLIALSLGLTPNFKSNFDLAEDAKLQLSKDTYDDDLDNLLAQIGDQYADLFLAAKNLSDAILLSDILRVNTEITKAPLSASMIKRYDEHHQDLTLLKALVRQQLPEKYKEIFFDQSKNGYAGYIDGGASQEEFYKFIKPILEKMDGTEELLVKLNREDLLRKQRTFDNGSIPHQIHLGELHAILRRQEDFYPFLKDNREKIEKILTFRIPYYVGPLARGNSRFAWMTRKSEETITPWNFEEVVDKGASAQSFIERMTNFDKNLPNEKVLPKHSLLYEYFTVYNELTKVKYVTEGMRKPAFLSGEQKKAIVDLLFKTNRKVTVKQLKEDYFKKIECFDSVEISGVEDRFNASLGTYHDLLKIIKDKDFLDNEENEDILEDIVLTLTLFEDREMIEERLKTYAHLFDDKVMKQLKRRRYTGWGRLSRKLINGIRDKQSGKTILDFLKSDGFANRNFMQLIHDDSLTFKEDIQKAQVSGQGDSLHEHIANLAGSPAIKKGILQTVKVVDELVKVMGRHKPENIVIEMARENQTTQKGQKNSRERMKRIEEGIKELGSQILKEHPVENTQLQNEKLYLYYLQNGRDMYVDQELDINRLSDYDVDHIVPQSFLKDDSIDNKVLTRSDKARGKSDNVPSEEVVKKMKNYWRQLLNAKLITQRKFDNLTKAERGGLSELDKAGFIKRQLVETRQITKHVAQILDSRMNTKYDENDKLIREVKVITLKSKLVSDFRKDFQFYKVREINNYHHAHDAYLNAVVGTALIKKYPKLESEFVYGDYKVYDVRKMIAKSEQEIGKATAKYFFYSNIMNFFKTEITLANGEIRKRPLIETNGETGEIVWDKGRDFATVRKVLSMPQVNIVKKTEVQTGGFSKESILPKRNSDKLIARKKDWDPKKYGGFDSPTVAYSVLVVAKVEKGKSKKLKSVKELLGITIMERSSFEKNPIDFLEAKGYKEVKKDLIIKLPKYSLFELENGRKRMLASAGELQKGNELALPSKYVNFLYLASHYEKLKGSPEDNEQKQLFVEQHKHYLDEIIEQISEFSKRVILADANLDKVLSAYNKHRDKPIREQAENIIHLFTLTNLGAPAAFKYFDTTIDRKRYTSTKEVLDATLIHQSITGLYETRIDLSQLGGDGGGGSEAAAKGSSGGVPWILKKPLELTIKLDLEEQQGTLLNNSILSKKGKEELKQLFEKYSALWQSWENQVGHRRIRPHKIATGTVKPTPQKQYHINPKAKPDIQIVINDLLKQGVLIQKESTMNTPVYPVPKPNGRWRMVLDYRAVNKVTPLIAVQNQHSYGILGSLFKGRYKTTIDLSNGFWAHPIVPEDYWITAFTWQGKQYCWTVLPQGFLNSPGLFTGDVVDLLQGIPNVEVYVDDVYISHDSEKEHLEYLDILFNRLKEAGYIISLKKSNIANSIVDFLGFQITNEGRGLTDTFKEKLENITAPTTLKQLQSILGLLNFARNFIPDFTELIAPLYALIPKSTKNYVPWQIEHSTTLETLITKLNGAEYLQGRKGDKTLIMKVNASYTTGYIRYYNEGEKKPISYVSIVFSKTELKFTELEKLLTTVHKGLLKALDLSMGQNIHVYSPIVSMQNIQKTPQTAKKALASRWLSWLSYLEDPRIRFFYDPQMPALKDLPAVDTGKDNKKHPSNFQHIFYTDGSAITSPTKEGHLNAGMGIVYFINKDGNLQKQQEWSISLGNHTAQFAEIAAFEFALKKCLPLGGNILVVTDSNYVAKAYNEELDVWASNGFVNNRKKPLKHISKWKSVADLKRLRPDVVVTHEPGHQKLDSSPHAYGNNLADQLATQASFKVHAGKRTADGSEFEKRTADGSEFESPKKKAKVE

SEQ ID NO: 7056 - protein, 2176 aa, synthetic construct
MPAAKRVKLDGGDKKYSIGLDIGTNSVGWAVITDEYKVPSKKFKVLGNTDRHSIKKNLIGALLFDSGETAEATRLKRTARRRYTRRKNRICYLQEIFSNEMAKVDDSFFHRLEESFLVEEDKKHERHPIFGNIVDEVAYHEKYPTIYHLRKKLVDSTDKADLRLIYLALAHMIKFRGHFLIEGDLNPDNSDVDKLFIQLVQTYNQLFEENPINASGVDAKAILSARLSKSRRLENLIAQLPGEKKNGLFGNLIALSLGLTPNFKSNFDLAEDAKLQLSKDTYDDDLDNLLAQIGDQYADLFLAAKNLSDAILLSDILRVNTEITKAPLSASMIKRYDEHHQDLTLLKALVRQQLPEKYKEIFFDQSKNGYAGYIDGGASQEEFYKFIKPILEKMDGTEELLVKLNREDLLRKQRTFDNGSIPHQIHLGELHAILRRQEDFYPFLKDNREKIEKILTFRIPYYVGPLARGNSRFAWMTRKSEETITPWNFEEVVDKGASAQSFIERMTNFDKNLPNEKVLPKHSLLYEYFTVYNELTKVKYVTEGMRKPAFLSGEQKKAIVDLLFKTNRKVTVKQLKEDYFKKIECFDSVEISGVEDRFNASLGTYHDLLKIIKDKDFLDNEENEDILEDIVLTLTLFEDREMIEERLKTYAHLFDDKVMKQLKRRRYTGWGRLSRKLINGIRDKQSGKTILDFLKSDGFANRNFMQLIHDDSLTFKEDIQKAQVSGQGDSLHEHIANLAGSPAIKKGILQTVKVVDELVKVMGRHKPENIVIEMARENQTTQKGQKNSRERMKRIEEGIKELGSQILKEHPVENTQLQNEKLYLYYLQNGRDMYVDQELDINRLSDYDVDHIVPQSFLKDDSIDNKVLTRSDKARGKSDNVPSEEVVKKMKNYWRQLLNAKLITQRKFDNLTKAERGGLSELDKAGFIKRQLVETRQITKHVAQILDSRMNTKYDENDKLIREVKVITLKSKLVSDFRKDFQFYKVREINNYHHAHDAYLNAVVGTALIKKYPKLESEFVYGDYKVYDVRKMIAKSEQEIGKATAKYFFYSNIMNFFKTEITLANGEIRKRPLIETNGETGEIVWDKGRDFATVRKVLSMPQVNIVKKTEVQTGGFSKESILPKRNSDKLIARKKDWDPKKYGGFDSPTVAYSVLVVAKVEKGKSKKLKSVKELLGITIMERSSFEKNPIDFLEAKGYKEVKKDLIIKLPKYSLFELENGRKRMLASAGELQKGNELALPSKYVNFLYLASHYEKLKGSPEDNEQKQLFVEQHKHYLDEIIEQISEFSKRVILADANLDKVLSAYNKHRDKPIREQAENIIHLFTLTNLGAPAAFKYFDTTIDRKRYTSTKEVLDATLIHQSITGLYETRIDLSQLGGDGGGGSEAAAKGSSGGMNPLQLLQPLPAEIKGTKLLAHWNSGATITCIPESFLEDEQPIKKTLIKTIHGEKQQNVYYVTFKVKGRKVEAEVIASPYEYILLSPTDVPWLTQQPLQLTILVPLQEYQEKILSKTALPEDQKQQLKTLFVKYDNLWQHWENQVGHRKIRPHNIATGDYPPRPQKQYPINPKAKPSIQIVIDDLLKQGVLTPQNSTMNTPVYPVPKPDGRWRMVLDYREVNKTIPLTAAQNQHSAGILATIVRQKYKTTLDLANGFWAHPITPESYWLTAFTWQGKQYCWTRLPQGFLNSPALFNADVVDLLKEIPNVQVYVDDIYLSHDDPKEHVQQLEKVFQILLQAGYVVSLKKSEIGQKTVEFLGFNITKEGRGLTDTFKTKLLNITPPKDLKQLQSILGKLNFARNFIPNFAELVQPLYNLIAPAKGKYIEWSEENTKQLNMVIEALNTASNLEERLPEQRLVIKVNTSPSAGYVRYYNETGKKPIMYLNYVFSKAELKFSMLEKLLTTMHKALIKAMDLAMGQEILVYSPIVSMTKIQKTPLPERKALPIRWITWMTYLEDPRIQFHYDKTLPELKHIPDVYTSSQSPVKHPSQYEGVFYTDGSAIKSPDPTKSNNAGMGIVHATYKPEYQVLNQWSIPLGNHTAQMAEIAAVEFACKKALKIPGPVLVITDSFYVAESANKELPYWKSNGFVNNKKKPLKHISKWKSIAECLSMKPDITIQHEKGISLQIPVFILKGNALADKLATQGSYVVNAGKRTADGSEFEKRTADGSEFESPKKKAKVE

SEQ ID NO: 7057 - protein, 2218 aa, synthetic construct
MPAAKRVKLDGGDKKYSIGLDIGTNSVGWAVITDEYKVPSKKFKVLGNTDRHSIKKNLIGALLFDSGETAEATRLKRTARRRYTRRKNRICYLQEIFSNEMAKVDDSFFHRLEESFLVEEDKKHERHPIFGNIVDEVAYHEKYPTIYHLRKKLVDSTDKADLRLIYLALAHMIKFRGHFLIEGDLNPDNSDVDKLFIQLVQTYNQLFEENPINASGVDAKAILSARLSKSRRLENLIAQLPGEKKNGLFGNLIALSLGLTPNFKSNFDLAEDAKLQLSKDTYDDDLDNLLAQIGDQYADLFLAAKNLSDAILLSDILRVNTEITKAPLSASMIKRYDEHHQDLTLLKALVRQQLPEKYKEIFFDQSKNGYAGYIDGGASQEEFYKFIKPILEKMDGTEELLVKLNREDLLRKQRTFDNGSIPHQIHLGELHAILRRQEDFYPFLKDNREKIEKILTFRIPYYVGPLARGNSRFAWMTRKSEETITPWNFEEVVDKGASAQSFIERMTNFDKNLPNEKVLPKHSLLYEYFTVYNELTKVKYVTEGMRKPAFLSGEQKKAIVDLLFKTNRKVTVKQLKEDYFKKIECFDSVEISGVEDRFNASLGTYHDLLKIIKDKDFLDNEENEDILEDIVLTLTLFEDREMIEERLKTYAHLFDDKVMKQLKRRRYTGWGRLSRKLINGIRDKQSGKTILDFLKSDGFANRNFMQLIHDDSLTFKEDIQKAQVSGQGDSLHEHIANLAGSPAIKKGILQTVKVVDELVKVMGRHKPENIVIEMARENQTTQKGQKNSRERMKRIEEGIKELGSQILKEHPVENTQLQNEKLYLYYLQNGRDMYVDQELDINRLSDYDVDHIVPQSFLKDDSIDNKVLTRSDKARGKSDNVPSEEVVKKMKNYWRQLLNAKLITQRKFDNLTKAERGGLSELDKAGFIKRQLVETRQITKHVAQILDSRMNTKYDENDKLIREVKVITLKSKLVSDFRKDFQFYKVREINNYHHAHDAYLNAVVGTALIKKYPKLESEFVYGDYKVYDVRKMIAKSEQEIGKATAKYFFYSNIMNFFKTEITLANGEIRKRPLIETNGETGEIVWDKGRDFATVRKVLSMPQVNIVKKTEVQTGGFSKESILPKRNSDKLIARKKDWDPKKYGGFDSPTVAYSVLVVAKVEKGKSKKLKSVKELLGITIMERSSFEKNPIDFLEAKGYKEVKKDLIIKLPKYSLFELENGRKRMLASAGELQKGNELALPSKYVNFLYLASHYEKLKGSPEDNEQKQLFVEQHKHYLDEIIEQISEFSKRVILADANLDKVLSAYNKHRDKPIREQAENIIHLFTLTNLGAPAAFKYFDTTIDRKRYTSTKEVLDATLIHQSITGLYETRIDLSQLGGDGGGGSEAAAKGSSGGTLGDQGSRGSDPLPEPRVTLTVEGIPTEFLVNTGAEHSVLTKPMGKMGSKRTVVAGATGSKVYPWTTKRLLKIGQKQVTHSFLVIPECPAPLLGRDLLTKLKAQIQFSTEGPQVTWEDRPAMCLVLNLEEEYRLHEKPVPPSIDPSWLQLFPMVWAEKAGMGLANQVPPVVVELKSDASPVAVRQYPMSKEAREGIRPHIQRFLDLGILVPCQSPWNTPLLPVKKPGTNDYRPVQDLREVNKRVQDIHPTVPNPYNLLSSLPPSHTWYSVLDLKDAFFCLKLHPNSQPLFAFEWRDPEKGNTGQLTWTRLPQGFKNSPTLFDEALHRDLASFRALNPQVVMLQYVDDLLVAAPTYRDCKEGTRRLLQELSKLGYRVSAKKAQLCREEVTYLGYLLKGGKRWLTPARKATVMKIPTPTTPRQVREFLGTAGFCRLWIPGFASLAAPLYPLTREKVPFTWTEAHQEAFGRIKEALLSAPALALPDLTKPFALYVDEKEGVARGVLTQTLGPWRRPVAYLSKKLDPVASGWPTCLKAIAAVALLLKDADKLTLGQNVLVIAPHNLESIVRQPPDRWMTNARMTHYQSLLLNERVSFAPPAILNPATLLPVESDDTPIHICSEILAEETGTRPDLRDQPLPGVPAWYTDGSSFIMDGRRQAGAAIVDNKRTVWASNLPEGTSAQKAELIALTQALRLAEGKSINIYTDSRYAFATAHVHGAIYKQRGLLTSAGKDIKNKEEILALLEAIHLPKRVAIIHCPGHQRGTDPVATGNRKADEAAKQAAQSTRILTETTKNAGKRTADGSEFEKRTADGSEFESPKKKAKVE

SEQ ID NO: 7058 - protein, 2127 aa, synthetic construct
MPAAKRVKLDGGDKKYSIGLDIGTNSVGWAVITDEYKVPSKKFKVLGNTDRHSIKKNLIGALLFDSGETAEATRLKRTARRRYTRRKNRICYLQEIFSNEMAKVDDSFFHRLEESFLVEEDKKHERHPIFGNIVDEVAYHEKYPTIYHLRKKLVDSTDKADLRLIYLALAHMIKFRGHFLIEGDLNPDNSDVDKLFIQLVQTYNQLFEENPINASGVDAKAILSARLSKSRRLENLIAQLPGEKKNGLFGNLIALSLGLTPNFKSNFDLAEDAKLQLSKDTYDDDLDNLLAQIGDQYADLFLAAKNLSDAILLSDILRVNTEITKAPLSASMIKRYDEHHQDLTLLKALVRQQLPEKYKEIFFDQSKNGYAGYIDGGASQEEFYKFIKPILEKMDGTEELLVKLNREDLLRKQRTFDNGSIPHQIHLGELHAILRRQEDFYPFLKDNREKIEKILTFRIPYYVGPLARGNSRFAWMTRKSEETITPWNFEEVVDKGASAQSFIERMTNFDKNLPNEKVLPKHSLLYEYFTVYNELTKVKYVTEGMRKPAFLSGEQKKAIVDLLFKTNRKVTVKQLKEDYFKKIECFDSVEISGVEDRFNASLGTYHDLLKIIKDKDFLDNEENEDILEDIVLTLTLFEDREMIEERLKTYAHLFDDKVMKQLKRRRYTGWGRLSRKLINGIRDKQSGKTILDFLKSDGFANRNFMQLIHDDSLTFKEDIQKAQVSGQGDSLHEHIANLAGSPAIKKGILQTVKVVDELVKVMGRHKPENIVIEMARENQTTQKGQKNSRERMKRIEEGIKELGSQILKEHPVENTQLQNEKLYLYYLQNGRDMYVDQELDINRLSDYDVDHIVPQSFLKDDSIDNKVLTRSDKARGKSDNVPSEEVVKKMKNYWRQLLNAKLITQRKFDNLTKAERGGLSELDKAGFIKRQLVETRQITKHVAQILDSRMNTKYDENDKLIREVKVITLKSKLVSDFRKDFQFYKVREINNYHHAHDAYLNAVVGTALIKKYPKLESEFVYGDYKVYDVRKMIAKSEQEIGKATAKYFFYSNIMNFFKTEITLANGEIRKRPLIETNGETGEIVWDKGRDFATVRKVLSMPQVNIVKKTEVQTGGFSKESILPKRNSDKLIARKKDWDPKKYGGFDSPTVAYSVLVVAKVEKGKSKKLKSVKELLGITIMERSSFEKNPIDFLEAKGYKEVKKDLIIKLPKYSLFELENGRKRMLASAGELQKGNELALPSKYVNFLYLASHYEKLKGSPEDNEQKQLFVEQHKHYLDEIIEQISEFSKRVILADANLDKVLSAYNKHRDKPIREQAENIIHLFTLTNLGAPAAFKYFDTTIDRKRYTSTKEVLDATLIHQSITGLYETRIDLSQLGGDGGGGSEAAAKGSSGGLLGRDLLTKLKAQIQFSTEGPQVTWEDRPAMCLVLNLEEEYRLHEKPVPPSIDPSWLQLFPMVWAEKAGMGLANQVPPVVVELKSDASPVAVRQYPMSKEAREGIRPHIQRFLDLGILVPCQSPWNTPLLPVKKPGTNDYRPVQDLREVNKRVQDIHPTVPNPYNLLSSLPPSHTWYSVLDLKDAFFCLKLHPNSQPLFAFEWRDPEKGNTGQLTWTRLPQGFKNSPTLFNEALHRDLASFRALNPQVVMLQYVDDLLVAAPTYRDCKEGTRRLLQELSKLGYRVSAKKAQLCREEVTYLGYLLKGGKRWLTPARKATVMKIPTPTTPRQVREFLGTAGFCRLWIPGFASLAAPLYPLTRPKVPFTWTEAHQEAFGRIKEALLSAPALALPDLTKPFALYVDEKEGVARGVLTQTLGPWRRPVAYLSKKLDPVASGWPTCLKAIAAVALLLKDADKLTLGQNVLVIAPHNLESIVRQPPDRWMTNARMTHYQSLLLNERVSFAPPAILNPATLLPVESDDTPIHICSEILAEETGTRPDLRDQPLPGVPAWYTDGSSFIMDGRRQAGAAIVDNKRTVWASNLPEGTSAQKAELIALTQALRLAEGKSINIYTDSRYAFATAHVHGAIYKQRGWLTSAGKDIKNKEEILALLEAIHLPKRVAIIHCPGHQRGTDPVATGNRKADEAAKQAAQSTRILTETTKNAGKRTADGSEFEKRTADGSEFESPKKKAKVE

SEQ ID NO: 7059 - protein, 2096 aa, synthetic construct
MPAAKRVKLDGGDKKYSIGLDIGTNSVGWAVITDEYKVPSKKFKVLGNTDRHSIKKNLIGALLFDSGETAEATRLKRTARRRYTRRKNRICYLQEIFSNEMAKVDDSFFHRLEESFLVEEDKKHERHPIFGNIVDEVAYHEKYPTIYHLRKKLVDSTDKADLRLIYLALAHMIKFRGHFLIEGDLNPDNSDVDKLFIQLVQTYNQLFEENPINASGVDAKAILSARLSKSRRLENLIAQLPGEKKNGLFGNLIALSLGLTPNFKSNFDLAEDAKLQLSKDTYDDDLDNLLAQIGDQYADLFLAAKNLSDAILLSDILRVNTEITKAPLSASMIKRYDEHHQDLTLLKALVRQQLPEKYKEIFFDQSKNGYAGYIDGGASQEEFYKFIKPILEKMDGTEELLVKLNREDLLRKQRTFDNGSIPHQIHLGELHAILRRQEDFYPFLKDNREKIEKILTFRIPYYVGPLARGNSRFAWMTRKSEETITPWNFEEVVDKGASAQSFIERMTNFDKNLPNEKVLPKHSLLYEYFTVYNELTKVKYVTEGMRKPAFLSGEQKKAIVDLLFKTNRKVTVKQLKEDYFKKIECFDSVEISGVEDRFNASLGTYHDLLKIIKDKDFLDNEENEDILEDIVLTLTLFEDREMIEERLKTYAHLFDDKVMKQLKRRRYTGWGRLSRKLINGIRDKQSGKTILDFLKSDGFANRNFMQLIHDDSLTFKEDIQKAQVSGQGDSLHEHIANLAGSPAIKKGILQTVKVVDELVKVMGRHKPENIVIEMARENQTTQKGQKNSRERMKRIEEGIKELGSQILKEHPVENTQLQNEKLYLYYLQNGRDMYVDQELDINRLSDYDVDHIVPQSFLKDDSIDNKVLTRSDKARGKSDNVPSEEVVKKMKNYWRQLLNAKLITQRKFDNLTKAERGGLSELDKAGFIKRQLVETRQITKHVAQILDSRMNTKYDENDKLIREVKVITLKSKLVSDFRKDFQFYKVREINNYHHAHDAYLNAVVGTALIKKYPKLESEFVYGDYKVYDVRKMIAKSEQEIGKATAKYFFYSNIMNFFKTEITLANGEIRKRPLIETNGETGEIVWDKGRDFATVRKVLSMPQVNIVKKTEVQTGGFSKESILPKRNSDKLIARKKDWDPKKYGGFDSPTVAYSVLVVAKVEKGKSKKLKSVKELLGITIMERSSFEKNPIDFLEAKGYKEVKKDLIIKLPKYSLFELENGRKRMLASAGELQKGNELALPSKYVNFLYLASHYEKLKGSPEDNEQKQLFVEQHKHYLDEIIEQISEFSKRVILADANLDKVLSAYNKHRDKPIREQAENIIHLFTLTNLGAPAAFKYFDTTIDRKRYTSTKEVLDATLIHQSITGLYETRIDLSQLGGDGGGGSEAAAKGSSGGTLGIEDEYRLHETSTEPDVSLGSTWLSDFPQAWAETGGMGLAVRQAPLIIPLKATSTPVSIQQYPMSHEARLGIKPHIQRLLDQGILVPCQSPWNTPLLPVKKPGTNDYRPVQDLREVNKRVEDIHPTVPNPYNLLSGLPPSHQWYTVLDLKDAFFCLRLHPTSQPLFAFEWRDPGMGISGQLTWTRLPQGFKNSPTLFDEALHRDLADFRIQHPDLILLQYVDDILLAATSELDCQQGTRALLQTLGDLGYRASAKKAQICQKQVKYLGYLLREGQRWLTEARKETVMGQPVPKTPRQLREFLGTAGFCRLWIPGFAEMAAPLYPLTKTGTLFSWGPDQQKAYQEIKQALLTAPALGLPDLTKPFELFVDEKQGYAKGVLTQKLGPWRRPVAYLSKKLDPVAAGWPPCLRMVAAIAVLTKDAGKLTMGQPLVILAPHAVEALVKQPPDRWLSNARMTHYQAMLLDTDRVQFGPVVALNPATLLPLPEEGAPHDCLEILAETHGTRPDLTDQPIPDADHTWYTDGSSFLQEGQRKAGAAVTTETEVIWAGALPAGTSAQRAELIALTQALKMAEGKRLNVYTDSRYAFATAHIHGEIYRRRGLLTSEGREIKNKSEILALLKALFLPKRLSIIHCLGHQKGDSAEARGNRLADQAAREAAIKTPPDTSTLLAGKRTADGSEFEKRTADGSEFESPKKKAKVE

SEQ ID NO: 7060 - protein, 2096 aa, synthetic construct
MPAAKRVKLDGGDKKYSIGLDIGTNSVGWAVITDEYKVPSKKFKVLGNTDRHSIKKNLIGALLFDSGETAEATRLKRTARRRYTRRKNRICYLQEIFSNEMAKVDDSFFHRLEESFLVEEDKKHERHPIFGNIVDEVAYHEKYPTIYHLRKKLVDSTDKADLRLIYLALAHMIKFRGHFLIEGDLNPDNSDVDKLFIQLVQTYNQLFEENPINASGVDAKAILSARLSKSRRLENLIAQLPGEKKNGLFGNLIALSLGLTPNFKSNFDLAEDAKLQLSKDTYDDDLDNLLAQIGDQYADLFLAAKNLSDAILLSDILRVNTEITKAPLSASMIKRYDEHHQDLTLLKALVRQQLPEKYKEIFFDQSKNGYAGYIDGGASQEEFYKFIKPILEKMDGTEELLVKLNREDLLRKQRTFDNGSIPHQIHLGELHAILRRQEDFYPFLKDNREKIEKILTFRIPYYVGPLARGNSRFAWMTRKSEETITPWNFEEVVDKGASAQSFIERMTNFDKNLPNEKVLPKHSLLYEYFTVYNELTKVKYVTEGMRKPAFLSGEQKKAIVDLLFKTNRKVTVKQLKEDYFKKIECFDSVEISGVEDRFNASLGTYHDLLKIIKDKDFLDNEENEDILEDIVLTLTLFEDREMIEERLKTYAHLFDDKVMKQLKRRRYTGWGRLSRKLINGIRDKQSGKTILDFLKSDGFANRNFMQLIHDDSLTFKEDIQKAQVSGQGDSLHEHIANLAGSPAIKKGILQTVKVVDELVKVMGRHKPENIVIEMARENQTTQKGQKNSRERMKRIEEGIKELGSQILKEHPVENTQLQNEKLYLYYLQNGRDMYVDQELDINRLSDYDVDHIVPQSFLKDDSIDNKVLTRSDKARGKSDNVPSEEVVKKMKNYWRQLLNAKLITQRKFDNLTKAERGGLSELDKAGFIKRQLVETRQITKHVAQILDSRMNTKYDENDKLIREVKVITLKSKLVSDFRKDFQFYKVREINNYHHAHDAYLNAVVGTALIKKYPKLESEFVYGDYKVYDVRKMIAKSEQEIGKATAKYFFYSNIMNFFKTEITLANGEIRKRPLIETNGETGEIVWDKGRDFATVRKVLSMPQVNIVKKTEVQTGGFSKESILPKRNSDKLIARKKDWDPKKYGGFDSPTVAYSVLVVAKVEKGKSKKLKSVKELLGITIMERSSFEKNPIDFLEAKGYKEVKKDLIIKLPKYSLFELENGRKRMLASAGELQKGNELALPSKYVNFLYLASHYEKLKGSPEDNEQKQLFVEQHKHYLDEIIEQISEFSKRVILADANLDKVLSAYNKHRDKPIREQAENIIHLFTLTNLGAPAAFKYFDTTIDRKRYTSTKEVLDATLIHQSITGLYETRIDLSQLGGDGGGGSEAAAKGSSGGTLNIEDEYRLHETSKGPDVPLGSTWLSDFPQAWAETGGMGLAVRQAPLIIPLKATSTPVSIKQYPMSQEARLGIKPHIQRLLDQGILVPCQSPWNTPLLPVKKPGTNDYRPVQDLREVNKRVEDIHPTVPNPYNLLSGLPPSHQWYTVLDLKDAFFCLRLHPTSQSLFAFEWRDPEMGISGQLTWTRLPQGFKNSPTLFNEALHRDLADFRIQHPDLILLQYVDDLLLAATSELDCQQGTRALLQTLGDLGYRASAKKAQICQKQVKYLGYLLKEGQRWLTEARKETVMGQPTPKTPRQLREFLGTAGFCRLWIPGFAEMAAPLYPLTKPGTLFEWGPDQQKAYQEIKQALLTAPALGLPDLTKPFELFVDEKQGYAKGVLTQKLGPWRRPVAYLSKKLDPVAAGWPPCLRMVAAIAVLTKDAGKLTMGQPLVILAPHAVEALVKQPPDRWLSNARMTHYQALLLDTDRVQFGPIVALNPATLLPLPEEGLQHDCLDILAEAHGTRPDLTDQPLPDADHTWYTDGSSFLQEGQRKAGAAVTTETEVVWAKALPAGTSAQRAELIALTQALKMAEGKKLNVYTDSRYAFATAHIHGEIYRRRGWLTSEGKEIKNKDEILALLKALFLPKRLSIIHCPGHQKGNRAEARGNRMADQAAREVATRETPETSTLLAGKRTADGSEFEKRTADGSEFESPKKKAKVE

SEQ ID NO: 7061 - protein, 2116 aa, synthetic construct
MPAAKRVKLDGGDKKYSIGLDIGTNSVGWAVITDEYKVPSKKFKVLGNTDRHSIKKNLIGALLFDSGETAEATRLKRTARRRYTRRKNRICYLQEIFSNEMAKVDDSFFHRLEESFLVEEDKKHERHPIFGNIVDEVAYHEKYPTIYHLRKKLVDSTDKADLRLIYLALAHMIKFRGHFLIEGDLNPDNSDVDKLFIQLVQTYNQLFEENPINASGVDAKAILSARLSKSRRLENLIAQLPGEKKNGLFGNLIALSLGLTPNFKSNFDLAEDAKLQLSKDTYDDDLDNLLAQIGDQYADLFLAAKNLSDAILLSDILRVNTEITKAPLSASMIKRYDEHHQDLTLLKALVRQQLPEKYKEIFFDQSKNGYAGYIDGGASQEEFYKFIKPILEKMDGTEELLVKLNREDLLRKQRTFDNGSIPHQIHLGELHAILRRQEDFYPFLKDNREKIEKILTFRIPYYVGPLARGNSRFAWMTRKSEETITPWNFEEVVDKGASAQSFIERMTNFDKNLPNEKVLPKHSLLYEYFTVYNELTKVKYVTEGMRKPAFLSGEQKKAIVDLLFKTNRKVTVKQLKEDYFKKIECFDSVEISGVEDRFNASLGTYHDLLKIIKDKDFLDNEENEDILEDIVLTLTLFEDREMIEERLKTYAHLFDDKVMKQLKRRRYTGWGRLSRKLINGIRDKQSGKTILDFLKSDGFANRNFMQLIHDDSLTFKEDIQKAQVSGQGDSLHEHIANLAGSPAIKKGILQTVKVVDELVKVMGRHKPENIVIEMARENQTTQKGQKNSRERMKRIEEGIKELGSQILKEHPVENTQLQNEKLYLYYLQNGRDMYVDQELDINRLSDYDVDHIVPQSFLKDDSIDNKVLTRSDKARGKSDNVPSEEVVKKMKNYWRQLLNAKLITQRKFDNLTKAERGGLSELDKAGFIKRQLVETRQITKHVAQILDSRMNTKYDENDKLIREVKVITLKSKLVSDFRKDFQFYKVREINNYHHAHDAYLNAVVGTALIKKYPKLESEFVYGDYKVYDVRKMIAKSEQEIGKATAKYFFYSNIMNFFKTEITLANGEIRKRPLIETNGETGEIVWDKGRDFATVRKVLSMPQVNIVKKTEVQTGGFSKESILPKRNSDKLIARKKDWDPKKYGGFDSPTVAYSVLVVAKVEKGKSKKLKSVKELLGITIMERSSFEKNPIDFLEAKGYKEVKKDLIIKLPKYSLFELENGRKRMLASAGELQKGNELALPSKYVNFLYLASHYEKLKGSPEDNEQKQLFVEQHKHYLDEIIEQISEFSKRVILADANLDKVLSAYNKHRDKPIREQAENIIHLFTLTNLGAPAAFKYFDTTIDRKRYTSTKEVLDATLIHQSITGLYETRIDLSQLGGDGGGGSEAAAKGSSGGWVQEISDSRPMLHIYLNGRRFLGLLNTGADKTCIAGRDWPANWPIHQTESSLQGLGMACGVARSSQPLRWQHEDKSGIIHPFVIPTLPFTLWGRDIMKDIKVRLMTDSPDDSQDLMIGAIESNLFADQISWKSDQPVWLNQWPLKQEKLQALQQLVTEQLQLGHLEESNSPWNTPVFVIKKKSGKWRLLQDLRAVNATMHDMGALQPGLPSPVAVPKGWEIIIIDLQDCFFNIKLHPEDCKRFAFSVPSPNFKRPYQRFQWKVLPQGMKNSPTLCQKFVDKAILTVRDKYQDSYIVHYMDDILLAHPSRSIVDEILTSMIQALNKHGLVVSTEKIQKYDNLKYLGTHIQGDSVSYQKLQIRTDKLRTLNDFQKLLGNINWIRPFLKLTTGELKPLFEILNGDSNPISTRKLTPEACKALQLMNERLSTARVKRLDLSQPWSLCILKTEYTPTACLWQDGVVEWIHLPHISPKVITPYDIFCTQLIIKGRHRSKELFSKDPDYIVVPYTKVQFDLLLQEKEDWPISLLGFLGEVHFHLPKDPLLTFTLQTAIIFPHMTSTTPLEKGIVIFTDGSANGRSVTYIQGREPIIKENTQNTAQQAEIVAVITAFEEVSQPFNLYTDSKYVTGLFPEIETATLSPRTKIYTELKHLQRLIHKRQEKFYIGHIRGHTGLPGPLAQGNAYADSLTRILTAGKRTADGSEFEKRTADGSEFESPKKKAKVE

SEQ ID NO: 7062 - protein, 2090 aa, synthetic construct
MPAAKRVKLDGGDKKYSIGLDIGTNSVGWAVITDEYKVPSKKFKVLGNTDRHSIKKNLIGALLFDSGETAEATRLKRTARRRYTRRKNRICYLQEIFSNEMAKVDDSFFHRLEESFLVEEDKKHERHPIFGNIVDEVAYHEKYPTIYHLRKKLVDSTDKADLRLIYLALAHMIKFRGHFLIEGDLNPDNSDVDKLFIQLVQTYNQLFEENPINASGVDAKAILSARLSKSRRLENLIAQLPGEKKNGLFGNLIALSLGLTPNFKSNFDLAEDAKLQLSKDTYDDDLDNLLAQIGDQYADLFLAAKNLSDAILLSDILRVNTEITKAPLSASMIKRYDEHHQDLTLLKALVRQQLPEKYKEIFFDQSKNGYAGYIDGGASQEEFYKFIKPILEKMDGTEELLVKLNREDLLRKQRTFDNGSIPHQIHLGELHAILRRQEDFYPFLKDNREKIEKILTFRIPYYVGPLARGNSRFAWMTRKSEETITPWNFEEVVDKGASAQSFIERMTNFDKNLPNEKVLPKHSLLYEYFTVYNELTKVKYVTEGMRKPAFLSGEQKKAIVDLLFKTNRKVTVKQLKEDYFKKIECFDSVEISGVEDRFNASLGTYHDLLKIIKDKDFLDNEENEDILEDIVLTLTLFEDREMIEERLKTYAHLFDDKVMKQLKRRRYTGWGRLSRKLINGIRDKQSGKTILDFLKSDGFANRNFMQLIHDDSLTFKEDIQKAQVSGQGDSLHEHIANLAGSPAIKKGILQTVKVVDELVKVMGRHKPENIVIEMARENQTTQKGQKNSRERMKRIEEGIKELGSQILKEHPVENTQLQNEKLYLYYLQNGRDMYVDQELDINRLSDYDVDHIVPQSFLKDDSIDNKVLTRSDKARGKSDNVPSEEVVKKMKNYWRQLLNAKLITQRKFDNLTKAERGGLSELDKAGFIKRQLVETRQITKHVAQILDSRMNTKYDENDKLIREVKVITLKSKLVSDFRKDFQFYKVREINNYHHAHDAYLNAVVGTALIKKYPKLESEFVYGDYKVYDVRKMIAKSEQEIGKATAKYFFYSNIMNFFKTEITLANGEIRKRPLIETNGETGEIVWDKGRDFATVRKVLSMPQVNIVKKTEVQTGGFSKESILPKRNSDKLIARKKDWDPKKYGGFDSPTVAYSVLVVAKVEKGKSKKLKSVKELLGITIMERSSFEKNPIDFLEAKGYKEVKKDLIIKLPKYSLFELENGRKRMLASAGELQKGNELALPSKYVNFLYLASHYEKLKGSPEDNEQKQLFVEQHKHYLDEIIEQISEFSKRVILADANLDKVLSAYNKHRDKPIREQAENIIHLFTLTNLGAPAAFKYFDTTIDRKRYTSTKEVLDATLIHQSITGLYETRIDLSQLGGDGGGGSEAAAKGSSGGTLQLDDEYRLYSPLVKPDQNIQFWLEQFPQAWAETAGMGLAKQVPPQVIQLKASATPVSVRQYPLSKEAQEGIRPHVQRLIQQGILVPVQSPWNTPLLPVRKPGTNDYRPVQDLREVNKRVQDIHPTVPNPYNLLCALPPQRSWYTVLDLKDAFFCLRLHPTSQPLFAFEWRDPGTGRTGQLTWTRLPQGFKNSPTIFDEALHRDLANFRIQHPQVTLLQYVDDLLLAGATKQDCLEGTKALLLELSDLGYRASAKKAQICRREVTYLGYSLRDGQRWLTEARKKTVVQIPAPTTAKQVREFLGTAGFCRLWIPGFATLAAPLYPLTKEKGEFSWAPEHQKAFDAIKKALLSAPALALPDVTKPFTLYVDERKGVARGVLTQTLGPWRRPVAYLSKKLDPVASGWPVCLKAIAAVAILVKDADKLTLGQNITVIAPHALENIVRQPPDRWMTNARMTHYQSLLLTERVTFAPPAALNPATLLPEETDEPVTHDCHQLLIEETGVRKDLTDIPLTGEVLTWFTDGSSYVVEGKRMAGAAVVDGTRTIWASSLPEGTSAQKAELMALTQALRLAEGKSINIYTDSRYAFATAHVHGAIYKQRGLLTSAGREIKNKEEILSLLEALHLPKRLAIIHCPGHQKAKDPISRGNQMADRVAKQAAQGVNLLAGKRTADGSEFEKRTADGSEFESPKKKAKVE

SEQ ID NO: 7063 - protein, 2090 aa, synthetic construct; identical to SEQ ID NO: 7062

SEQ ID NO: 7064 - protein, 2094 aa, synthetic construct
MPAAKRVKLDGGDKKYSIGLDIGTNSVGWAVITDEYKVPSKKFKVLGNTDRHSIKKNLIGALLFDSGETAEATRLKRTARRRYTRRKNRICYLQEIFSNEMAKVDDSFFHRLEESFLVEEDKKHERHPIFGNIVDEVAYHEKYPTIYHLRKKLVDSTDKADLRLIYLALAHMIKFRGHFLIEGDLNPDNSDVDKLFIQLVQTYNQLFEENPINASGVDAKAILSARLSKSRRLENLIAQLPGEKKNGLFGNLIALSLGLTPNFKSNFDLAEDAKLQLSKDTYDDDLDNLLAQIGDQYADLFLAAKNLSDAILLSDILRVNTEITKAPLSASMIKRYDEHHQDLTLLKALVRQQLPEKYKEIFFDQSKNGYAGYIDGGASQEEFYKFIKPILEKMDGTEELLVKLNREDLLRKQRTFDNGSIPHQIHLGELHAILRRQEDFYPFLKDNREKIEKILTFRIPYYVGPLARGNSRFAWMTRKSEETITPWNFEEVVDKGASAQSFIERMTNFDKNLPNEKVLPKHSLLYEYFTVYNELTKVKYVTEGMRKPAFLSGEQKKAIVDLLFKTNRKVTVKQLKEDYFKKIECFDSVEISGVEDRFNASLGTYHDLLKIIKDKDFLDNEENEDILEDIVLTLTLFEDREMIEERLKTYAHLFDDKVMKQLKRRRYTGWGRLSRKLINGIRDKQSGKTILDFLKSDGFANRNFMQLIHDDSLTFKEDIQKAQVSGQGDSLHEHIANLAGSPAIKKGILQTVKVVDELVKVMGRHKPENIVIEMARENQTTQKGQKNSRERMKRIEEGIKELGSQILKEHPVENTQLQNEKLYLYYLQNGRDMYVDQELDINRLSDYDVDHIVPQSFLKDDSIDNKVLTRSDKARGKSDNVPSEEVVKKMKNYWRQLLNAKLITQRKFDNLTKAERGGLSELDKAGFIKRQLVETRQITKHVAQILDSRMNTKYDENDKLIREVKVITLKSKLVSDFRKDFQFYKVREINNYHHAHDAYLNAVVGTALIKKYPKLESEFVYGDYKVYDVRKMIAKSEQEIGKATAKYFFYSNIMNFFKTEITLANGEIRKRPLIETNGETGEIVWDKGRDFATVRKVLSMPQVNIVKKTEVQTGGFSKESILPKRNSDKLIARKKDWDPKKYGGFDSPTVAYSVLVVAKVEKGKSKKLKSVKELLGITIMERSSFEKNPIDFLEAKGYKEVKKDLIIKLPKYSLFELENGRKRMLASAGELQKGNELALPSKYVNFLYLASHYEKLKGSPEDNEQKQLFVEQHKHYLDEIIEQISEFSKRVILADANLDKVLSAYNKHRDKPIREQAENIIHLFTLTNLGAPAAFKYFDTTIDRKRYTSTKEVLDATLIHQSITGLYETRIDLSQLGGDGGGGSEAAAKGSSGGVLNLEEEYRLHEKPVPSSIDPSWLQLFPTVWAERAGMGLANQVPPVVVELRSGASPVAVRQYPMSKEAREGIRPHIQRFLDLGVLVPCQSPWNTPLLPVKKPGTNDYRPVQDLREINKRVQDIHPTVPNPYNLLSSLPPSHTWYSVLDLKDAFFCLKLHPNSQPLFAFEWRDPEKGNTGQLTWTRLPQGFKNSPTLFNEALHRDLAPFRALNPQVVLLQYVDDLLVAAPTYRDCKEGTQKLLQELSKLGYRVSAKKAQLCQKEVTYLGYLLKEGKRWLTPARKATVMKIPPPTTPRQVREFLGTAGFCRLWIPGFASLAAPLYPLTKPSIPFIWTEEHQKAFDRIKEALLSAPALALPDLTKPFTLYVDERAGVARGVLTQTLGPWRRPVAYLSKKLDPVASGWPTCLKAVAAVALLLKDADKLTLGQNVTVIASHSLESIVRQPPDRWMTNARMTHYQSLLLNERVSFAPPAVLNPATLLPVESEATPVHRCSEILAEETGTRRDLKDQPLPGVPAWYTDGSSFIAEGKRRAGAAIVDGKRTVWASSLPEGTSAQKAELVALTQALRLAEGKDINIYTDSRYAFATAHIHGAIYKQRGWLTSAGKDIKNKEEILALLEAIHLPKRVAIIHCPGHQKGNDPVATGNRRADEAAKQAALSTRVLAETTKPAGKRTADGSEFEKRTADGSEFESPKKKAKVE

SEQ ID NO: 7065 - protein, 2094 aa, synthetic construct
MPAAKRVKLDGGDKKYSIGLDIGTNSVGWAVITDEYKVPSKKFKVLGNTDRHSIKKNLIGALLFDSGETAEATRLKRTARRRYTRRKNRICYLQEIFSNEMAKVDDSFFHRLEESFLVEEDKKHERHPIFGNIVDEVAYHEKYPTIYHLRKKLVDSTDKADLRLIYLALAHMIKFRGHFLIEGDLNPDNSDVDKLFIQLVQTYNQLFEENPINASGVDAKAILSARLSKSRRLENLIAQLPGEKKNGLFGNLIALSLGLTPNFKSNFDLAEDAKLQLSKDTYDDDLDNLLAQIGDQYADLFLAAKNLSDAILLSDILRVNTEITKAPLSASMIKRYDEHHQDLTLLKALVRQQLPEKYKEIFFDQSKNGYAGYIDGGASQEEFYKFIKPILEKMDGTEELLVKLNREDLLRKQRTFDNGSIPHQIHLGELHAILRRQEDFYPFLKDNREKIEKILTFRIPYYVGPLARGNSRFAWMTRKSEETITPWNFEEVVDKGASAQSFIERMTNFDKNLPNEKVLPKHSLLYEYFTVYNELTKVKYVTEGMRKPAFLSGEQKKAIVDLLFKTNRKVTVKQLKEDYFKKIECFDSVEISGVEDRFNASLGTYHDLLKIIKDKDFLDNEENEDILEDIVLTLTLFEDREMIEERLKTYAHLFDDKVMKQLKRRRYTGWGRLSRKLINGIRDKQSGKTILDFLKSDGFANRNFMQLIHDDSLTFKEDIQKAQVSGQGDSLHEHIANLAGSPAIKKGILQTVKVVDELVKVMGRHKPENIVIEMARENQTTQKGQKNSRERMKRIEEGIKELGSQILKEHPVENTQLQNEKLYLYYLQNGRDMYVDQELDINRLSDYDVDHIVPQSFLKDDSIDNKVLTRSDKARGKSDNVPSEEVVKKMKNYWRQLLNAKLITQRKFDNLTKAERGGLSELDKAGFIKRQLVETRQITKHVAQILDSRMNTKYDENDKLIREVKVITLKSKLVSDFRKDFQFYKVREINNYHHAHDAYLNAVVGTALIKKYPKLESEFVYGDYKVYDVRKMIAKSEQEIGKATAKYFFYSNIMNFFKTEITLANGEIRKRPLIETNGETGEIVWDKGRDFATVRKVLSMPQVNIVKKTEVQTGGFSKESILPKRNSDKLIARKKDWDPKKYGGFDSPTVAYSVLVVAKVEKGKSKKLKSVKELLGITIMERSSFEKNPIDFLEAKGYKEVKKDLIIKLPKYSLFELENGRKRMLASAGELQKGNELALPSKYVNFLYLASHYEKLKGSPEDNEQKQLFVEQHKHYLDEIIEQISEFSKRVILADANLDKVLSAYNKHRDKPIREQAENIIHLFTLTNLGAPAAFKYFDTTIDRKRYTSTKEVLDATLIHQSITGLYETRIDLSQLGGDGGGGSEAAAKGSSGGVLNLEEEYRLHEKPVPSSIDPSWLQLFPTVWAERAGMGLANQVPPVVVELRSGASPVAVRQYPMSKEAREGIRPHIQRFLDLGVLVPCQSPWNTPLLPVKKPGTNDYRPVQDLREINKRVQDIHPTVPNPYNLLSSLPPSHTWYSVLDLKDAFFCLKLHPNSQPLFAFEWRDPEKGNTGQLTWTRLPQGFKNSPTLFNEALHRDLAPFRALNPQVVLLQYVDDLLVAAPTYRDCKEGTQKLLQELSKLGYRVSAKKAQLCQKEVTYLGYLLKEGKRWLTPARKATVMKIPPPTTPRQVREFLGKAGFCRLFIPGFASLAAPLYPLTKPSIPFIWTEEHQKAFDRIKEALLSAPALALPDLTKPFTLYVDERAGVARGVLTQTLGPWRRPVAYLSKKLDPVASGWPTCLKAVAAVALLLKDADKLTLGQNVTVIASHSLESIVRQPPDRWMTNARMTHYQSLLLNERVSFAPPAVLNPATLLPVESEATPVHRCSEILAEETGTRRDLKDQPLPGVPAWYTDGSSFIAEGKRRAGAAIVDGKRTVWASSLPEGTSAQKAELVALTQALRLAEGKDINIYTDSRYAFATAHIHGAIYKQRGWLTSAGKDIKNKEEILALLEAIHLPKRVAIIHCPGHQKGNDPVATGNRRADEAAKQAALSTRVLAETTKPAGKRTADGSEFEKRTADGSEFESPKKKAKVE

SEQ ID NO: 7066 - protein, 2096 aa, synthetic construct
MPAAKRVKLDGGDKKYSIGLDIGTNSVGWAVITDEYKVPSKKFKVLGNTDRHSIKKNLIGALLFDSGETAEATRLKRTARRRYTRRKNRICYLQEIFSNEMAKVDDSFFHRLEESFLVEEDKKHERHPIFGNIVDEVAYHEKYPTIYHLRKKLVDSTDKADLRLIYLALAHMIKFRGHFLIEGDLNPDNSDVDKLFIQLVQTYNQLFEENPINASGVDAKAILSARLSKSRRLENLIAQLPGEKKNGLFGNLIALSLGLTPNFKSNFDLAEDAKLQLSKDTYDDDLDNLLAQIGDQYADLFLAAKNLSDAILLSDILRVNTEITKAPLSASMIKRYDEHHQDLTLLKALVRQQLPEKYKEIFFDQSKNGYAGYIDGGASQEEFYKFIKPILEKMDGTEELLVKLNREDLLRKQRTFDNGSIPHQIHLGELHAILRRQEDFYPFLKDNREKIEKILTFRIPYYVGPLARGNSRFAWMTRKSEETITPWNFEEVVDKGASAQSFIERMTNFDKNLPNEKVLPKHSLLYEYFTVYNELTKVKYVTEGMRKPAFLSGEQKKAIVDLLFKTNRKVTVKQLKEDYFKKIECFDSVEISGVEDRFNASLGTYHDLLKIIKDKDFLDNEENEDILEDIVLTLTLFEDREMIEERLKTYAHLFDDKVMKQLKRRRYTGWGRLSRKLINGIRDKQSGKTILDFLKSDGFANRNFMQLIHDDSLTFKEDIQKAQVSGQGDSLHEHIANLAGSPAIKKGILQTVKVVDELVKVMGRHKPENIVIEMARENQTTQKGQKNSRERMKRIEEGIKELGSQILKEHPVENTQLQNEKLYLYYLQNGRDMYVDQELDINRLSDYDVDHIVPQSFLKDDSIDNKVLTRSDKARGKSDNVPSEEVVKKMKNYWRQLLNAKLITQRKFDNLTKAERGGLSELDKAGFIKRQLVETRQITKHVAQILDSRMNTKYDENDKLIREVKVITLKSKLVSDFRKDFQFYKVREINNYHHAHDAYLNAVVGTALIKKYPKLESEFVYGDYKVYDVRKMIAKSEQEIGKATAKYFFYSNIMNFFKTEITLANGEIRKRPLIETNGETGEIVWDKGRDFATVRKVLSMPQVNIVKKTEVQTGGFSKESILPKRNSDKLIARKKDWDPKKYGGFDSPTVAYSVLVVAKVEKGKSKKLKSVKELLGITIMERSSFEKNPIDFLEAKGYKEVKKDLIIKLPKYSLFELENGRKRMLASAGELQKGNELALPSKYVNFLYLASHYEKLKGSPEDNEQKQLFVEQHKHYLDEIIEQISEFSKRVILADANLDKVLSAYNKHRDKPIREQAENIIHLFTLTNLGAPAAFKYFDTTIDRKRYTSTKEVLDATLIHQSITGLYETRIDLSQLGGDGGGGSEAAAKGSSGGTLNIEDEYRLHETSKEPDVPLGSTWLSDFPQAWAETGGMGLAVRQAPLIIPLKATSTPVSIKQYPMSQEARLGIKPHIQRLLDQGILVPCQSPWNTPLLPVKKPGTNDYRPVQDLREVNKRVEDIHPTVPNPYNLLSGLPPSHQWYTVLDLKDAFFCLRLHPTSQPLFAFEWRDPEMGISGQLTWTRLPQGFKNSPTLFNEALHRDLADFRIQHPDLILLQYVDDLLLAATSEQDCQRGTRALLQTLGNLGYRASAKKAQICQKQVKYLGYLLKEGQRWLTEARKETVMGQPTPKTPRQLREFLGTAGFCRLWIPGFAEMAAPLYPLTKPGTLFNWGPDQQKAYQEIKQALLTAPALGLPDLTKPFELFVDEKQGYAKGVLTQKLGPWRRPVAYLSKKLDPVAAGWPPCLRMVAAIAVLTKDAGKLTMGQPLVILAPHAVEALVKQPPDRWLSNARMTHYQAMLLDTDRVQFGPVVALNPATLLPLPEKEAPHDCLEILAETHGTRPDLTDQPIPDADYTWYTDGSSFLQEGQRRAGAAVTTETEVIWARALPAGTSAQRAELIALTQALKMAEGKKLNVYTDSRYAFATAHVHGEIYRRRGWLTSEGREIKNKNEILALLKALFLPKRLSIIHCPGHQKGNSAEARGNRMADQAAREAAMKAVLETSTLLAGKRTADGSEFEKRTADGSEFESPKKKAKVE

SEQ ID NO: 7067 - protein, 2096 aa, synthetic construct; identical to SEQ ID NO: 4522

SEQ ID NO: 7068 - protein, 2098 aa, synthetic construct
MPAAKRVKLDGGDKKYSIGLDIGTNSVGWAVITDEYKVPSKKFKVLGNTDRHSIKKNLIGALLFDSGETAEATRLKRTARRRYTRRKNRICYLQEIFSNEMAKVDDSFFHRLEESFLVEEDKKHERHPIFGNIVDEVAYHEKYPTIYHLRKKLVDSTDKADLRLIYLALAHMIKFRGHFLIEGDLNPDNSDVDKLFIQLVQTYNQLFEENPINASGVDAKAILSARLSKSRRLENLIAQLPGEKKNGLFGNLIALSLGLTPNFKSNFDLAEDAKLQLSKDTYDDDLDNLLAQIGDQYADLFLAAKNLSDAILLSDILRVNTEITKAPLSASMIKRYDEHHQDLTLLKALVRQQLPEKYKEIFFDQSKNGYAGYIDGGASQEEFYKFIKPILEKMDGTEELLVKLNREDLLRKQRTFDNGSIPHQIHLGELHAILRRQEDFYPFLKDNREKIEKILTFRIPYYVGPLARGNSRFAWMTRKSEETITPWNFEEVVDKGASAQSFIERMTNFDKNLPNEKVLPKHSLLYEYFTVYNELTKVKYVTEGMRKPAFLSGEQKKAIVDLLFKTNRKVTVKQLKEDYFKKIECFDSVEISGVEDRFNASLGTYHDLLKIIKDKDFLDNEENEDILEDIVLTLTLFEDREMIEERLKTYAHLFDDKVMKQLKRRRYTGWGRLSRKLINGIRDKQSGKTILDFLKSDGFANRNFMQLIHDDSLTFKEDIQKAQVSGQGDSLHEHIANLAGSPAIKKGILQTVKVVDELVKVMGRHKPENIVIEMARENQTTQKGQKNSRERMKRIEEGIKELGSQILKEHPVENTQLQNEKLYLYYLQNGRDMYVDQELDINRLSDYDVDHIVPQSFLKDDSIDNKVLTRSDKARGKSDNVPSEEVVKKMKNYWRQLLNAKLITQRKFDNLTKAERGGLSELDKAGFIKRQLVETRQITKHVAQILDSRMNTKYDENDKLIREVKVITLKSKLVSDFRKDFQFYKVREINNYHHAHDAYLNAVVGTALIKKYPKLESEFVYGDYKVYDVRKMIAKSEQEIGKATAKYFFYSNIMNFFKTEITLANGEIRKRPLIETNGETGEIVWDKGRDFATVRKVLSMPQVNIVKKTEVQTGGFSKESILPKRNSDKLIARKKDWDPKKYGGFDSPTVAYSVLVVAKVEKGKSKKLKSVKELLGITIMERSSFEKNPIDFLEAKGYKEVKKDLIIKLPKYSLFELENGRKRMLASAGELQKGNELALPSKYVNFLYLASHYEKLKGSPEDNEQKQLFVEQHKHYLDEIIEQISEFSKRVILADANLDKVLSAYNKHRDKPIREQAENIIHLFTLTNLGAPAAFKYFDTTIDRKRYTSTKEVLDATLIHQSITGLYETRIDLSQLGGDGGGSSGGSEAAAKGGTAPLEEEYRLFLEAPIQNVTLLEQWKREIPKVWAEINPPGLASTQAPIHVQLLSTALPVRVRQYPITLEAKRSLRETIRKFRAAGILRPVHSPWNTPLLPVRKSGTSEYRMVQDLREVNKRVETIHPTVPNPYTLLSLLPPDRIWYSVLDLKDAFFCIPLAPESQLIFAFEWADAEEGESGQLTWTRLPQGFKNSPTLFNEALNRDLQGFRLDHPSVSLLQYVDDLLIAADTQAACLSATRDLLMTLAELGYRVSGKKAQLCQEEVTYLGFKIHKGSRSLSNSRTQAILQIPVPKTKRQVREFLGTIGYCRLWIPGFAELAQPLYAATRPGNDPLVWGEKEEEAFQSLKLALTQPPALALPSLDKPFQLFVEETSGAAKGVLTQALGPWKRPVAYLSKRLDPVAAGWPRCLRAIAAAALLTREASKLTFGQDIEITSSHNLESLLRSPPDKWLTNARITQYQVLLLDPPRVRFKQTAALNPATLLPETDDTLPIHHCLDTLDSLTSTRPDLTDQPLAQAEATLFTDGSSYIRDGKRYAGAAVVTLDSVIWAEPLPIGTSAQKAELIALTKALEWSKDKSVNIYTDSRYAFATLHVHGMIYRERGWLTAGGKAIKNAPEILALLTAVWLPKRVAVMHCKGHQKDDAPTSTGNRRADEVAREVAIRPLSTQATISAGKRTADGSEFEKRTADGSEFESPKKKAKVE

SEQ ID NO: 7069 - protein, 2098 aa, synthetic construct
MPAAKRVKLDGGDKKYSIGLDIGTNSVGWAVITDEYKVPSKKFKVLGNTDRHSIKKNLIGALLFDSGETAEATRLKRTARRRYTRRKNRICYLQEIFSNEMAKVDDSFFHRLEESFLVEEDKKHERHPIFGNIVDEVAYHEKYPTIYHLRKKLVDSTDKADLRLIYLALAHMIKFRGHFLIEGDLNPDNSDVDKLFIQLVQTYNQLFEENPINASGVDAKAILSARLSKSRRLENLIAQLPGEKKNGLFGNLIALSLGLTPNFKSNFDLAEDAKLQLSKDTYDDDLDNLLAQIGDQYADLFLAAKNLSDAILLSDILRVNTEITKAPLSASMIKRYDEHHQDLTLLKALVRQQLPEKYKEIFFDQSKNGYAGYIDGGASQEEFYKFIKPILEKMDGTEELLVKLNREDLLRKQRTFDNGSIPHQIHLGELHAILRRQEDFYPFLKDNREKIEKILTFRIPYYVGPLARGNSRFAWMTRKSEETITPWNFEEVVDKGASAQSFIERMTNFDKNLPNEKVLPKHSLLYEYFTVYNELTKVKYVTEGMRKPAFLSGEQKKAIVDLLFKTNRKVTVKQLKEDYFKKIECFDSVEISGVEDRFNASLGTYHDLLKIIKDKDFLDNEENEDILEDIVLTLTLFEDREMIEERLKTYAHLFDDKVMKQLKRRRYTGWGRLSRKLINGIRDKQSGKTILDFLKSDGFANRNFMQLIHDDSLTFKEDIQKAQVSGQGDSLHEHIANLAGSPAIKKGILQTVKVVDELVKVMGRHKPENIVIEMARENQTTQKGQKNSRERMKRIEEGIKELGSQILKEHPVENTQLQNEKLYLYYLQNGRDMYVDQELDINRLSDYDVDHIVPQSFLKDDSIDNKVLTRSDKARGKSDNVPSEEVVKKMKNYWRQLLNAKLITQRKFDNLTKAERGGLSELDKAGFIKRQLVETRQITKHVAQILDSRMNTKYDENDKLIREVKVITLKSKLVSDFRKDFQFYKVREINNYHHAHDAYLNAVVGTALIKKYPKLESEFVYGDYKVYDVRKMIAKSEQEIGKATAKYFFYSNIMNFFKTEITLANGEIRKRPLIETNGETGEIVWDKGRDFATVRKVLSMPQVNIVKKTEVQTGGFSKESILPKRNSDKLIARKKDWDPKKYGGFDSPTVAYSVLVVAKVEKGKSKKLKSVKELLGITIMERSSFEKNPIDFLEAKGYKEVKKDLIIKLPKYSLFELENGRKRMLASAGELQKGNELALPSKYVNFLYLASHYEKLKGSPEDNEQKQLFVEQHKHYLDEIIEQISEFSKRVILADANLDKVLSAYNKHRDKPIREQAENIIHLFTLTNLGAPAAFKYFDTTIDRKRYTSTKEVLDATLIHQSITGLYETRIDLSQLGGDGGGSSGGSEAAAKGGTAPLEEEYRLFLEAPIQNVTLLEQWKREIPKVWAEINPPGLASTQAPIHVQLLSTALPVRVRQYPITLEAKRSLRETIRKFRAAGILRPVHSPWNTPLLPVRKSGTSEYRMVQDLREVNKRVETIHPTVPNPYTLLSLLPPDRIWYSVLDLKDAFFCIPLAPESQLIFAFEWADAEEGESGQLTWTRLPQGFKNSPTLFNEALNRDLQGFRLDHPSVSLLQYVDDLLIAADTQAACLSATRDLLMTLAELGYRVSGKKAQLCQEEVTYLGFKIHKGSRSLSNSRTQAILQIPVPKTKRQVREFLGKIGYCRLFIPGFAELAQPLYAATRPGNDPLVWGEKEEEAFQSLKLALTQPPALALPSLDKPFQLFVEETSGAAKGVLTQALGPWKRPVAYLSKRLDPVAAGWPRCLRAIAAAALLTREASKLTFGQDIEITSSHNLESLLRSPPDKWLTNARITQYQVLLLDPPRVRFKQTAALNPATLLPETDDTLPIHHCLDTLDSLTSTRPDLTDQPLAQAEATLFTDGSSYIRDGKRYAGAAVVTLDSVIWAEPLPIGTSAQKAELIALTKALEWSKDKSVNIYTDSRYAFATLHVHGMIYRERGWLTAGGKAIKNAPEILALLTAVWLPKRVAVMHCKGHQKDDAPTSTGNRRADEVAREVAIRPLSTQATISAGKRTADGSEFEKRTADGSEFESPKKKAKVE

SEQ ID NO: 7070 - protein, 2095 aa, synthetic construct
MPAAKRVKLDGGDKKYSIGLDIGTNSVGWAVITDEYKVPSKKFKVLGNTDRHSIKKNLIGALLFDSGETAEATRLKRTARRRYTRRKNRICYLQEIFSNEMAKVDDSFFHRLEESFLVEEDKKHERHPIFGNIVDEVAYHEKYPTIYHLRKKLVDSTDKADLRLIYLALAHMIKFRGHFLIEGDLNPDNSDVDKLFIQLVQTYNQLFEENPINASGVDAKAILSARLSKSRRLENLIAQLPGEKKNGLFGNLIALSLGLTPNFKSNFDLAEDAKLQLSKDTYDDDLDNLLAQIGDQYADLFLAAKNLSDAILLSDILRVNTEITKAPLSASMIKRYDEHHQDLTLLKALVRQQLPEKYKEIFFDQSKNGYAGYIDGGASQEEFYKFIKPILEKMDGTEELLVKLNREDLLRKQRTFDNGSIPHQIHLGELHAILRRQEDFYPFLKDNREKIEKILTFRIPYYVGPLARGNSRFAWMTRKSEETITPWNFEEVVDKGASAQSFIERMTNFDKNLPNEKVLPKHSLLYEYFTVYNELTKVKYVTEGMRKPAFLSGEQKKAIVDLLFKTNRKVTVKQLKEDYFKKIECFDSVEISGVEDRFNASLGTYHDLLKIIKDKDFLDNEENEDILEDIVLTLTLFEDREMIEERLKTYAHLFDDKVMKQLKRRRYTGWGRLSRKLINGIRDKQSGKTILDFLKSDGFANRNFMQLIHDDSLTFKEDIQKAQVSGQGDSLHEHIANLAGSPAIKKGILQTVKVVDELVKVMGRHKPENIVIEMARENQTTQKGQKNSRERMKRIEEGIKELGSQILKEHPVENTQLQNEKLYLYYLQNGRDMYVDQELDINRLSDYDVDHIVPQSFLKDDSIDNKVLTRSDKARGKSDNVPSEEVVKKMKNYWRQLLNAKLITQRKFDNLTKAERGGLSELDKAGFIKRQLVETRQITKHVAQILDSRMNTKYDENDKLIREVKVITLKSKLVSDFRKDFQFYKVREINNYHHAHDAYLNAVVGTALIKKYPKLESEFVYGDYKVYDVRKMIAKSEQEIGKATAKYFFYSNIMNFFKTEITLANGEIRKRPLIETNGETGEIVWDKGRDFATVRKVLSMPQVNIVKKTEVQTGGFSKESILPKRNSDKLIARKKDWDPKKYGGFDSPTVAYSVLVVAKVEKGKSKKLKSVKELLGITIMERSSFEKNPIDFLEAKGYKEVKKDLIIKLPKYSLFELENGRKRMLASAGELQKGNELALPSKYVNFLYLASHYEKLKGSPEDNEQKQLFVEQHKHYLDEIIEQISEFSKRVILADANLDKVLSAYNKHRDKPIREQAENIIHLFTLTNLGAPAAFKYFDTTIDRKRYTSTKEVLDATLIHQSITGLYETRIDLSQLGGDGGGSSGGSEAAAKGGTLQLEEEYRLFEPESTQKQEMDIWLKNFPQAWAETGGMGTAHCQAPVLIQLKATATPISIRQYPMPHEAYQGIKPHIRRMLDQGILKPCQSPWNTPLLPVKKPGTEDYRPVQDLREVNKRVEDIHPTVPNPYNLLSTLPPSHPWYTVLDLKDAFFCLRLHSESQLLFAFEWRDPEIGLSGQLTWTRLPQGFKNSPTLFNEALHSDLADFRVRYPALVLLQYVDDLLLAAATRTECLEGTKALLETLGNKGYRASAKKAQICLQEVTYLGYSLKDGQRWLTKARKEAILSIPVPKNSRQVREFLGTAGYCRLWIPGFAELAAPLYPLTRPGTLFQWGTEQQLAFEDIKKALLSSPALGLPDITKPFELFIDENSGFAKGVLVQKLGPWKRPVAYLSKKLDTVASGWPPCLRMVAAIAILVKDAGKLTLGQPLTILTSHPVEALVRQPPNKWLSNARMTHYQAMLLDAERVHFGPTVSLNPATLLPLPSGGNHHDCLQILAETHGTRPDLTDQPLPDADLTWYTDGSSFIRNGEREAGAAVTTESEVIWAAPLPPGTSAQRAELIALTQALKMAEGKKLTVYTDSRYAFATTHVHGEIYRRRGWLTSEGKEIKNKNEILALLEALFLPKRLSIIHCPGHQKGDSPQAKGNRLADDTAKKAATETHSSLTVLPAGKRTADGSEFEKRTADGSEFESPKKKAKVE

SEQ ID NO: 7071 - protein, 2094 aa, synthetic construct
MPAAKRVKLDGGDKKYSIGLDIGTNSVGWAVITDEYKVPSKKFKVLGNTDRHSIKKNLIGALLFDSGETAEATRLKRTARRRYTRRKNRICYLQEIFSNEMAKVDDSFFHRLEESFLVEEDKKHERHPIFGNIVDEVAYHEKYPTIYHLRKKLVDSTDKADLRLIYLALAHMIKFRGHFLIEGDLNPDNSDVDKLFIQLVQTYNQLFEENPINASGVDAKAILSARLSKSRRLENLIAQLPGEKKNGLFGNLIALSLGLTPNFKSNFDLAEDAKLQLSKDTYDDDLDNLLAQIGDQYADLFLAAKNLSDAILLSDILRVNTEITKAPLSASMIKRYDEHHQDLTLLKALVRQQLPEKYKEIFFDQSKNGYAGYIDGGASQEEFYKFIKPILEKMDGTEELLVKLNREDLLRKQRTFDNGSIPHQIHLGELHAILRRQEDFYPFLKDNREKIEKILTFRIPYYVGPLARGNSRFAWMTRKSEETITPWNFEEVVDKGASAQSFIERMTNFDKNLPNEKVLPKHSLLYEYFTVYNELTKVKYVTEGMRKPAFLSGEQKKAIVDLLFKTNRKVTVKQLKEDYFKKIECFDSVEISGVEDRFNASLGTYHDLLKIIKDKDFLDNEENEDILEDIVLTLTLFEDREMIEERLKTYAHLFDDKVMKQLKRRRYTGWGRLSRKLINGIRDKQSGKTILDFLKSDGFANRNFMQLIHDDSLTFKEDIQKAQVSGQGDSLHEHIANLAGSPAIKKGILQTVKVVDELVKVMGRHKPENIVIEMARENQTTQKGQKNSRERMKRIEEGIKELGSQILKEHPVENTQLQNEKLYLYYLQNGRDMYVDQELDINRLSDYDVDHIVPQSFLKDDSIDNKVLTRSDKARGKSDNVPSEEVVKKMKNYWRQLLNAKLITQRKFDNLTKAERGGLSELDKAGFIKRQLVETRQITKHVAQILDSRMNTKYDENDKLIREVKVITLKSKLVSDFRKDFQFYKVREINNYHHAHDAYLNAVVGTALIKKYPKLESEFVYGDYKVYDVRKMIAKSEQEIGKATAKYFFYSNIMNFFKTEITLANGEIRKRPLIETNGETGEIVWDKGRDFATVRKVLSMPQVNIVKKTEVQTGGFSKESILPKRNSDKLIARKKDWDPKKYGGFDSPTVAYSVLVVAKVEKGKSKKLKSVKELLGITIMERSSFEKNPIDFLEAKGYKEVKKDLIIKLPKYSLFELENGRKRMLASAGELQKGNELALPSKYVNFLYLASHYEKLKGSPEDNEQKQLFVEQHKHYLDEIIEQISEFSKRVILADANLDKVLSAYNKHRDKPIREQAENIIHLFTLTNLGAPAAFKYFDTTIDRKRYTSTKEVLDATLIHQSITGLYETRIDLSQLGGDGGGSSGGSEAAAKGGVLNLEEEYRLHEKPVPSSIDPSWLQLFPTVWAERAGMGLANQVPPVVVELRSGASPVAVRQYPMSKEAREGIRPHIQKFLDLGVLVPCRSPWNTPLLPVKKPGTNDYRPVQDLREINKRVQDIHPTVPNPYNLLSSLPPSYTWYSVLDLKDAFFCLRLHPNSQPLFAFEWKDPEKGNTGQLTWTRLPQGFKNSPTLFNEALHRDLAPFRALNPQVVLLQYVDDLLVAAPTYEDCKKGTQKLLQELSKLGYRVSAKKAQLCQREVTYLGYLLKEGKRWLTPARKATVMKIPVPTTPRQVREFLGKAGFCRLFIPGFASLAAPLYPLTKPSIPFIWTEEHQQAFDHIKKALLSAPALALPDLTKPFTLYIDERAGVARGVLTQTLGPWRRPVAYLSKKLDPVASGWPTCLKAVAAVALLLKDADKLTLGQNVTVIASHSLESIVRQPPDRWMTNARMTHYQSLLLNERVSFAPPAVLNPATLLPVESEATPVHRCSEILAEETGTRRDLEDQPLPGVPTWYTDGSSFITEGKRRAGAPIVDGKRTVWASSLPEGTSAQKAELVALTQALRLAEGKNINIYTDSRYAFATAHIHGAIYKQRGWLTSAGKDIKNKEEILALLEAIHLPRRVAIIHCPGHQRGSNPVATGNRRADEAAKQAALSTRVLAGTTKPAGKRTADGSEFEKRTADGSEFESPKKKAKVE

SEQ ID NO: 7072 - protein, 2127 aa, synthetic construct
MPAAKRVKLDGGDKKYSIGLDIGTNSVGWAVITDEYKVPSKKFKVLGNTDRHSIKKNLIGALLFDSGETAEATRLKRTARRRYTRRKNRICYLQEIFSNEMAKVDDSFFHRLEESFLVEEDKKHERHPIFGNIVDEVAYHEKYPTIYHLRKKLVDSTDKADLRLIYLALAHMIKFRGHFLIEGDLNPDNSDVDKLFIQLVQTYNQLFEENPINASGVDAKAILSARLSKSRRLENLIAQLPGEKKNGLFGNLIALSLGLTPNFKSNFDLAEDAKLQLSKDTYDDDLDNLLAQIGDQYADLFLAAKNLSDAILLSDILRVNTEITKAPLSASMIKRYDEHHQDLTLLKALVRQQLPEKYKEIFFDQSKNGYAGYIDGGASQEEFYKFIKPILEKMDGTEELLVKLNREDLLRKQRTFDNGSIPHQIHLGELHAILRRQEDFYPFLKDNREKIEKILTFRIPYYVGPLARGNSRFAWMTRKSEETITPWNFEEVVDKGASAQSFIERMTNFDKNLPNEKVLPKHSLLYEYFTVYNELTKVKYVTEGMRKPAFLSGEQKKAIVDLLFKTNRKVTVKQLKEDYFKKIECFDSVEISGVEDRFNASLGTYHDLLKIIKDKDFLDNEENEDILEDIVLTLTLFEDREMIEERLKTYAHLFDDKVMKQLKRRRYTGWGRLSRKLINGIRDKQSGKTILDFLKSDGFANRNFMQLIHDDSLTFKEDIQKAQVSGQGDSLHEHIANLAGSPAIKKGILQTVKVVDELVKVMGRHKPENIVIEMARENQTTQKGQKNSRERMKRIEEGIKELGSQILKEHPVENTQLQNEKLYLYYLQNGRDMYVDQELDINRLSDYDVDHIVPQSFLKDDSIDNKVLTRSDKARGKSDNVPSEEVVKKMKNYWRQLLNAKLITQRKFDNLTKAERGGLSELDKAGFIKRQLVETRQITKHVAQILDSRMNTKYDENDKLIREVKVITLKSKLVSDFRKDFQFYKVREINNYHHAHDAYLNAVVGTALIKKYPKLESEFVYGDYKVYDVRKMIAKSEQEIGKATAKYFFYSNIMNFFKTEITLANGEIRKRPLIETNGETGEIVWDKGRDFATVRKVLSMPQVNIVKKTEVQTGGFSKESILPKRNSDKLIARKKDWDPKKYGGFDSPTVAYSVLVVAKVEKGKSKKLKSVKELLGITIMERSSFEKNPIDFLEAKGYKEVKKDLIIKLPKYSLFELENGRKRMLASAGELQKGNELALPSKYVNFLYLASHYEKLKGSPEDNEQKQLFVEQHKHYLDEIIEQISEFSKRVILADANLDKVLSAYNKHRDKPIREQAENIIHLFTLTNLGAPAAFKYFDTTIDRKRYTSTKEVLDATLIHQSITGLYETRIDLSQLGGDGGGSSGGSEAAAKGGLLGRDLLTKLKAQIQFSTEGPQVTWEDRPAMCLVLNLEEEYRLHEKPVPPSIDPSWLQLFPMVWAEKAGMGLANQVPPVVVELKSDASPVAVRQYPMSKEAREGIRPHIQRFLDLGILVPCQSPWNTPLLPVKKPGTNDYRPVQDLREVNKRVQDIHPTVPNPYNLLSSLPPSHTWYSVLDLKDAFFCLKLHPNSQPLFAFEWRDPEKGNTGQLTWTRLPQGFKNSPTLFNEALHRDLASFRALNPQVVMLQYVDDLLVAAPTYRDCKEGTRRLLQELSKLGYRVSAKKAQLCREEVTYLGYLLKGGKRWLTPARKATVMKIPTPTTPRQVREFLGTAGFCRLWIPGFASLAAPLYPLTRPKVPFTWTEAHQEAFGRIKEALLSAPALALPDLTKPFALYVDEKEGVARGVLTQTLGPWRRPVAYLSKKLDPVASGWPTCLKAIAAVALLLKDADKLTLGQNVLVIAPHNLESIVRQPPDRWMTNARMTHYQSLLLNERVSFAPPAILNPATLLPVESDDTPIHICSEILAEETGTRPDLRDQPLPGVPAWYTDGSSFIMDGRRQAGAAIVDNKRTVWASNLPEGTSAQKAELIALTQALRLAEGKSINIYTDSRYAFATAHVHGAIYKQRGWLTSAGKDIKNKEEILALLEAIHLPKRVAIIHCPGHQRGTDPVATGNRKADEAAKQAAQSTRILTETTKNAGKRTADGSEFEKRTADGSEFESPKKKAKVE

SEQ ID NO: 7073 - protein, 2218 aa, synthetic construct
MPAAKRVKLDGGDKKYSIGLDIGTNSVGWAVITDEYKVPSKKFKVLGNTDRHSIKKNLIGALLFDSGETAEATRLKRTARRRYTRRKNRICYLQEIFSNEMAKVDDSFFHRLEESFLVEEDKKHERHPIFGNIVDEVAYHEKYPTIYHLRKKLVDSTDKADLRLIYLALAHMIKFRGHFLIEGDLNPDNSDVDKLFIQLVQTYNQLFEENPINASGVDAKAILSARLSKSRRLENLIAQLPGEKKNGLFGNLIALSLGLTPNFKSNFDLAEDAKLQLSKDTYDDDLDNLLAQIGDQYADLFLAAKNLSDAILLSDILRVNTEITKAPLSASMIKRYDEHHQDLTLLKALVRQQLPEKYKEIFFDQSKNGYAGYIDGGASQEEFYKFIKPILEKMDGTEELLVKLNREDLLRKQRTFDNGSIPHQIHLGELHAILRRQEDFYPFLKDNREKIEKILTFRIPYYVGPLARGNSRFAWMTRKSEETITPWNFEEVVDKGASAQSFIERMTNFDKNLPNEKVLPKHSLLYEYFTVYNELTKVKYVTEGMRKPAFLSGEQKKAIVDLLFKTNRKVTVKQLKEDYFKKIECFDSVEISGVEDRFNASLGTYHDLLKIIKDKDFLDNEENEDILEDIVLTLTLFEDREMIEERLKTYAHLFDDKVMKQLKRRRYTGWGRLSRKLINGIRDKQSGKTILDFLKSDGFANRNFMQLIHDDSLTFKEDIQKAQVSGQGDSLHEHIANLAGSPAIKKGILQTVKVVDELVKVMGRHKPENIVIEMARENQTTQKGQKNSRERMKRIEEGIKELGSQILKEHPVENTQLQNEKLYLYYLQNGRDMYVDQELDINRLSDYDVDHIVPQSFLKDDSIDNKVLTRSDKARGKSDNVPSEEVVKKMKNYWRQLLNAKLITQRKFDNLTKAERGGLSELDKAGFIKRQLVETRQITKHVAQILDSRMNTKYDENDKLIREVKVITLKSKLVSDFRKDFQFYKVREINNYHHAHDAYLNAVVGTALIKKYPKLESEFVYGDYKVYDVRKMIAKSEQEIGKATAKYFFYSNIMNFFKTEITLANGEIRKRPLIETNGETGEIVWDKGRDFATVRKVLSMPQVNIVKKTEVQTGGFSKESILPKRNSDKLIARKKDWDPKKYGGFDSPTVAYSVLVVAKVEKGKSKKLKSVKELLGITIMERSSFEKNPIDFLEAKGYKEVKKDLIIKLPKYSLFELENGRKRMLASAGELQKGNELALPSKYVNFLYLASHYEKLKGSPEDNEQKQLFVEQHKHYLDEIIEQISEFSKRVILADANLDKVLSAYNKHRDKPIREQAENIIHLFTLTNLGAPAAFKYFDTTIDRKRYTSTKEVLDATLIHQSITGLYETRIDLSQLGGDGGGSSGGSEAAAKGGTLGDQGSRGSDPLPEPRVTLTVEGIPTEFLVNTGAEHSVLTKPMGKMGSKRTVVAGATGSKVYPWTTKRLLKIGQKQVTHSFLVIPECPAPLLGRDLLTKLKAQIQFSTEGPQVTWEDRPAMCLVLNLEEEYRLHEKPVPPSIDPSWLQLFPMVWAEKAGMGLANQVPPVVVELKSDASPVAVRQYPMSKEAREGIRPHIQRFLDLGILVPCQSPWNTPLLPVKKPGTNDYRPVQDLREVNKRVQDIHPTVPNPYNLLSSLPPSHTWYSVLDLKDAFFCLKLHPNSQPLFAFEWRDPEKGNTGQLTWTRLPQGFKNSPTLFNEALHRDLASFRALNPQVVMLQYVDDLLVAAPTYRDCKEGTRRLLQELSKLGYRVSAKKAQLCREEVTYLGYLLKGGKRWLTPARKATVMKIPTPTTPRQVREFLGTAGFCRLWIPGFASLAAPLYPLTRPKVPFTWTEAHQEAFGRIKEALLSAPALALPDLTKPFALYVDEKEGVARGVLTQTLGPWRRPVAYLSKKLDPVASGWPTCLKAIAAVALLLKDADKLTLGQNVLVIAPHNLESIVRQPPDRWMTNARMTHYQSLLLNERVSFAPPAILNPATLLPVESDDTPIHICSEILAEETGTRPDLRDQPLPGVPAWYTDGSSFIMDGRRQAGAAIVDNKRTVWASNLPEGTSAQKAELIALTQALRLAEGKSINIYTDSRYAFATAHVHGAIYKQRGWLTSAGKDIKNKEEILALLEAIHLPKRVAIIHCPGHQRGTDPVATGNRKADEAAKQAAQSTRILTETTKNAGKRTADGSEFEKRTADGSEFESPKKKAKVE

SEQ ID NO: 7074 - protein, 2090 aa, synthetic construct
MPAAKRVKLDGGDKKYSIGLDIGTNSVGWAVITDEYKVPSKKFKVLGNTDRHSIKKNLIGALLFDSGETAEATRLKRTARRRYTRRKNRICYLQEIFSNEMAKVDDSFFHRLEESFLVEEDKKHERHPIFGNIVDEVAYHEKYPTIYHLRKKLVDSTDKADLRLIYLALAHMIKFRGHFLIEGDLNPDNSDVDKLFIQLVQTYNQLFEENPINASGVDAKAILSARLSKSRRLENLIAQLPGEKKNGLFGNLIALSLGLTPNFKSNFDLAEDAKLQLSKDTYDDDLDNLLAQIGDQYADLFLAAKNLSDAILLSDILRVNTEITKAPLSASMIKRYDEHHQDLTLLKALVRQQLPEKYKEIFFDQSKNGYAGYIDGGASQEEFYKFIKPILEKMDGTEELLVKLNREDLLRKQRTFDNGSIPHQIHLGELHAILRRQEDFYPFLKDNREKIEKILTFRIPYYVGPLARGNSRFAWMTRKSEETITPWNFEEVVDKGASAQSFIERMTNFDKNLPNEKVLPKHSLLYEYFTVYNELTKVKYVTEGMRKPAFLSGEQKKAIVDLLFKTNRKVTVKQLKEDYFKKIECFDSVEISGVEDRFNASLGTYHDLLKIIKDKDFLDNEENEDILEDIVLTLTLFEDREMIEERLKTYAHLFDDKVMKQLKRRRYTGWGRLSRKLINGIRDKQSGKTILDFLKSDGFANRNFMQLIHDDSLTFKEDIQKAQVSGQGDSLHEHIANLAGSPAIKKGILQTVKVVDELVKVMGRHKPENIVIEMARENQTTQKGQKNSRERMKRIEEGIKELGSQILKEHPVENTQLQNEKLYLYYLQNGRDMYVDQELDINRLSDYDVDHIVPQSFLKDDSIDNKVLTRSDKARGKSDNVPSEEVVKKMKNYWRQLLNAKLITQRKFDNLTKAERGGLSELDKAGFIKRQLVETRQITKHVAQILDSRMNTKYDENDKLIREVKVITLKSKLVSDFRKDFQFYKVREINNYHHAHDAYLNAVVGTALIKKYPKLESEFVYGDYKVYDVRKMIAKSEQEIGKATAKYFFYSNIMNFFKTEITLANGEIRKRPLIETNGETGEIVWDKGRDFATVRKVLSMPQVNIVKKTEVQTGGFSKESILPKRNSDKLIARKKDWDPKKYGGFDSPTVAYSVLVVAKVEKGKSKKLKSVKELLGITIMERSSFEKNPIDFLEAKGYKEVKKDLIIKLPKYSLFELENGRKRMLASAGELQKGNELALPSKYVNFLYLASHYEKLKGSPEDNEQKQLFVEQHKHYLDEIIEQISEFSKRVILADANLDKVLSAYNKHRDKPIREQAENIIHLFTLTNLGAPAAFKYFDTTIDRKRYTSTKEVLDATLIHQSITGLYETRIDLSQLGGDGGGSSGGSEAAAKGGTLQLDDEYRLYSPLVKPDQNIQFWLEQFPQAWAETAGMGLAKQVPPQVIQLKASATPVSVRQYPLSKEAQEGIRPHVQRLIQQGILVPVQSPWNTPLLPVRKPGTNDYRPVQDLREVNKRVQDIHPTVPNPYNLLCALPPQRSWYTVLDLKDAFFCLRLHPTSQPLFAFEWRDPGTGRTGQLTWTRLPQGFKNSPTIFDEALHRDLANFRIQHPQVTLLQYVDDLLLAGATKQDCLEGTKALLLELSDLGYRASAKKAQICRREVTYLGYSLRDGQRWLTEARKKTVVQIPAPTTAKQVREFLGTAGFCRLWIPGFATLAAPLYPLTKEKGEFSWAPEHQKAFDAIKKALLSAPALALPDVTKPFTLYVDERKGVARGVLTQTLGPWRRPVAYLSKKLDPVASGWPVCLKAIAAVAILVKDADKLTLGQNITVIAPHALENIVRQPPDRWMTNARMTHYQSLLLTERVTFAPPAALNPATLLPEETDEPVTHDCHQLLIEETGVRKDLTDIPLTGEVLTWFTDGSSYVVEGKRMAGAAVVDGTRTIWASSLPEGTSAQKAELMALTQALRLAEGKSINIYTDSRYAFATAHVHGAIYKQRGLLTSAGREIKNKEEILSLLEALHLPKRLAIIHCPGHQKAKDPISRGNQMADRVAKQAAQGVNLLAGKRTADGSEFEKRTADGSEFESPKKKAKVE

SEQ ID NO: 7075 - protein, 2090 aa, synthetic construct; identical to SEQ ID NO: 7074

SEQ ID NO: 7076 - protein, 2176 aa, synthetic construct
MPAAKRVKLDGGDKKYSIGLDIGTNSVGWAVITDEYKVPSKKFKVLGNTDRHSIKKNLIGALLFDSGETAEATRLKRTARRRYTRRKNRICYLQEIFSNEMAKVDDSFFHRLEESFLVEEDKKHERHPIFGNIVDEVAYHEKYPTIYHLRKKLVDSTDKADLRLIYLALAHMIKFRGHFLIEGDLNPDNSDVDKLFIQLVQTYNQLFEENPINASGVDAKAILSARLSKSRRLENLIAQLPGEKKNGLFGNLIALSLGLTPNFKSNFDLAEDAKLQLSKDTYDDDLDNLLAQIGDQYADLFLAAKNLSDAILLSDILRVNTEITKAPLSASMIKRYDEHHQDLTLLKALVRQQLPEKYKEIFFDQSKNGYAGYIDGGASQEEFYKFIKPILEKMDGTEELLVKLNREDLLRKQRTFDNGSIPHQIHLGELHAILRRQEDFYPFLKDNREKIEKILTFRIPYYVGPLARGNSRFAWMTRKSEETITPWNFEEVVDKGASAQSFIERMTNFDKNLPNEKVLPKHSLLYEYFTVYNELTKVKYVTEGMRKPAFLSGEQKKAIVDLLFKTNRKVTVKQLKEDYFKKIECFDSVEISGVEDRFNASLGTYHDLLKIIKDKDFLDNEENEDILEDIVLTLTLFEDREMIEERLKTYAHLFDDKVMKQLKRRRYTGWGRLSRKLINGIRDKQSGKTILDFLKSDGFANRNFMQLIHDDSLTFKEDIQKAQVSGQGDSLHEHIANLAGSPAIKKGILQTVKVVDELVKVMGRHKPENIVIEMARENQTTQKGQKNSRERMKRIEEGIKELGSQILKEHPVENTQLQNEKLYLYYLQNGRDMYVDQELDINRLSDYDVDHIVPQSFLKDDSIDNKVLTRSDKARGKSDNVPSEEVVKKMKNYWRQLLNAKLITQRKFDNLTKAERGGLSELDKAGFIKRQLVETRQITKHVAQILDSRMNTKYDENDKLIREVKVITLKSKLVSDFRKDFQFYKVREINNYHHAHDAYLNAVVGTALIKKYPKLESEFVYGDYKVYDVRKMIAKSEQEIGKATAKYFFYSNIMNFFKTEITLANGEIRKRPLIETNGETGEIVWDKGRDFATVRKVLSMPQVNIVKKTEVQTGGFSKESILPKRNSDKLIARKKDWDPKKYGGFDSPTVAYSVLVVAKVEKGKSKKLKSVKELLGITIMERSSFEKNPIDFLEAKGYKEVKKDLIIKLPKYSLFELENGRKRMLASAGELQKGNELALPSKYVNFLYLASHYEKLKGSPEDNEQKQLFVEQHKHYLDEIIEQISEFSKRVILADANLDKVLSAYNKHRDKPIREQAENIIHLFTLTNLGAPAAFKYFDTTIDRKRYTSTKEVLDATLIHQSITGLYETRIDLSQLGGDGGGSSGGSEAAAKGGMDPLQLLQPLEAEIKGTKLKAHWNSGATITCVPEAFLEDERPIQTMLIKTIHGEKQQDVYYLTFKVQGRKVEAEVLASPYDYILLNPSDVPWLMKKPLQLTVLVPLHEYQERLLQQTALPKEQKELLQKLFLKYDALWQHWENQVGHRRIKPHNIATGTLAPRPQKQYPINPKAKPSIQIVIDDLLKQGVLIQQNSTMNTPVYPVPKPDGKWRMVLDYREVNKTIPLIAAQNQHSAGILSSIYRGKYKTTLDLTNGFWAHPITPESYWLTAFTWQGKQYCWTRLPQGFLNSPALFNADVVDLLKEIPNVQAYVDDIYISHDDPQEHLEQLEKIFSILLNAGYVVSLKKSEIAQREVEFLGFNITKEGRGLTDTFKQKLLNITPPKDLKQLQSILGLLNFARNFIPNYSELVKPLYTIVAPANGKFISWTEDNSNQLQHIISVLNQADNLEERNPETRLIIKVNSSPSAGYIRYYNEGSKRPIMYVNYIFSKAEAKFTQTEKLLTTMHKGLIKAMDLAMGQEILVYSPIVSMTKIQRTPLPERKALPVRWITWMTYLEDPRIQFHYDKSLPELQQIPNVTEDVIAKTKHPSEFAMVFYTDGSAIKHPDVNKSHSAGMGIAQVQFIPEYKIVHQWSIPLGDHTAQLAEIAAVEFACKKALKISGPVLIVTDSFYVAESANKELPYWKSNGFLNNKKKPLRHVSKWKSIAECLQLKPDIIIMHEKGHQQPMTTLHTEGNNLADKLATQGSYVVHAGKRTADGSEFEKRTADGSEFESPKKKAKVE

SEQ ID NO: 7077 - protein, 2176 aa, synthetic construct
MPAAKRVKLDGGDKKYSIGLDIGTNSVGWAVITDEYKVPSKKFKVLGNTDRHSIKKNLIGALLFDSGETAEATRLKRTARRRYTRRKNRICYLQEIFSNEMAKVDDSFFHRLEESFLVEEDKKHERHPIFGNIVDEVAYHEKYPTIYHLRKKLVDSTDKADLRLIYLALAHMIKFRGHFLIEGDLNPDNSDVDKLFIQLVQTYNQLFEENPINASGVDAKAILSARLSKSRRLENLIAQLPGEKKNGLFGNLIALSLGLTPNFKSNFDLAEDAKLQLSKDTYDDDLDNLLAQIGDQYADLFLAAKNLSDAILLSDILRVNTEITKAPLSASMIKRYDEHHQDLTLLKALVRQQLPEKYKEIFFDQSKNGYAGYIDGGASQEEFYKFIKPILEKMDGTEELLVKLNREDLLRKQRTFDNGSIPHQIHLGELHAILRRQEDFYPFLKDNREKIEKILTFRIPYYVGPLARGNSRFAWMTRKSEETITPWNFEEVVDKGASAQSFIERMTNFDKNLPNEKVLPKHSLLYEYFTVYNELTKVKYVTEGMRKPAFLSGEQKKAIVDLLFKTNRKVTVKQLKEDYFKKIECFDSVEISGVEDRFNASLGTYHDLLKIIKDKDFLDNEENEDILEDIVLTLTLFEDREMIEERLKTYAHLFDDKVMKQLKRRRYTGWGRLSRKLINGIRDKQSGKTILDFLKSDGFANRNFMQLIHDDSLTFKEDIQKAQVSGQGDSLHEHIANLAGSPAIKKGILQTVKVVDELVKVMGRHKPENIVIEMARENQTTQKGQKNSRERMKRIEEGIKELGSQILKEHPVENTQLQNEKLYLYYLQNGRDMYVDQELDINRLSDYDVDHIVPQSFLKDDSIDNKVLTRSDKARGKSDNVPSEEVVKKMKNYWRQLLNAKLITQRKFDNLTKAERGGLSELDKAGFIKRQLVETRQITKHVAQILDSRMNTKYDENDKLIREVKVITLKSKLVSDFRKDFQFYKVREINNYHHAHDAYLNAVVGTALIKKYPKLESEFVYGDYKVYDVRKMIAKSEQEIGKATAKYFFYSNIMNFFKTEITLANGEIRKRPLIETNGETGEIVWDKGRDFATVRKVLSMPQVNIVKKTEVQTGGFSKESILPKRNSDKLIARKKDWDPKKYGGFDSPTVAYSVLVVAKVEKGKSKKLKSVKELLGITIMERSSFEKNPIDFLEAKGYKEVKKDLIIKLPKYSLFELENGRKRMLASAGELQKGNELALPSKYVNFLYLASHYEKLKGSPEDNEQKQLFVEQHKHYLDEIIEQISEFSKRVILADANLDKVLSAYNKHRDKPIREQAENIIHLFTLTNLGAPAAFKYFDTTIDRKRYTSTKEVLDATLIHQSITGLYETRIDLSQLGGDGGGSSGGSEAAAKGGMDPLQLLQPLEAEIKGTKLKAHWNSGATITCVPQAFLEEEVPIKNIWIKTIHGEKEQPVYYLTFKIQGRKVEAEVISSPYDYILVSPSDIPWLMKKPLQLTTLVPLQEYEERLLKQTMLTGSYKEKLQSLFLKYDALWQHWENQVGHRRIKPHHIATGTVNPRPQKQYPINPKAKASIQTVINDLLKQGVLIQQNSIMNTPVYPVPKPDGKWRMVLDYREVNKTIPLIAAQNQHSAGILSSIFRGKYKTTLDLSNGFWAHSITPESYWLTAFTWLGQQYCWTRLPQGFLNSPALFNADVVDLLKEVPNVQVYVDDIYISHDDPREHLEQLEKVFSLLLNAGYVVSLKKSEIAQHEVEFLGFNITKEGRGLTETFKQKLLNITPPRDLKQLQSILGLLNFARNFIPNFSELVKPLYNIIATAPGKYITWTTDNSQQLQNIISMLNSAENLEERNPEVRLIMKVNTSPSAGYIRFYNEFAKRPIMYLNYVYTKAEVKFTNTEKLLTTIHKGLIKALDLGMGQEILVYSPIVSMTKIQKTPLPERKALPIRWITWMSYLEDPRIQFHYDKTLPELQQVPTVTDDIIAKIKHPSEFSMVFYTDGSAIKHPNVNKSHNAGMGIAQVQFKPEFTVINTWSIPLGDHTAQLAEVAAVEFACKKALKIDGPVLIVTDSFYVAESVNKELPYWQSNGFFNNKKKPLKHVSKWKSIADCIQLKPDIIIIHEKGHQPTASTFHTEGNNLADKLATQGSYVVNAGKRTADGSEFEKRTADGSEFESPKKKAKVE

SEQ ID NO: 7078 - protein, 2098 aa, synthetic construct
MPAAKRVKLDGGDKKYSIGLDIGTNSVGWAVITDEYKVPSKKFKVLGNTDRHSIKKNLIGALLFDSGETAEATRLKRTARRRYTRRKNRICYLQEIFSNEMAKVDDSFFHRLEESFLVEEDKKHERHPIFGNIVDEVAYHEKYPTIYHLRKKLVDSTDKADLRLIYLALAHMIKFRGHFLIEGDLNPDNSDVDKLFIQLVQTYNQLFEENPINASGVDAKAILSARLSKSRRLENLIAQLPGEKKNGLFGNLIALSLGLTPNFKSNFDLAEDAKLQLSKDTYDDDLDNLLAQIGDQYADLFLAAKNLSDAILLSDILRVNTEITKAPLSASMIKRYDEHHQDLTLLKALVRQQLPEKYKEIFFDQSKNGYAGYIDGGASQEEFYKFIKPILEKMDGTEELLVKLNREDLLRKQRTFDNGSIPHQIHLGELHAILRRQEDFYPFLKDNREKIEKILTFRIPYYVGPLARGNSRFAWMTRKSEETITPWNFEEVVDKGASAQSFIERMTNFDKNLPNEKVLPKHSLLYEYFTVYNELTKVKYVTEGMRKPAFLSGEQKKAIVDLLFKTNRKVTVKQLKEDYFKKIECFDSVEISGVEDRFNASLGTYHDLLKIIKDKDFLDNEENEDILEDIVLTLTLFEDREMIEERLKTYAHLFDDKVMKQLKRRRYTGWGRLSRKLINGIRDKQSGKTILDFLKSDGFANRNFMQLIHDDSLTFKEDIQKAQVSGQGDSLHEHIANLAGSPAIKKGILQTVKVVDELVKVMGRHKPENIVIEMARENQTTQKGQKNSRERMKRIEEGIKELGSQILKEHPVENTQLQNEKLYLYYLQNGRDMYVDQELDINRLSDYDVDHIVPQSFLKDDSIDNKVLTRSDKARGKSDNVPSEEVVKKMKNYWRQLLNAKLITQRKFDNLTKAERGGLSELDKAGFIKRQLVETRQITKHVAQILDSRMNTKYDENDKLIREVKVITLKSKLVSDFRKDFQFYKVREINNYHHAHDAYLNAVVGTALIKKYPKLESEFVYGDYKVYDVRKMIAKSEQEIGKATAKYFFYSNIMNFFKTEITLANGEIRKRPLIETNGETGEIVWDKGRDFATVRKVLSMPQVNIVKKTEVQTGGFSKESILPKRNSDKLIARKKDWDPKKYGGFDSPTVAYSVLVVAKVEKGKSKKLKSVKELLGITIMERSSFEKNPIDFLEAKGYKEVKKDLIIKLPKYSLFELENGRKRMLASAGELQKGNELALPSKYVNFLYLASHYEKLKGSPEDNEQKQLFVEQHKHYLDEIIEQISEFSKRVILADANLDKVLSAYNKHRDKPIREQAENIIHLFTLTNLGAPAAFKYFDTTIDRKRYTSTKEVLDATLIHQSITGLYETRIDLSQLGGDGGGSSEAAAKGGSGGTAPLEEEYRLFLEAPIQNVTLLEQWKREIPKVWAEINPPGLASTQAPIHVQLLSTALPVRVRQYPITLEAKRSLRETIRKFRAAGILRPVHSPWNTPLLPVRKSGTSEYRMVQDLREVNKRVETIHPTVPNPYTLLSLLPPDRIWYSVLDLKDAFFCIPLAPESQLIFAFEWADAEEGESGQLTWTRLPQGFKNSPTLFDEALNRDLQGFRLDHPSVSLLQYVDDLLIAADTQAACLSATRDLLMTLAELGYRVSGKKAQLCQEEVTYLGFKIHKGSRSLSNSRTQAILQIPVPKTKRQVREFLGTIGYCRLWIPGFAELAQPLYAATRGGNDPLVWGEKEEEAFQSLKLALTQPPALALPSLDKPFQLFVEETSGAAKGVLTQALGPWKRPVAYLSKRLDPVAAGWPRCLRAIAAAALLTREASKLTFGQDIEITSSHNLESLLRSPPDKWLTNARITQYQVLLLDPPRVRFKQTAALNPATLLPETDDTLPIHHCLDTLDSLTSTRPDLTDQPLAQAEATLFTDGSSYIRDGKRYAGAAVVTLDSVIWAEPLPIGTSAQKAELIALTKALEWSKDKSVNIYTDSRYAFATLHVHGMIYRERGLLTAGGKAIKNAPEILALLTAVWLPKRVAVMHCKGHQKDDAPTSTGNRRADEVAREVAIRPLSTQATISAGKRTADGSEFEKRTADGSEFESPKKKAKVE

SEQ ID NO: 7079 - protein, 2098 aa, synthetic construct
MPAAKRVKLDGGDKKYSIGLDIGTNSVGWAVITDEYKVPSKKFKVLGNTDRHSIKKNLIGALLFDSGETAEATRLKRTARRRYTRRKNRICYLQEIFSNEMAKVDDSFFHRLEESFLVEEDKKHERHPIFGNIVDEVAYHEKYPTIYHLRKKLVDSTDKADLRLIYLALAHMIKFRGHFLIEGDLNPDNSDVDKLFIQLVQTYNQLFEENPINASGVDAKAILSARLSKSRRLENLIAQLPGEKKNGLFGNLIALSLGLTPNFKSNFDLAEDAKLQLSKDTYDDDLDNLLAQIGDQYADLFLAAKNLSDAILLSDILRVNTEITKAPLSASMIKRYDEHHQDLTLLKALVRQQLPEKYKEIFFDQSKNGYAGYIDGGASQEEFYKFIKPILEKMDGTEELLVKLNREDLLRKQRTFDNGSIPHQIHLGELHAILRRQEDFYPFLKDNREKIEKILTFRIPYYVGPLARGNSRFAWMTRKSEETITPWNFEEVVDKGASAQSFIERMTNFDKNLPNEKVLPKHSLLYEYFTVYNELTKVKYVTEGMRKPAFLSGEQKKAIVDLLFKTNRKVTVKQLKEDYFKKIECFDSVEISGVEDRFNASLGTYHDLLKIIKDKDFLDNEENEDILEDIVLTLTLFEDREMIEERLKTYAHLFDDKVMKQLKRRRYTGWGRLSRKLINGIRDKQSGKTILDFLKSDGFANRNFMQLIHDDSLTFKEDIQKAQVSGQGDSLHEHIANLAGSPAIKKGILQTVKVVDELVKVMGRHKPENIVIEMARENQTTQKGQKNSRERMKRIEEGIKELGSQILKEHPVENTQLQNEKLYLYYLQNGRDMYVDQELDINRLSDYDVDHIVPQSFLKDDSIDNKVLTRSDKARGKSDNVPSEEVVKKMKNYWRQLLNAKLITQRKFDNLTKAERGGLSELDKAGFIKRQLVETRQITKHVAQILDSRMNTKYDENDKLIREVKVITLKSKLVSDFRKDFQFYKVREINNYHHAHDAYLNAVVGTALIKKYPKLESEFVYGDYKVYDVRKMIAKSEQEIGKATAKYFFYSNIMNFFKTEITLANGEIRKRPLIETNGETGEIVWDKGRDFATVRKVLSMPQVNIVKKTEVQTGGFSKESILPKRNSDKLIARKKDWDPKKYGGFDSPTVAYSVLVVAKVEKGKSKKLKSVKELLGITIMERSSFEKNPIDFLEAKGYKEVKKDLIIKLPKYSLFELENGRKRMLASAGELQKGNELALPSKYVNFLYLASHYEKLKGSPEDNEQKQLFVEQHKHYLDEIIEQISEFSKRVILADANLDKVLSAYNKHRDKPIREQAENIIHLFTLTNLGAPAAFKYFDTTIDRKRYTSTKEVLDATLIHQSITGLYETRIDLSQLGGDGGGSSEAAAKGGSGGTAPLEEEYRLFLEAPIQNVTLLEQWKREIPKVWAEINPPGLASTQAPIHVQLLSTALPVRVRQYPITLEAKRSLRETIRKFRAAGILRPVHSPWNTPLLPVRKSGTSEYRMVQDLREVNKRVETIHPTVPNPYTLLSLLPPDRIWYSVLDLKDAFFCIPLAPESQLIFAFEWADAEEGESGQLTWTRLPQGFKNSPTLFNEALNRDLQGFRLDHPSVSLLQYVDDLLIAADTQAACLSATRDLLMTLAELGYRVSGKKAQLCQEEVTYLGFKIHKGSRSLSNSRTQAILQIPVPKTKRQVREFLGTIGYCRLWIPGFAELAQPLYAATRPGNDPLVWGEKEEEAFQSLKLALTQPPALALPSLDKPFQLFVEETSGAAKGVLTQALGPWKRPVAYLSKRLDPVAAGWPRCLRAIAAAALLTREASKLTFGQDIEITSSHNLESLLRSPPDKWLTNARITQYQVLLLDPPRVRFKQTAALNPATLLPETDDTLPIHHCLDTLDSLTSTRPDLTDQPLAQAEATLFTDGSSYIRDGKRYAGAAVVTLDSVIWAEPLPIGTSAQKAELIALTKALEWSKDKSVNIYTDSRYAFATLHVHGMIYRERGWLTAGGKAIKNAPEILALLTAVWLPKRVAVMHCKGHQKDDAPTSTGNRRADEVAREVAIRPLSTQATISAGKRTADGSEFEKRTADGSEFESPKKKAKVE

SEQ ID NO: 7080 - protein, 2098 aa, synthetic construct
MPAAKRVKLDGGDKKYSIGLDIGTNSVGWAVITDEYKVPSKKFKVLGNTDRHSIKKNLIGALLFDSGETAEATRLKRTARRRYTRRKNRICYLQEIFSNEMAKVDDSFFHRLEESFLVEEDKKHERHPIFGNIVDEVAYHEKYPTIYHLRKKLVDSTDKADLRLIYLALAHMIKFRGHFLIEGDLNPDNSDVDKLFIQLVQTYNQLFEENPINASGVDAKAILSARLSKSRRLENLIAQLPGEKKNGLFGNLIALSLGLTPNFKSNFDLAEDAKLQLSKDTYDDDLDNLLAQIGDQYADLFLAAKNLSDAILLSDILRVNTEITKAPLSASMIKRYDEHHQDLTLLKALVRQQLPEKYKEIFFDQSKNGYAGYIDGGASQEEFYKFIKPILEKMDGTEELLVKLNREDLLRKQRTFDNGSIPHQIHLGELHAILRRQEDFYPFLKDNREKIEKILTFRIPYYVGPLARGNSRFAWMTRKSEETITPWNFEEVVDKGASAQSFIERMTNFDKNLPNEKVLPKHSLLYEYFTVYNELTKVKYVTEGMRKPAFLSGEQKKAIVDLLFKTNRKVTVKQLKEDYFKKIECFDSVEISGVEDRFNASLGTYHDLLKIIKDKDFLDNEENEDILEDIVLTLTLFEDREMIEERLKTYAHLFDDKVMKQLKRRRYTGWGRLSRKLINGIRDKQSGKTILDFLKSDGFANRNFMQLIHDDSLTFKEDIQKAQVSGQGDSLHEHIANLAGSPAIKKGILQTVKVVDELVKVMGRHKPENIVIEMARENQTTQKGQKNSRERMKRIEEGIKELGSQILKEHPVENTQLQNEKLYLYYLQNGRDMYVDQELDINRLSDYDVDHIVPQSFLKDDSIDNKVLTRSDKARGKSDNVPSEEVVKKMKNYWRQLLNAKLITQRKFDNLTKAERGGLSELDKAGFIKRQLVETRQITKHVAQILDSRMNTKYDENDKLIREVKVITLKSKLVSDFRKDFQFYKVREINNYHHAHDAYLNAVVGTALIKKYPKLESEFVYGDYKVYDVRKMIAKSEQEIGKATAKYFFYSNIMNFFKTEITLANGEIRKRPLIETNGETGEIVWDKGRDFATVRKVLSMPQVNIVKKTEVQTGGFSKESILPKRNSDKLIARKKDWDPKKYGGFDSPTVAYSVLVVAKVEKGKSKKLKSVKELLGITIMERSSFEKNPIDFLEAKGYKEVKKDLIIKLPKYSLFELENGRKRMLASAGELQKGNELALPSKYVNFLYLASHYEKLKGSPEDNEQKQLFVEQHKHYLDEIIEQISEFSKRVILADANLDKVLSAYNKHRDKPIREQAENIIHLFTLTNLGAPAAFKYFDTTIDRKRYTSTKEVLDATLIHQSITGLYETRIDLSQLGGDGGGSSEAAAKGGSGGTAPLEEEYRLFLEAPIQNVTLLEQWKREIPKVWAEINPPGLASTQAPIHVQLLSTALPVRVRQYPITLEAKRSLRETIRKFRAAGILRPVHSPWNTPLLPVRKSGTSEYRMVQDLREVNKRVETIHPTVPNPYTLLSLLPPDRIWYSVLDLKDAFFCIPLAPESQLIFAFEWADAEEGESGQLTWTRLPQGFKNSPTLFNEALNRDLQGFRLDHPSVSLLQYVDDLLIAADTQAACLSATRDLLMTLAELGYRVSGKKAQLCQEEVTYLGFKIHKGSRSLSNSRTQAILQIPVPKTKRQVREFLGKIGYCRLFIPGFAELAQPLYAATRPGNDPLVWGEKEEEAFQSLKLALTQPPALALPSLDKPFQLFVEETSGAAKGVLTQALGPWKRPVAYLSKRLDPVAAGWPRCLRAIAAAALLTREASKLTFGQDIEITSSHNLESLLRSPPDKWLTNARITQYQVLLLDPPRVRFKQTAALNPATLLPETDDTLPIHHCLDTLDSLTSTRPDLTDQPLAQAEATLFTDGSSYIRDGKRYAGAAVVTLDSVIWAEPLPIGTSAQKAELIALTKALEWSKDKSVNIYTDSRYAFATLHVHGMIYRERGWLTAGGKAIKNAPEILALLTAVWLPKRVAVMHCKGHQKDDAPTSTGNRRADEVAREVAIRPLSTQATISAGKRTADGSEFEKRTADGSEFESPKKKAKVE

SEQ ID NO: 7081 - protein, 2102 aa, synthetic construct
MPAAKRVKLDGGDKKYSIGLDIGTNSVGWAVITDEYKVPSKKFKVLGNTDRHSIKKNLIGALLFDSGETAEATRLKRTARRRYTRRKNRICYLQEIFSNEMAKVDDSFFHRLEESFLVEEDKKHERHPIFGNIVDEVAYHEKYPTIYHLRKKLVDSTDKADLRLIYLALAHMIKFRGHFLIEGDLNPDNSDVDKLFIQLVQTYNQLFEENPINASGVDAKAILSARLSKSRRLENLIAQLPGEKKNGLFGNLIALSLGLTPNFKSNFDLAEDAKLQLSKDTYDDDLDNLLAQIGDQYADLFLAAKNLSDAILLSDILRVNTEITKAPLSASMIKRYDEHHQDLTLLKALVRQQLPEKYKEIFFDQSKNGYAGYIDGGASQEEFYKFIKPILEKMDGTEELLVKLNREDLLRKQRTFDNGSIPHQIHLGELHAILRRQEDFYPFLKDNREKIEKILTFRIPYYVGPLARGNSRFAWMTRKSEETITPWNFEEVVDKGASAQSFIERMTNFDKNLPNEKVLPKHSLLYEYFTVYNELTKVKYVTEGMRKPAFLSGEQKKAIVDLLFKTNRKVTVKQLKEDYFKKIECFDSVEISGVEDRFNASLGTYHDLLKIIKDKDFLDNEENEDILEDIVLTLTLFEDREMIEERLKTYAHLFDDKVMKQLKRRRYTGWGRLSRKLINGIRDKQSGKTILDFLKSDGFANRNFMQLIHDDSLTFKEDIQKAQVSGQGDSLHEHIANLAGSPAIKKGILQTVKVVDELVKVMGRHKPENIVIEMARENQTTQKGQKNSRERMKRIEEGIKELGSQILKEHPVENTQLQNEKLYLYYLQNGRDMYVDQELDINRLSDYDVDHIVPQSFLKDDSIDNKVLTRSDKARGKSDNVPSEEVVKKMKNYWRQLLNAKLITQRKFDNLTKAERGGLSELDKAGFIKRQLVETRQITKHVAQILDSRMNTKYDENDKLIREVKVITLKSKLVSDFRKDFQFYKVREINNYHHAHDAYLNAVVGTALIKKYPKLESEFVYGDYKVYDVRKMIAKSEQEIGKATAKYFFYSNIMNFFKTEITLANGEIRKRPLIETNGETGEIVWDKGRDFATVRKVLSMPQVNIVKKTEVQTGGFSKESILPKRNSDKLIARKKDWDPKKYGGFDSPTVAYSVLVVAKVEKGKSKKLKSVKELLGITIMERSSFEKNPIDFLEAKGYKEVKKDLIIKLPKYSLFELENGRKRMLASAGELQKGNELALPSKYVNFLYLASHYEKLKGSPEDNEQKQLFVEQHKHYLDEIIEQISEFSKRVILADANLDKVLSAYNKHRDKPIREQAENIIHLFTLTNLGAPAAFKYFDTTIDRKRYTSTKEVLDATLIHQSITGLYETRIDLSQLGGDGGGSSEAAAKGGSGGTVSLQDEHRLFDIPVTTSLPDVWLQDFPQAWAETGGLGRAKCQAPIIIDLKPTAVPVSIKQYPMSLEAHMGIRQHIIKFLELGVLRPCRSPWNTPLLPVKKPGTQDYRPVQDLREINKRTVDIHPTVPNPYNLLSTLKPDYSWYTVLDLKDAFFCLPLAPQSQELFAFEWKDPERGISGQLTWTRLPQGFKNSPTLFNEALHRDLTDFRTQHPEVTLLQYVDDLLLAAPTKKACTQGTRHLLQELGEKGYRASAKKAQICQTKVTYLGYILSEGKRWLTPGRIETVARIPPPRNPREVREFLGTAGFCRLWIPGFAELAAPLYALTKPSTPFTWQTEHQLAFEALKKALLSAPALGLPDTSKPFTLFLDERQGIAKGVLTQKLGPWKRPVAYLSKKLDPVAAGWPPCLRIMAATAMLVKDSAKLTLGQPLTVITPHTLEAIVRQPPDRWITNARLTHYQALLLDTDRVQFGPPVTLNPATLLPVPENQPSPHDCRQVLAETHGTREDLKDQELPDADHTWYTDGSSYLDSGTRRAGAAVVDGHNTIWAQSLPPGTSAQKAELIALTKALELSKGKKANIYTDSRYAFATAHTHGSIYERRGWLTSEGKEIKNKAEIIALLKALFLPQEVAIIHCPGHQKGQDPVAVGNRQADRVARQAAMAEVLTLATEPDNTSHITAGKRTADGSEFEKRTADGSEFESPKKKAKVE

SEQ ID NO: 7082 - protein, 2095 aa, synthetic construct
MPAAKRVKLDGGDKKYSIGLDIGTNSVGWAVITDEYKVPSKKFKVLGNTDRHSIKKNLIGALLFDSGETAEATRLKRTARRRYTRRKNRICYLQEIFSNEMAKVDDSFFHRLEESFLVEEDKKHERHPIFGNIVDEVAYHEKYPTIYHLRKKLVDSTDKADLRLIYLALAHMIKFRGHFLIEGDLNPDNSDVDKLFIQLVQTYNQLFEENPINASGVDAKAILSARLSKSRRLENLIAQLPGEKKNGLFGNLIALSLGLTPNFKSNFDLAEDAKLQLSKDTYDDDLDNLLAQIGDQYADLFLAAKNLSDAILLSDILRVNTEITKAPLSASMIKRYDEHHQDLTLLKALVRQQLPEKYKEIFFDQSKNGYAGYIDGGASQEEFYKFIKPILEKMDGTEELLVKLNREDLLRKQRTFDNGSIPHQIHLGELHAILRRQEDFYPFLKDNREKIEKILTFRIPYYVGPLARGNSRFAWMTRKSEETITPWNFEEVVDKGASAQSFIERMTNFDKNLPNEKVLPKHSLLYEYFTVYNELTKVKYVTEGMRKPAFLSGEQKKAIVDLLFKTNRKVTVKQLKEDYFKKIECFDSVEISGVEDRFNASLGTYHDLLKIIKDKDFLDNEENEDILEDIVLTLTLFEDREMIEERLKTYAHLFDDKVMKQLKRRRYTGWGRLSRKLINGIRDKQSGKTILDFLKSDGFANRNFMQLIHDDSLTFKEDIQKAQVSGQGDSLHEHIANLAGSPAIKKGILQTVKVVDELVKVMGRHKPENIVIEMARENQTTQKGQKNSRERMKRIEEGIKELGSQILKEHPVENTQLQNEKLYLYYLQNGRDMYVDQELDINRLSDYDVDHIVPQSFLKDDSIDNKVLTRSDKARGKSDNVPSEEVVKKMKNYWRQLLNAKLITQRKFDNLTKAERGGLSELDKAGFIKRQLVETRQITKHVAQILDSRMNTKYDENDKLIREVKVITLKSKLVSDFRKDFQFYKVREINNYHHAHDAYLNAVVGTALIKKYPKLESEFVYGDYKVYDVRKMIAKSEQEIGKATAKYFFYSNIMNFFKTEITLANGEIRKRPLIETNGETGEIVWDKGRDFATVRKVLSMPQVNIVKKTEVQTGGFSKESILPKRNSDKLIARKKDWDPKKYGGFDSPTVAYSVLVVAKVEKGKSKKLKSVKELLGITIMERSSFEKNPIDFLEAKGYKEVKKDLIIKLPKYSLFELENGRKRMLASAGELQKGNELALPSKYVNFLYLASHYEKLKGSPEDNEQKQLFVEQHKHYLDEIIEQISEFSKRVILADANLDKVLSAYNKHRDKPIREQAENIIHLFTLTNLGAPAAFKYFDTTIDRKRYTSTKEVLDATLIHQSITGLYETRIDLSQLGGDGGGSSEAAAKGGSGGTLQLEEEYRLFEPESTQKQEMDIWLKNFPQAWAETGGMGTAHCQAPVLIQLKATATPISIRQYPMPHEAYQGIKPHIRRMLDQGILKPCQSPWNTPLLPVKKPGTEDYRPVQDLREVNKRVEDIHPTVPNPYNLLSTLPPSHPWYTVLDLKDAFFCLRLHSESQLLFAFEWRDPEIGLSGQLTWTRLPQGFKNSPTLFNEALHSDLADFRVRYPALVLLQYVDDLLLAAATRTECLEGTKALLETLGNKGYRASAKKAQICLQEVTYLGYSLKDGQRWLTKARKEAILSIPVPKNSRQVREFLGTAGYCRLWIPGFAELAAPLYPLTRPGTLFQWGTEQQLAFEDIKKALLSSPALGLPDITKPFELFIDENSGFAKGVLVQKLGPWKRPVAYLSKKLDTVASGWPPCLRMVAAIAILVKDAGKLTLGQPLTILTSHPVEALVRQPPNKWLSNARMTHYQAMLLDAERVHFGPTVSLNPATLLPLPSGGNHHDCLQILAETHGTRPDLTDQPLPDADLTWYTDGSSFIRNGEREAGAAVTTESEVIWAAPLPPGTSAQRAELIALTQALKMAEGKKLTVYTDSRYAFATTHVHGEIYRRRGWLTSEGKEIKNKNEILALLEALFLPKRLSIIHCPGHQKGDSPQAKGNRLADDTAKKAATETHSSLTVLPAGKRTADGSEFEKRTADGSEFESPKKKAKVE

SEQ ID NO: 7083 - protein, 2176 aa, synthetic construct
MPAAKRVKLDGGDKKYSIGLDIGTNSVGWAVITDEYKVPSKKFKVLGNTDRHSIKKNLIGALLFDSGETAEATRLKRTARRRYTRRKNRICYLQEIFSNEMAKVDDSFFHRLEESFLVEEDKKHERHPIFGNIVDEVAYHEKYPTIYHLRKKLVDSTDKADLRLIYLALAHMIKFRGHFLIEGDLNPDNSDVDKLFIQLVQTYNQLFEENPINASGVDAKAILSARLSKSRRLENLIAQLPGEKKNGLFGNLIALSLGLTPNFKSNFDLAEDAKLQLSKDTYDDDLDNLLAQIGDQYADLFLAAKNLSDAILLSDILRVNTEITKAPLSASMIKRYDEHHQDLTLLKALVRQQLPEKYKEIFFDQSKNGYAGYIDGGASQEEFYKFIKPILEKMDGTEELLVKLNREDLLRKQRTFDNGSIPHQIHLGELHAILRRQEDFYPFLKDNREKIEKILTFRIPYYVGPLARGNSRFAWMTRKSEETITPWNFEEVVDKGASAQSFIERMTNFDKNLPNEKVLPKHSLLYEYFTVYNELTKVKYVTEGMRKPAFLSGEQKKAIVDLLFKTNRKVTVKQLKEDYFKKIECFDSVEISGVEDRFNASLGTYHDLLKIIKDKDFLDNEENEDILEDIVLTLTLFEDREMIEERLKTYAHLFDDKVMKQLKRRRYTGWGRLSRKLINGIRDKQSGKTILDFLKSDGFANRNFMQLIHDDSLTFKEDIQKAQVSGQGDSLHEHIANLAGSPAIKKGILQTVKVVDELVKVMGRHKPENIVIEMARENQTTQKGQKNSRERMKRIEEGIKELGSQILKEHPVENTQLQNEKLYLYYLQNGRDMYVDQELDINRLSDYDVDHIVPQSFLKDDSIDNKVLTRSDKARGKSDNVPSEEVVKKMKNYWRQLLNAKLITQRKFDNLTKAERGGLSELDKAGFIKRQLVETRQITKHVAQILDSRMNTKYDENDKLIREVKVITLKSKLVSDFRKDFQFYKVREINNYHHAHDAYLNAVVGTALIKKYPKLESEFVYGDYKVYDVRKMIAKSEQEIGKATAKYFFYSNIMNFFKTEITLANGEIRKRPLIETNGETGEIVWDKGRDFATVRKVLSMPQVNIVKKTEVQTGGFSKESILPKRNSDKLIARKKDWDPKKYGGFDSPTVAYSVLVVAKVEKGKSKKLKSVKELLGITIMERSSFEKNPIDFLEAKGYKEVKKDLIIKLPKYSLFELENGRKRMLASAGELQKGNELALPSKYVNFLYLASHYEKLKGSPEDNEQKQLFVEQHKHYLDEIIEQISEFSKRVILADANLDKVLSAYNKHRDKPIREQAENIIHLFTLTNLGAPAAFKYFDTTIDRKRYTSTKEVLDATLIHQSITGLYETRIDLSQLGGDGGGSSEAAAKGGSGGMNPLQLLQPLPAEIKGTKLLAHWNSGATITCIPESFLEDEQPIKKTLIKTIHGEKQQNVYYVTFKVKGRKVEAEVIASPYEYILLSPTDVPWLTQQPLQLTILVPLQEYQEKILSKTALPEDQKQQLKTLFVKYDNLWQHWENQVGHRKIRPHNIATGDYPPRPQKQYPINPKAKPSIQIVIDDLLKQGVLTPQNSTMNTPVYPVPKPDGRWRMVLDYREVNKTIPLTAAQNQHSAGILATIVRQKYKTTLDLANGFWAHPITPESYWLTAFTWQGKQYCWTRLPQGFLNSPALFTADVVDLLKEIPNVQVYVDDIYLSHDDPKEHVQQLEKVFQILLQAGYVVSLKKSEIGQKTVEFLGFNITKEGRGLTDTFKTKLLNITPPKDLKQLQSILGLLNFARNFIPNFAELVQPLYNLIASAKGKYIEWSEENTKQLNMVIEALNTASNLEERLPEQRLVIKVNTSPSAGYVRYYNETGKKPIMYLNYVFSKAELKFSMLEKLLTTMHKALIKAMDLAMGQEILVYSPIVSMTKIQKTPLPERKALPIRWITWMTYLEDPRIQFHYDKTLPELKHIPDVYTSSQSPVKHPSQYEGVFYTDGSAIKSPDPTKSNNAGMGIVHATYKPEYQVLNQWSIPLGNHTAQMAEIAAVEFACKKALKIPGPVLVITDSFYVAESANKELPYWKSNGFVNNKKKPLKHISKWKSIAECLSMKPDITIQHEKGISLQIPVFILKGNALADKLATQGSYVVNAGKRTADGSEFEKRTADGSEFESPKKKAKVE

SEQ ID NO: 7084 - protein, 2218 aa, synthetic construct
MPAAKRVKLDGGDKKYSIGLDIGTNSVGWAVITDEYKVPSKKFKVLGNTDRHSIKKNLIGALLFDSGETAEATRLKRTARRRYTRRKNRICYLQEIFSNEMAKVDDSFFHRLEESFLVEEDKKHERHPIFGNIVDEVAYHEKYPTIYHLRKKLVDSTDKADLRLIYLALAHMIKFRGHFLIEGDLNPDNSDVDKLFIQLVQTYNQLFEENPINASGVDAKAILSARLSKSRRLENLIAQLPGEKKNGLFGNLIALSLGLTPNFKSNFDLAEDAKLQLSKDTYDDDLDNLLAQIGDQYADLFLAAKNLSDAILLSDILRVNTEITKAPLSASMIKRYDEHHQDLTLLKALVRQQLPEKYKEIFFDQSKNGYAGYIDGGASQEEFYKFIKPILEKMDGTEELLVKLNREDLLRKQRTFDNGSIPHQIHLGELHAILRRQEDFYPFLKDNREKIEKILTFRIPYYVGPLARGNSRFAWMTRKSEETITPWNFEEVVDKGASAQSFIERMTNFDKNLPNEKVLPKHSLLYEYFTVYNELTKVKYVTEGMRKPAFLSGEQKKAIVDLLFKTNRKVTVKQLKEDYFKKIECFDSVEISGVEDRFNASLGTYHDLLKIIKDKDFLDNEENEDILEDIVLTLTLFEDREMIEERLKTYAHLFDDKVMKQLKRRRYTGWGRLSRKLINGIRDKQSGKTILDFLKSDGFANRNFMQLIHDDSLTFKEDIQKAQVSGQGDSLHEHIANLAGSPAIKKGILQTVKVVDELVKVMGRHKPENIVIEMARENQTTQKGQKNSRERMKRIEEGIKELGSQILKEHPVENTQLQNEKLYLYYLQNGRDMYVDQELDINRLSDYDVDHIVPQSFLKDDSIDNKVLTRSDKARGKSDNVPSEEVVKKMKNYWRQLLNAKLITQRKFDNLTKAERGGLSELDKAGFIKRQLVETRQITKHVAQILDSRMNTKYDENDKLIREVKVITLKSKLVSDFRKDFQFYKVREINNYHHAHDAYLNAVVGTALIKKYPKLESEFVYGDYKVYDVRKMIAKSEQEIGKATAKYFFYSNIMNFFKTEITLANGEIRKRPLIETNGETGEIVWDKGRDFATVRKVLSMPQVNIVKKTEVQTGGFSKESILPKRNSDKLIARKKDWDPKKYGGFDSPTVAYSVLVVAKVEKGKSKKLKSVKELLGITIMERSSFEKNPIDFLEAKGYKEVKKDLIIKLPKYSLFELENGRKRMLASAGELQKGNELALPSKYVNFLYLASHYEKLKGSPEDNEQKQLFVEQHKHYLDEIIEQISEFSKRVILADANLDKVLSAYNKHRDKPIREQAENIIHLFTLTNLGAPAAFKYFDTTIDRKRYTSTKEVLDATLIHQSITGLYETRIDLSQLGGDGGGSSEAAAKGGSGGTLGDQGSRGSDPLPEPRVTLTVEGIPTEFLVNTGAEHSVLTKPMGKMGSKRTVVAGATGSKVYPWTTKRLLKIGQKQVTHSFLVIPECPAPLLGRDLLTKLKAQIQFSTEGPQVTWEDRPAMCLVLNLEEEYRLHEKPVPPSIDPSWLQLFPMVWAEKAGMGLANQVPPVVVELKSDASPVAVRQYPMSKEAREGIRPHIQRFLDLGILVPCQSPWNTPLLPVKKPGTNDYRPVQDLREVNKRVQDIHPTVPNPYNLLSSLPPSHTWYSVLDLKDAFFCLKLHPNSQPLFAFEWRDPEKGNTGQLTWTRLPQGFKNSPTLFNEALHRDLASFRALNPQVVMLQYVDDLLVAAPTYRDCKEGTRRLLQELSKLGYRVSAKKAQLCREEVTYLGYLLKGGKRWLTPARKATVMKIPTPTTPRQVREFLGTAGFCRLWIPGFASLAAPLYPLTRPKVPFTWTEAHQEAFGRIKEALLSAPALALPDLTKPFALYVDEKEGVARGVLTQTLGPWRRPVAYLSKKLDPVASGWPTCLKAIAAVALLLKDADKLTLGQNVLVIAPHNLESIVRQPPDRWMTNARMTHYQSLLLNERVSFAPPAILNPATLLPVESDDTPIHICSEILAEETGTRPDLRDQPLPGVPAWYTDGSSFIMDGRRQAGAAIVDNKRTVWASNLPEGTSAQKAELIALTQALRLAEGKSINIYTDSRYAFATAHVHGAIYKQRGWLTSAGKDIKNKEEILALLEAIHLPKRVAIIHCPGHQRGTDPVATGNRKADEAAKQAAQSTRILTETTKNAGKRTADGSEFEKRTADGSEFESPKKKAKVE

SEQ ID NO: 7085 - protein, 2096 aa, synthetic construct
MPAAKRVKLDGGDKKYSIGLDIGTNSVGWAVITDEYKVPSKKFKVLGNTDRHSIKKNLIGALLFDSGETAEATRLKRTARRRYTRRKNRICYLQEIFSNEMAKVDDSFFHRLEESFLVEEDKKHERHPIFGNIVDEVAYHEKYPTIYHLRKKLVDSTDKADLRLIYLALAHMIKFRGHFLIEGDLNPDNSDVDKLFIQLVQTYNQLFEENPINASGVDAKAILSARLSKSRRLENLIAQLPGEKKNGLFGNLIALSLGLTPNFKSNFDLAEDAKLQLSKDTYDDDLDNLLAQIGDQYADLFLAAKNLSDAILLSDILRVNTEITKAPLSASMIKRYDEHHQDLTLLKALVRQQLPEKYKEIFFDQSKNGYAGYIDGGASQEEFYKFIKPILEKMDGTEELLVKLNREDLLRKQRTFDNGSIPHQIHLGELHAILRRQEDFYPFLKDNREKIEKILTFRIPYYVGPLARGNSRFAWMTRKSEETITPWNFEEVVDKGASAQSFIERMTNFDKNLPNEKVLPKHSLLYEYFTVYNELTKVKYVTEGMRKPAFLSGEQKKAIVDLLFKTNRKVTVKQLKEDYFKKIECFDSVEISGVEDRFNASLGTYHDLLKIIKDKDFLDNEENEDILEDIVLTLTLFEDREMIEERLKTYAHLFDDKVMKQLKRRRYTGWGRLSRKLINGIRDKQSGKTILDFLKSDGFANRNFMQLIHDDSLTFKEDIQKAQVSGQGDSLHEHIANLAGSPAIKKGILQTVKVVDELVKVMGRHKPENIVIEMARENQTTQKGQKNSRERMKRIEEGIKELGSQILKEHPVENTQLQNEKLYLYYLQNGRDMYVDQELDINRLSDYDVDHIVPQSFLKDDSIDNKVLTRSDKARGKSDNVPSEEVVKKMKNYWRQLLNAKLITQRKFDNLTKAERGGLSELDKAGFIKRQLVETRQITKHVAQILDSRMNTKYDENDKLIREVKVITLKSKLVSDFRKDFQFYKVREINNYHHAHDAYLNAVVGTALIKKYPKLESEFVYGDYKVYDVRKMIAKSEQEIGKATAKYFFYSNIMNFFKTEITLANGEIRKRPLIETNGETGEIVWDKGRDFATVRKVLSMPQVNIVKKTEVQTGGFSKESILPKRNSDKLIARKKDWDPKKYGGFDSPTVAYSVLVVAKVEKGKSKKLKSVKELLGITIMERSSFEKNPIDFLEAKGYKEVKKDLIIKLPKYSLFELENGRKRMLASAGELQKGNELALPSKYVNFLYLASHYEKLKGSPEDNEQKQLFVEQHKHYLDEIIEQISEFSKRVILADANLDKVLSAYNKHRDKPIREQAENIIHLFTLTNLGAPAAFKYFDTTIDRKRYTSTKEVLDATLIHQSITGLYETRIDLSQLGGDGGGSSEAAAKGGSGGTLNLEDEYRLYETSAEPEVSPGSTWLSDFPQAWAETGGMGLAVRQAPLIIPLKATSTPVSIKQYPMSQEAKLGIKPHIQRLLDQGILVPCQSPWNTPLLPVKKPGTNDYRPVQDLREVNKRVEDIHPTVPNPYNLLSGLPPSHRWYTVLDLKDAFFCLRLHPTSQPLFAFEWRDPGMGISGQLTWTRLPQGFKNSPTLFNEALHRDLADFRIQHPDLILLQYVDDILLAATSELDCQQGTRALLLTLGNLGYRASAKKAQLCQKQVKYLGYLLKEGQRWLTEARKETVMGQPTPKTPRQLREFLGTAGFCRLWIPGFAEMAAPLYPLTKPGTLFNWGPDQQKAYQEIKQALLTAPALGLPDLTKPFELFVDEKQGYAKGVLTQKLGPWRRPVAYLSKKLDPVAAGWPPCLRMVAAIAVLRKDAGKLTMGQPLVILAPHAVEALVKQPPDRWLSNARMTHYQAMLLDTDRVQFGPVVALNPATLLPLPEEGAPHDCLEILAETHGTRPDLTDQPIPDADHTWYTDGSSFLQEGQRKAGAAVTTETEVIWARALPAGTSAQRAELIALTQALKMAEGKRLNVYTDSRYAFATAHIHGEIYRRRGWLTSEGREIKNKSEILALLKALFLPKRLSIIHCLGHQKGDSAEARGNRLADQAAREAAIKTPPDTSTLLAGKRTADGSEFEKRTADGSEFESPKKKAKVE

SEQ ID NO: 7086 - protein, 2096 aa, synthetic construct
MPAAKRVKLDGGDKKYSIGLDIGTNSVGWAVITDEYKVPSKKFKVLGNTDRHSIKKNLIGALLFDSGETAEATRLKRTARRRYTRRKNRICYLQEIFSNEMAKVDDSFFHRLEESFLVEEDKKHERHPIFGNIVDEVAYHEKYPTIYHLRKKLVDSTDKADLRLIYLALAHMIKFRGHFLIEGDLNPDNSDVDKLFIQLVQTYNQLFEENPINASGVDAKAILSARLSKSRRLENLIAQLPGEKKNGLFGNLIALSLGLTPNFKSNFDLAEDAKLQLSKDTYDDDLDNLLAQIGDQYADLFLAAKNLSDAILLSDILRVNTEITKAPLSASMIKRYDEHHQDLTLLKALVRQQLPEKYKEIFFDQSKNGYAGYIDGGASQEEFYKFIKPILEKMDGTEELLVKLNREDLLRKQRTFDNGSIPHQIHLGELHAILRRQEDFYPFLKDNREKIEKILTFRIPYYVGPLARGNSRFAWMTRKSEETITPWNFEEVVDKGASAQSFIERMTNFDKNLPNEKVLPKHSLLYEYFTVYNELTKVKYVTEGMRKPAFLSGEQKKAIVDLLFKTNRKVTVKQLKEDYFKKIECFDSVEISGVEDRFNASLGTYHDLLKIIKDKDFLDNEENEDILEDIVLTLTLFEDREMIEERLKTYAHLFDDKVMKQLKRRRYTGWGRLSRKLINGIRDKQSGKTILDFLKSDGFANRNFMQLIHDDSLTFKEDIQKAQVSGQGDSLHEHIANLAGSPAIKKGILQTVKVVDELVKVMGRHKPENIVIEMARENQTTQKGQKNSRERMKRIEEGIKELGSQILKEHPVENTQLQNEKLYLYYLQNGRDMYVDQELDINRLSDYDVDHIVPQSFLKDDSIDNKVLTRSDKARGKSDNVPSEEVVKKMKNYWRQLLNAKLITQRKFDNLTKAERGGLSELDKAGFIKRQLVETRQITKHVAQILDSRMNTKYDENDKLIREVKVITLKSKLVSDFRKDFQFYKVREINNYHHAHDAYLNAVVGTALIKKYPKLESEFVYGDYKVYDVRKMIAKSEQEIGKATAKYFFYSNIMNFFKTEITLANGEIRKRPLIETNGETGEIVWDKGRDFATVRKVLSMPQVNIVKKTEVQTGGFSKESILPKRNSDKLIARKKDWDPKKYGGFDSPTVAYSVLVVAKVEKGKSKKLKSVKELLGITIMERSSFEKNPIDFLEAKGYKEVKKDLIIKLPKYSLFELENGRKRMLASAGELQKGNELALPSKYVNFLYLASHYEKLKGSPEDNEQKQLFVEQHKHYLDEIIEQISEFSKRVILADANLDKVLSAYNKHRDKPIREQAENIIHLFTLTNLGAPAAFKYFDTTIDRKRYTSTKEVLDATLIHQSITGLYETRIDLSQLGGDGGGSSEAAAKGGSGGTLGIEDEYRLHETSTEPDVSLGSTWLSDFPQAWAETGGMGLAVRQAPLIIPLKATSTPVSIQQYPMSHEARLGIKPHIQRLLDQGILVPCQSPWNTPLLPVKKPGTNDYRPVQDLREVNKRVEDIHPTVPNPYNLLSGLPPSHQWYTVLDLKDAFFCLRLHPTSQPLFAFEWRDPGMGISGQLTWTRLPQGFKNSPTLFNEALHRDLADFRIQHPDLILLQYVDDILLAATSELDCQQGTRALLQTLGDLGYRASAKKAQICQKQVKYLGYLLREGQRWLTEARKETVMGQPVPKTPRQLREFLGTAGFCRLWIPGFAEMAAPLYPLTKPGTLFSWGPDQQKAYQEIKQALLTAPALGLPDLTKPFELFVDEKQGYAKGVLTQKLGPWRRPVAYLSKKLDPVAAGWPPCLRMVAAIAVLTKDAGKLTMGQPLVILAPHAVEALVKQPPDRWLSNARMTHYQAMLLDTDRVQFGPVVALNPATLLPLPEEGAPHDCLEILAETHGTRPDLTDQPIPDADHTWYTDGSSFLQEGQRKAGAAVTTETEVIWAGALPAGTSAQRAELIALTQALKMAEGKRLNVYTDSRYAFATAHIHGEIYRRRGWLTSEGREIKNKSEILALLKALFLPKRLSIIHCLGHQKGDSAEARGNRLADQAAREAAIKTPPDTSTLLAGKRTADGSEFEKRTADGSEFESPKKKAKVE

SEQ ID NO: 7087 - protein, 2096 aa, synthetic construct
MPAAKRVKLDGGDKKYSIGLDIGTNSVGWAVITDEYKVPSKKFKVLGNTDRHSIKKNLIGALLFDSGETAEATRLKRTARRRYTRRKNRICYLQEIFSNEMAKVDDSFFHRLEESFLVEEDKKHERHPIFGNIVDEVAYHEKYPTIYHLRKKLVDSTDKADLRLIYLALAHMIKFRGHFLIEGDLNPDNSDVDKLFIQLVQTYNQLFEENPINASGVDAKAILSARLSKSRRLENLIAQLPGEKKNGLFGNLIALSLGLTPNFKSNFDLAEDAKLQLSKDTYDDDLDNLLAQIGDQYADLFLAAKNLSDAILLSDILRVNTEITKAPLSASMIKRYDEHHQDLTLLKALVRQQLPEKYKEIFFDQSKNGYAGYIDGGASQEEFYKFIKPILEKMDGTEELLVKLNREDLLRKQRTFDNGSIPHQIHLGELHAILRRQEDFYPFLKDNREKIEKILTFRIPYYVGPLARGNSRFAWMTRKSEETITPWNFEEVVDKGASAQSFIERMTNFDKNLPNEKVLPKHSLLYEYFTVYNELTKVKYVTEGMRKPAFLSGEQKKAIVDLLFKTNRKVTVKQLKEDYFKKIECFDSVEISGVEDRFNASLGTYHDLLKIIKDKDFLDNEENEDILEDIVLTLTLFEDREMIEERLKTYAHLFDDKVMKQLKRRRYTGWGRLSRKLINGIRDKQSGKTILDFLKSDGFANRNFMQLIHDDSLTFKEDIQKAQVSGQGDSLHEHIANLAGSPAIKKGILQTVKVVDELVKVMGRHKPENIVIEMARENQTTQKGQKNSRERMKRIEEGIKELGSQILKEHPVENTQLQNEKLYLYYLQNGRDMYVDQELDINRLSDYDVDHIVPQSFLKDDSIDNKVLTRSDKARGKSDNVPSEEVVKKMKNYWRQLLNAKLITQRKFDNLTKAERGGLSELDKAGFIKRQLVETRQITKHVAQILDSRMNTKYDENDKLIREVKVITLKSKLVSDFRKDFQFYKVREINNYHHAHDAYLNAVVGTALIKKYPKLESEFVYGDYKVYDVRKMIAKSEQEIGKATAKYFFYSNIMNFFKTEITLANGEIRKRPLIETNGETGEIVWDKGRDFATVRKVLSMPQVNIVKKTEVQTGGFSKESILPKRNSDKLIARKKDWDPKKYGGFDSPTVAYSVLVVAKVEKGKSKKLKSVKELLGITIMERSSFEKNPIDFLEAKGYKEVKKDLIIKLPKYSLFELENGRKRMLASAGELQKGNELALPSKYVNFLYLASHYEKLKGSPEDNEQKQLFVEQHKHYLDEIIEQISEFSKRVILADANLDKVLSAYNKHRDKPIREQAENIIHLFTLTNLGAPAAFKYFDTTIDRKRYTSTKEVLDATLIHQSITGLYETRIDLSQLGGDGGGSSEAAAKGGSGGTLNIEDEYRLHETSKGPDVPLGSTWLSDFPQAWAETGGMGLAVRQAPLIIPLKATSTPVSIKQYPMSQEARLGIKPHIQRLLDQGILVPCQSPWNTPLLPVKKPGTNDYRPVQDLREVNKRVEDIHPTVPNPYNLLSGLPPSHQWYTVLDLKDAFFCLRLHPTSQSLFAFEWRDPEMGISGQLTWTRLPQGFKNSPTLFNEALHRDLADFRIQHPDLILLQYVDDLLLAATSELDCQQGTRALLQTLGDLGYRASAKKAQICQKQVKYLGYLLKEGQRWLTEARKETVMGQPTPKTPRQLREFLGTAGFCRLWIPGFAEMAAPLYPLTKPGTLFEWGPDQQKAYQEIKQALLTAPALGLPDLTKPFELFVDEKQGYAKGVLTQKLGPWRRPVAYLSKKLDPVAAGWPPCLRMVAAIAVLTKDAGKLTMGQPLVILAPHAVEALVKQPPDRWLSNARMTHYQALLLDTDRVQFGPIVALNPATLLPLPEEGLQHDCLDILAEAHGTRPDLTDQPLPDADHTWYTDGSSFLQEGQRKAGAAVTTETEVVWAKALPAGTSAQRAELIALTQALKMAEGKKLNVYTDSRYAFATAHIHGEIYRRRGWLTSEGKEIKNKDEILALLKALFLPKRLSIIHCPGHQKGNRAEARGNRMADQAAREVATRETPETSTLLAGKRTADGSEFEKRTADGSEFESPKKKAKVE

SEQ ID NO: 7088 - protein, 2096 aa, synthetic construct
MPAAKRVKLDGGDKKYSIGLDIGTNSVGWAVITDEYKVPSKKFKVLGNTDRHSIKKNLIGALLFDSGETAEATRLKRTARRRYTRRKNRICYLQEIFSNEMAKVDDSFFHRLEESFLVEEDKKHERHPIFGNIVDEVAYHEKYPTIYHLRKKLVDSTDKADLRLIYLALAHMIKFRGHFLIEGDLNPDNSDVDKLFIQLVQTYNQLFEENPINASGVDAKAILSARLSKSRRLENLIAQLPGEKKNGLFGNLIALSLGLTPNFKSNFDLAEDAKLQLSKDTYDDDLDNLLAQIGDQYADLFLAAKNLSDAILLSDILRVNTEITKAPLSASMIKRYDEHHQDLTLLKALVRQQLPEKYKEIFFDQSKNGYAGYIDGGASQEEFYKFIKPILEKMDGTEELLVKLNREDLLRKQRTFDNGSIPHQIHLGELHAILRRQEDFYPFLKDNREKIEKILTFRIPYYVGPLARGNSRFAWMTRKSEETITPWNFEEVVDKGASAQSFIERMTNFDKNLPNEKVLPKHSLLYEYFTVYNELTKVKYVTEGMRKPAFLSGEQKKAIVDLLFKTNRKVTVKQLKEDYFKKIECFDSVEISGVEDRFNASLGTYHDLLKIIKDKDFLDNEENEDILEDIVLTLTLFEDREMIEERLKTYAHLFDDKVMKQLKRRRYTGWGRLSRKLINGIRDKQSGKTILDFLKSDGFANRNFMQLIHDDSLTFKEDIQKAQVSGQGDSLHEHIANLAGSPAIKKGILQTVKVVDELVKVMGRHKPENIVIEMARENQTTQKGQKNSRERMKRIEEGIKELGSQILKEHPVENTQLQNEKLYLYYLQNGRDMYVDQELDINRLSDYDVDHIVPQSFLKDDSIDNKVLTRSDKARGKSDNVPSEEVVKKMKNYWRQLLNAKLITQRKFDNLTKAERGGLSELDKAGFIKRQLVETRQITKHVAQILDSRMNTKYDENDKLIREVKVITLKSKLVSDFRKDFQFYKVREINNYHHAHDAYLNAVVGTALIKKYPKLESEFVYGDYKVYDVRKMIAKSEQEIGKATAKYFFYSNIMNFFKTEITLANGEIRKRPLIETNGETGEIVWDKGRDFATVRKVLSMPQVNIVKKTEVQTGGFSKESILPKRNSDKLIARKKDWDPKKYGGFDSPTVAYSVLVVAKVEKGKSKKLKSVKELLGITIMERSSFEKNPIDFLEAKGYKEVKKDLIIKLPKYSLFELENGRKRMLASAGELQKGNELALPSKYVNFLYLASHYEKLKGSPEDNEQKQLFVEQHKHYLDEIIEQISEFSKRVILADANLDKVLSAYNKHRDKPIREQAENIIHLFTLTNLGAPAAFKYFDTTIDRKRYTSTKEVLDATLIHQSITGLYETRIDLSQLGGDGGGSSEAAAKGGSGGTLNIEDEHRLHETSKEPDVSLGSTWLSDFPQAWAETGGMGLAVRQAPLIIPLKATSTPVSIKQYPMSQEARLGIKPHIQRLLDQGILVPCQSPWNTPLLPVKKPGTNDYRPVQDLREVNKRVEDIHPTVPNPYNLLSGLPPSHQWYTVLDLKDAFFCLRLHPTSQPLFAFEWRDPEMGISGQLTWTRLPQGFKNSPTLFDEALHRDLADFRIQHPDLILLQYVDDLLLAATSELDCQQGTRALLQTLGNLGYRASAKKAQICQKQVKYLGYLLKEGQRWLTEARKETVMGQPTPKTPRQLREFLGTAGFCRLWIPGFAEMAAPLYPLTKTGTLFNWGPDQQKAYQEIKQALLTAPALGLPDLTKPFELFVDEKQGYAKGVLTQKLGPWRRPVAYLSKKLDPVAAGWPPCLRMVAAIAVLTKDAGKLTMGQPLVILAPHAVEALVKQPPDRWLSNARMTHYQALLLDTDRVQFGPVVALNPATLLPLPEEGLQHNCLDILAEAHGTRPDLTDQPLPDADHTWYTDGSSLLQEGQRKAGAAVTTETEVIWAKALPAGTSAQRAELIALTQALKMAEGKKLNVYTDSRYAFATAHIHGEIYRRRGLLTSEGKEIKNKDEILALLKALFLPKRLSIIHCPGHQKGHSAEARGNRMADQAARKAAITETPDTSTLLAGKRTADGSEFEKRTADGSEFESPKKKAKVE

SEQ ID NO: 7089 - protein, 2096 aa, synthetic construct
MPAAKRVKLDGGDKKYSIGLDIGTNSVGWAVITDEYKVPSKKFKVLGNTDRHSIKKNLIGALLFDSGETAEATRLKRTARRRYTRRKNRICYLQEIFSNEMAKVDDSFFHRLEESFLVEEDKKHERHPIFGNIVDEVAYHEKYPTIYHLRKKLVDSTDKADLRLIYLALAHMIKFRGHFLIEGDLNPDNSDVDKLFIQLVQTYNQLFEENPINASGVDAKAILSARLSKSRRLENLIAQLPGEKKNGLFGNLIALSLGLTPNFKSNFDLAEDAKLQLSKDTYDDDLDNLLAQIGDQYADLFLAAKNLSDAILLSDILRVNTEITKAPLSASMIKRYDEHHQDLTLLKALVRQQLPEKYKEIFFDQSKNGYAGYIDGGASQEEFYKFIKPILEKMDGTEELLVKLNREDLLRKQRTFDNGSIPHQIHLGELHAILRRQEDFYPFLKDNREKIEKILTFRIPYYVGPLARGNSRFAWMTRKSEETITPWNFEEVVDKGASAQSFIERMTNFDKNLPNEKVLPKHSLLYEYFTVYNELTKVKYVTEGMRKPAFLSGEQKKAIVDLLFKTNRKVTVKQLKEDYFKKIECFDSVEISGVEDRFNASLGTYHDLLKIIKDKDFLDNEENEDILEDIVLTLTLFEDREMIEERLKTYAHLFDDKVMKQLKRRRYTGWGRLSRKLINGIRDKQSGKTILDFLKSDGFANRNFMQLIHDDSLTFKEDIQKAQVSGQGDSLHEHIANLAGSPAIKKGILQTVKVVDELVKVMGRHKPENIVIEMARENQTTQKGQKNSRERMKRIEEGIKELGSQILKEHPVENTQLQNEKLYLYYLQNGRDMYVDQELDINRLSDYDVDHIVPQSFLKDDSIDNKVLTRSDKARGKSDNVPSEEVVKKMKNYWRQLLNAKLITQRKFDNLTKAERGGLSELDKAGFIKRQLVETRQITKHVAQILDSRMNTKYDENDKLIREVKVITLKSKLVSDFRKDFQFYKVREINNYHHAHDAYLNAVVGTALIKKYPKLESEFVYGDYKVYDVRKMIAKSEQEIGKATAKYFFYSNIMNFFKTEITLANGEIRKRPLIETNGETGEIVWDKGRDFATVRKVLSMPQVNIVKKTEVQTGGFSKESILPKRNSDKLIARKKDWDPKKYGGFDSPTVAYSVLVVAKVEKGKSKKLKSVKELLGITIMERSSFEKNPIDFLEAKGYKEVKKDLIIKLPKYSLFELENGRKRMLASAGELQKGNELALPSKYVNFLYLASHYEKLKGSPEDNEQKQLFVEQHKHYLDEIIEQISEFSKRVILADANLDKVLSAYNKHRDKPIREQAENIIHLFTLTNLGAPAAFKYFDTTIDRKRYTSTKEVLDATLIHQSITGLYETRIDLSQLGGDGGGSSEAAAKGGSGGTLNIEDEHRLHETSKEPDVSLGSTWLSDFPQAWAETGGMGLAVRQAPLIIPLKATSTPVSIKQYPMSQEARLGIKPHIQRLLDQGILVPCQSPWNTPLLPVKKPGTNDYRPVQDLREVNKRVEDIHPTVPNPYNLLSGLPPSHQWYTVLDLKDAFFCLRLHPTSQPLFAFEWRDPEMGISGQLTWTRLPQGFKNSPTLFNEALHRDLADFRIQHPDLILLQYVDDLLLAATSELDCQQGTRALLQTLGNLGYRASAKKAQICQKQVKYLGYLLKEGQRWLTEARKETVMGQPTPKTPRQLREFLGTAGFCRLWIPGFAEMAAPLYPLTKPGTLFNWGPDQQKAYQEIKQALLTAPALGLPDLTKPFELFVDEKQGYAKGVLTQKLGPWRRPVAYLSKKLDPVAAGWPPCLRMVAAIAVLTKDAGKLTMGQPLVILAPHAVEALVKQPPDRWLSNARMTHYQALLLDTDRVQFGPVVALNPATLLPLPEEGLQHNCLDILAEAHGTRPDLTDQPLPDADHTWYTDGSSLLQEGQRKAGAAVTTETEVIWAKALPAGTSAQRAELIALTQALKMAEGKKLNVYTDSRYAFATAHIHGEIYRRRGWLTSEGKEIKNKDEILALLKALFLPKRLSIIHCPGHQKGHSAEARGNRMADQAARKAAITETPDTSTLLAGKRTADGSEFEKRTADGSEFESPKKKAKVE

SEQ ID NO: 7090 - protein, 2087 aa, synthetic construct
MPAAKRVKLDGGDKKYSIGLDIGTNSVGWAVITDEYKVPSKKFKVLGNTDRHSIKKNLIGALLFDSGETAEATRLKRTARRRYTRRKNRICYLQEIFSNEMAKVDDSFFHRLEESFLVEEDKKHERHPIFGNIVDEVAYHEKYPTIYHLRKKLVDSTDKADLRLIYLALAHMIKFRGHFLIEGDLNPDNSDVDKLFIQLVQTYNQLFEENPINASGVDAKAILSARLSKSRRLENLIAQLPGEKKNGLFGNLIALSLGLTPNFKSNFDLAEDAKLQLSKDTYDDDLDNLLAQIGDQYADLFLAAKNLSDAILLSDILRVNTEITKAPLSASMIKRYDEHHQDLTLLKALVRQQLPEKYKEIFFDQSKNGYAGYIDGGASQEEFYKFIKPILEKMDGTEELLVKLNREDLLRKQRTFDNGSIPHQIHLGELHAILRRQEDFYPFLKDNREKIEKILTFRIPYYVGPLARGNSRFAWMTRKSEETITPWNFEEVVDKGASAQSFIERMTNFDKNLPNEKVLPKHSLLYEYFTVYNELTKVKYVTEGMRKPAFLSGEQKKAIVDLLFKTNRKVTVKQLKEDYFKKIECFDSVEISGVEDRFNASLGTYHDLLKIIKDKDFLDNEENEDILEDIVLTLTLFEDREMIEERLKTYAHLFDDKVMKQLKRRRYTGWGRLSRKLINGIRDKQSGKTILDFLKSDGFANRNFMQLIHDDSLTFKEDIQKAQVSGQGDSLHEHIANLAGSPAIKKGILQTVKVVDELVKVMGRHKPENIVIEMARENQTTQKGQKNSRERMKRIEEGIKELGSQILKEHPVENTQLQNEKLYLYYLQNGRDMYVDQELDINRLSDYDVDHIVPQSFLKDDSIDNKVLTRSDKARGKSDNVPSEEVVKKMKNYWRQLLNAKLITQRKFDNLTKAERGGLSELDKAGFIKRQLVETRQITKHVAQILDSRMNTKYDENDKLIREVKVITLKSKLVSDFRKDFQFYKVREINNYHHAHDAYLNAVVGTALIKKYPKLESEFVYGDYKVYDVRKMIAKSEQEIGKATAKYFFYSNIMNFFKTEITLANGEIRKRPLIETNGETGEIVWDKGRDFATVRKVLSMPQVNIVKKTEVQTGGFSKESILPKRNSDKLIARKKDWDPKKYGGFDSPTVAYSVLVVAKVEKGKSKKLKSVKELLGITIMERSSFEKNPIDFLEAKGYKEVKKDLIIKLPKYSLFELENGRKRMLASAGELQKGNELALPSKYVNFLYLASHYEKLKGSPEDNEQKQLFVEQHKHYLDEIIEQISEFSKRVILADANLDKVLSAYNKHRDKPIREQAENIIHLFTLTNLGAPAAFKYFDTTIDRKRYTSTKEVLDATLIHQSITGLYETRIDLSQLGGDGGGSSEAAAKGGSGGVPWLMKKPLQLTVLVPLHEYQERLLQQTALPKEQKELLQKLFLKYDALWQHWENQVGHRRIKPHNIATGTLAPRPQKQYPINPKAKPSIQIVIDDLLKQGVLIQQNSTMNTPVYPVPKPDGKWRMVLDYREVNKTIPLIAAQNQHSAGILSSIYRGKYKTTLDLTNGFWAHPITPESYWLTAFTWQGKQYCWTRLPQGFLNSPALFTADVVDLLKEIPNVQAYVDDIYISHDDPQEHLEQLEKIFSILLNAGYVVSLKKSEIAQREVEFLGFNITKEGRGLTDTFKQKLLNITPPKDLKQLQSILGLLNFARNFIPNYSELVKPLYTIVANANGKFISWTEDNSNQLQHIISVLNQADNLEERNPETRLIIKVNSSPSAGYIRYYNEGSKRPIMYVNYIFSKAEAKFTQTEKLLTTMHKGLIKAMDLAMGQEILVYSPIVSMTKIQRTPLPERKALPVRWITWMTYLEDPRIQFHYDKSLPELQQIPNVTEDVIAKTKHPSEFAMVFYTDGSAIKHPDVNKSHSAGMGIAQVQFIPEYKIVHQWSIPLGDHTAQLAEIAAVEFACKKALKISGPVLIVTDSFYVAESANKELPYWKSNGFLNNKKKPLRHVSKWKSIAECLQLKPDIIIMHEKGHQQPMTTLHTEGNNLADKLATQGSYVVHAGKRTADGSEFEKRTADGSEFESPKKKAKVE

SEQ ID NO: 7091 - protein, 2087 aa, synthetic construct
MPAAKRVKLDGGDKKYSIGLDIGTNSVGWAVITDEYKVPSKKFKVLGNTDRHSIKKNLIGALLFDSGETAEATRLKRTARRRYTRRKNRICYLQEIFSNEMAKVDDSFFHRLEESFLVEEDKKHERHPIFGNIVDEVAYHEKYPTIYHLRKKLVDSTDKADLRLIYLALAHMIKFRGHFLIEGDLNPDNSDVDKLFIQLVQTYNQLFEENPINASGVDAKAILSARLSKSRRLENLIAQLPGEKKNGLFGNLIALSLGLTPNFKSNFDLAEDAKLQLSKDTYDDDLDNLLAQIGDQYADLFLAAKNLSDAILLSDILRVNTEITKAPLSASMIKRYDEHHQDLTLLKALVRQQLPEKYKEIFFDQSKNGYAGYIDGGASQEEFYKFIKPILEKMDGTEELLVKLNREDLLRKQRTFDNGSIPHQIHLGELHAILRRQEDFYPFLKDNREKIEKILTFRIPYYVGPLARGNSRFAWMTRKSEETITPWNFEEVVDKGASAQSFIERMTNFDKNLPNEKVLPKHSLLYEYFTVYNELTKVKYVTEGMRKPAFLSGEQKKAIVDLLFKTNRKVTVKQLKEDYFKKIECFDSVEISGVEDRFNASLGTYHDLLKIIKDKDFLDNEENEDILEDIVLTLTLFEDREMIEERLKTYAHLFDDKVMKQLKRRRYTGWGRLSRKLINGIRDKQSGKTILDFLKSDGFANRNFMQLIHDDSLTFKEDIQKAQVSGQGDSLHEHIANLAGSPAIKKGILQTVKVVDELVKVMGRHKPENIVIEMARENQTTQKGQKNSRERMKRIEEGIKELGSQILKEHPVENTQLQNEKLYLYYLQNGRDMYVDQELDINRLSDYDVDHIVPQSFLKDDSIDNKVLTRSDKARGKSDNVPSEEVVKKMKNYWRQLLNAKLITQRKFDNLTKAERGGLSELDKAGFIKRQLVETRQITKHVAQILDSRMNTKYDENDKLIREVKVITLKSKLVSDFRKDFQFYKVREINNYHHAHDAYLNAVVGTALIKKYPKLESEFVYGDYKVYDVRKMIAKSEQEIGKATAKYFFYSNIMNFFKTEITLANGEIRKRPLIETNGETGEIVWDKGRDFATVRKVLSMPQVNIVKKTEVQTGGFSKESILPKRNSDKLIARKKDWDPKKYGGFDSPTVAYSVLVVAKVEKGKSKKLKSVKELLGITIMERSSFEKNPIDFLEAKGYKEVKKDLIIKLPKYSLFELENGRKRMLASAGELQKGNELALPSKYVNFLYLASHYEKLKGSPEDNEQKQLFVEQHKHYLDEIIEQISEFSKRVILADANLDKVLSAYNKHRDKPIREQAENIIHLFTLTNLGAPAAFKYFDTTIDRKRYTSTKEVLDATLIHQSITGLYETRIDLSQLGGDGGGSSEAAAKGGSGGIPWLMKKPLQLTTLVPLQEYEERLLKQTMLTGSYKEKLQSLFLKYDALWQHWENQVGHRRIKPHHIATGTVNPRPQKQYPINPKAKASIQTVINDLLKQGVLIQQNSIMNTPVYPVPKPDGKWRMVLDYREVNKTIPLIAAQNQHSAGILSSIFRGKYKTTLDLSNGFWAHSITPESYWLTAFTWLGQQYCWTRLPQGFLNSPALFNADVVDLLKEVPNVQVYVDDIYISHDDPREHLEQLEKVFSLLLNAGYVVSLKKSEIAQHEVEFLGFNITKEGRGLTETFKQKLLNITPPRDLKQLQSILGLLNFARNFIPNFSELVKPLYNIIATAPGKYITWTTDNSQQLQNIISMLNSAENLEERNPEVRLIMKVNTSPSAGYIRFYNEFAKRPIMYLNYVYTKAEVKFTNTEKLLTTIHKGLIKALDLGMGQEILVYSPIVSMTKIQKTPLPERKALPIRWITWMSYLEDPRIQFHYDKTLPELQQVPTVTDDIIAKIKHPSEFSMVFYTDGSAIKHPNVNKSHNAGMGIAQVQFKPEFTVINTWSIPLGDHTAQLAEVAAVEFACKKALKIDGPVLIVTDSFYVAESVNKELPYWQSNGFFNNKKKPLKHVSKWKSIADCIQLKPDIIIIHEKGHQPTASTFHTEGNNLADKLATQGSYVVNAGKRTADGSEFEKRTADGSEFESPKKKAKVE

SEQ ID NO: 7092 - protein, 2087 aa, synthetic construct
MPAAKRVKLDGGDKKYSIGLDIGTNSVGWAVITDEYKVPSKKFKVLGNTDRHSIKKNLIGALLFDSGETAEATRLKRTARRRYTRRKNRICYLQEIFSNEMAKVDDSFFHRLEESFLVEEDKKHERHPIFGNIVDEVAYHEKYPTIYHLRKKLVDSTDKADLRLIYLALAHMIKFRGHFLIEGDLNPDNSDVDKLFIQLVQTYNQLFEENPINASGVDAKAILSARLSKSRRLENLIAQLPGEKKNGLFGNLIALSLGLTPNFKSNFDLAEDAKLQLSKDTYDDDLDNLLAQIGDQYADLFLAAKNLSDAILLSDILRVNTEITKAPLSASMIKRYDEHHQDLTLLKALVRQQLPEKYKEIFFDQSKNGYAGYIDGGASQEEFYKFIKPILEKMDGTEELLVKLNREDLLRKQRTFDNGSIPHQIHLGELHAILRRQEDFYPFLKDNREKIEKILTFRIPYYVGPLARGNSRFAWMTRKSEETITPWNFEEVVDKGASAQSFIERMTNFDKNLPNEKVLPKHSLLYEYFTVYNELTKVKYVTEGMRKPAFLSGEQKKAIVDLLFKTNRKVTVKQLKEDYFKKIECFDSVEISGVEDRFNASLGTYHDLLKIIKDKDFLDNEENEDILEDIVLTLTLFEDREMIEERLKTYAHLFDDKVMKQLKRRRYTGWGRLSRKLINGIRDKQSGKTILDFLKSDGFANRNFMQLIHDDSLTFKEDIQKAQVSGQGDSLHEHIANLAGSPAIKKGILQTVKVVDELVKVMGRHKPENIVIEMARENQTTQKGQKNSRERMKRIEEGIKELGSQILKEHPVENTQLQNEKLYLYYLQNGRDMYVDQELDINRLSDYDVDHIVPQSFLKDDSIDNKVLTRSDKARGKSDNVPSEEVVKKMKNYWRQLLNAKLITQRKFDNLTKAERGGLSELDKAGFIKRQLVETRQITKHVAQILDSRMNTKYDENDKLIREVKVITLKSKLVSDFRKDFQFYKVREINNYHHAHDAYLNAVVGTALIKKYPKLESEFVYGDYKVYDVRKMIAKSEQEIGKATAKYFFYSNIMNFFKTEITLANGEIRKRPLIETNGETGEIVWDKGRDFATVRKVLSMPQVNIVKKTEVQTGGFSKESILPKRNSDKLIARKKDWDPKKYGGFDSPTVAYSVLVVAKVEKGKSKKLKSVKELLGITIMERSSFEKNPIDFLEAKGYKEVKKDLIIKLPKYSLFELENGRKRMLASAGELQKGNELALPSKYVNFLYLASHYEKLKGSPEDNEQKQLFVEQHKHYLDEIIEQISEFSKRVILADANLDKVLSAYNKHRDKPIREQAENIIHLFTLTNLGAPAAFKYFDTTIDRKRYTSTKEVLDATLIHQSITGLYETRIDLSQLGGDGGGSSEAAAKGGSGGIPWLMKKPLQLTTLVPLQEYEERLLKQTMLTGSYKEKLQSLFLKYDALWQHWENQVGHRRIKPHHIATGTVNPRPQKQYPINPKAKASIQTVINDLLKQGVLIQQNSIMNTPVYPVPKPDGKWRMVLDYREVNKTIPLIAAQNQHSAGILSSIFRGKYKTTLDLSNGFWAHSITPESYWLTAFTWLGQQYCWTRLPQGFLNSPALFNADVVDLLKEVPNVQVYVDDIYISHDDPREHLEQLEKVFSLLLNAGYVVSLKKSEIAQHEVEFLGFNITKEGRGLTETFKQKLLNITPPRDLKQLQSILGKLNFARNFIPNFSELVKPLYNIIATAPGKYITWTTDNSQQLQNIISMLNSAENLEERNPEVRLIMKVNTSPSAGYIRFYNEFAKRPIMYLNYVYTKAEVKFTNTEKLLTTIHKGLIKALDLGMGQEILVYSPIVSMTKIQKTPLPERKALPIRWITWMSYLEDPRIQFHYDKTLPELQQVPTVTDDIIAKIKHPSEFSMVFYTDGSAIKHPNVNKSHNAGMGIAQVQFKPEFTVINTWSIPLGDHTAQLAEVAAVEFACKKALKIDGPVLIVTDSFYVAESVNKELPYWQSNGFFNNKKKPLKHVSKWKSIADCIQLKPDIIIIHEKGHQPTASTFHTEGNNLADKLATQGSYVVNAGKRTADGSEFEKRTADGSEFESPKKKAKVE

SEQ ID NO: 7093 - protein, 2094 aa, synthetic construct
MPAAKRVKLDGGDKKYSIGLDIGTNSVGWAVITDEYKVPSKKFKVLGNTDRHSIKKNLIGALLFDSGETAEATRLKRTARRRYTRRKNRICYLQEIFSNEMAKVDDSFFHRLEESFLVEEDKKHERHPIFGNIVDEVAYHEKYPTIYHLRKKLVDSTDKADLRLIYLALAHMIKFRGHFLIEGDLNPDNSDVDKLFIQLVQTYNQLFEENPINASGVDAKAILSARLSKSRRLENLIAQLPGEKKNGLFGNLIALSLGLTPNFKSNFDLAEDAKLQLSKDTYDDDLDNLLAQIGDQYADLFLAAKNLSDAILLSDILRVNTEITKAPLSASMIKRYDEHHQDLTLLKALVRQQLPEKYKEIFFDQSKNGYAGYIDGGASQEEFYKFIKPILEKMDGTEELLVKLNREDLLRKQRTFDNGSIPHQIHLGELHAILRRQEDFYPFLKDNREKIEKILTFRIPYYVGPLARGNSRFAWMTRKSEETITPWNFEEVVDKGASAQSFIERMTNFDKNLPNEKVLPKHSLLYEYFTVYNELTKVKYVTEGMRKPAFLSGEQKKAIVDLLFKTNRKVTVKQLKEDYFKKIECFDSVEISGVEDRFNASLGTYHDLLKIIKDKDFLDNEENEDILEDIVLTLTLFEDREMIEERLKTYAHLFDDKVMKQLKRRRYTGWGRLSRKLINGIRDKQSGKTILDFLKSDGFANRNFMQLIHDDSLTFKEDIQKAQVSGQGDSLHEHIANLAGSPAIKKGILQTVKVVDELVKVMGRHKPENIVIEMARENQTTQKGQKNSRERMKRIEEGIKELGSQILKEHPVENTQLQNEKLYLYYLQNGRDMYVDQELDINRLSDYDVDHIVPQSFLKDDSIDNKVLTRSDKARGKSDNVPSEEVVKKMKNYWRQLLNAKLITQRKFDNLTKAERGGLSELDKAGFIKRQLVETRQITKHVAQILDSRMNTKYDENDKLIREVKVITLKSKLVSDFRKDFQFYKVREINNYHHAHDAYLNAVVGTALIKKYPKLESEFVYGDYKVYDVRKMIAKSEQEIGKATAKYFFYSNIMNFFKTEITLANGEIRKRPLIETNGETGEIVWDKGRDFATVRKVLSMPQVNIVKKTEVQTGGFSKESILPKRNSDKLIARKKDWDPKKYGGFDSPTVAYSVLVVAKVEKGKSKKLKSVKELLGITIMERSSFEKNPIDFLEAKGYKEVKKDLIIKLPKYSLFELENGRKRMLASAGELQKGNELALPSKYVNFLYLASHYEKLKGSPEDNEQKQLFVEQHKHYLDEIIEQISEFSKRVILADANLDKVLSAYNKHRDKPIREQAENIIHLFTLTNLGAPAAFKYFDTTIDRKRYTSTKEVLDATLIHQSITGLYETRIDLSQLGGDGGGSSEAAAKGGSGGVLNLEEEYRLHEKPVPSSIDPSWLQLFPTVWAERAGMGLANQVPPVVVELRSGASPVAVRQYPMSKEAREGIRPHIQRFLDLGVLVPCQSPWNTPLLPVKKPGTNDYRPVQDLREINKRVQDIHPTVPNPYNLLSSLPPSHTWYSVLDLKDAFFCLKLHPNSQPLFAFEWRDPEKGNTGQLTWTRLPQGFKNSPTLFNEALHRDLAPFRALNPQVVLLQYVDDLLVAAPTYRDCKEGTQKLLQELSKLGYRVSAKKAQLCQKEVTYLGYLLKEGKRWLTPARKATVMKIPPPTTPRQVREFLGKAGFCRLFIPGFASLAAPLYPLTKPSIPFIWTEEHQKAFDRIKEALLSAPALALPDLTKPFTLYVDERAGVARGVLTQTLGPWRRPVAYLSKKLDPVASGWPTCLKAVAAVALLLKDADKLTLGQNVTVIASHSLESIVRQPPDRWMTNARMTHYQSLLLNERVSFAPPAVLNPATLLPVESEATPVHRCSEILAEETGTRRDLKDQPLPGVPAWYTDGSSFIAEGKRRAGAAIVDGKRTVWASSLPEGTSAQKAELVALTQALRLAEGKDINIYTDSRYAFATAHIHGAIYKQRGWLTSAGKDIKNKEEILALLEAIHLPKRVAIIHCPGHQKGNDPVATGNRRADEAAKQAALSTRVLAETTKPAGKRTADGSEFEKRTADGSEFESPKKKAKVE

SEQ ID NO: 7094 - protein, 2096 aa, synthetic construct
MPAAKRVKLDGGDKKYSIGLDIGTNSVGWAVITDEYKVPSKKFKVLGNTDRHSIKKNLIGALLFDSGETAEATRLKRTARRRYTRRKNRICYLQEIFSNEMAKVDDSFFHRLEESFLVEEDKKHERHPIFGNIVDEVAYHEKYPTIYHLRKKLVDSTDKADLRLIYLALAHMIKFRGHFLIEGDLNPDNSDVDKLFIQLVQTYNQLFEENPINASGVDAKAILSARLSKSRRLENLIAQLPGEKKNGLFGNLIALSLGLTPNFKSNFDLAEDAKLQLSKDTYDDDLDNLLAQIGDQYADLFLAAKNLSDAILLSDILRVNTEITKAPLSASMIKRYDEHHQDLTLLKALVRQQLPEKYKEIFFDQSKNGYAGYIDGGASQEEFYKFIKPILEKMDGTEELLVKLNREDLLRKQRTFDNGSIPHQIHLGELHAILRRQEDFYPFLKDNREKIEKILTFRIPYYVGPLARGNSRFAWMTRKSEETITPWNFEEVVDKGASAQSFIERMTNFDKNLPNEKVLPKHSLLYEYFTVYNELTKVKYVTEGMRKPAFLSGEQKKAIVDLLFKTNRKVTVKQLKEDYFKKIECFDSVEISGVEDRFNASLGTYHDLLKIIKDKDFLDNEENEDILEDIVLTLTLFEDREMIEERLKTYAHLFDDKVMKQLKRRRYTGWGRLSRKLINGIRDKQSGKTILDFLKSDGFANRNFMQLIHDDSLTFKEDIQKAQVSGQGDSLHEHIANLAGSPAIKKGILQTVKVVDELVKVMGRHKPENIVIEMARENQTTQKGQKNSRERMKRIEEGIKELGSQILKEHPVENTQLQNEKLYLYYLQNGRDMYVDQELDINRLSDYDVDHIVPQSFLKDDSIDNKVLTRSDKARGKSDNVPSEEVVKKMKNYWRQLLNAKLITQRKFDNLTKAERGGLSELDKAGFIKRQLVETRQITKHVAQILDSRMNTKYDENDKLIREVKVITLKSKLVSDFRKDFQFYKVREINNYHHAHDAYLNAVVGTALIKKYPKLESEFVYGDYKVYDVRKMIAKSEQEIGKATAKYFFYSNIMNFFKTEITLANGEIRKRPLIETNGETGEIVWDKGRDFATVRKVLSMPQVNIVKKTEVQTGGFSKESILPKRNSDKLIARKKDWDPKKYGGFDSPTVAYSVLVVAKVEKGKSKKLKSVKELLGITIMERSSFEKNPIDFLEAKGYKEVKKDLIIKLPKYSLFELENGRKRMLASAGELQKGNELALPSKYVNFLYLASHYEKLKGSPEDNEQKQLFVEQHKHYLDEIIEQISEFSKRVILADANLDKVLSAYNKHRDKPIREQAENIIHLFTLTNLGAPAAFKYFDTTIDRKRYTSTKEVLDATLIHQSITGLYETRIDLSQLGGDGGGSSEAAAKGGSGGTLNIEDEYRLHETSKEPDVPLGSTWLSDFPQAWAETGGMGLAVRQAPLIIPLKATSTPVSIKQYPMSQEARLGIKPHIQRLLDQGILVPCQSPWNTPLLPVKKPGTNDYRPVQDLREVNKRVEDIHPTVPNPYNLLSGLPPSHQWYTVLDLKDAFFCLRLHPTSQPLFAFEWRDPEMGISGQLTWTRLPQGFKNSPTLFDEALHRDLADFRIQHPDLILLQYVDDLLLAATSEQDCQRGTRALLQTLGNLGYRASAKKAQICQKQVKYLGYLLKEGQRWLTEARKETVMGQPTPKTPRQLREFLGTAGFCRLWIPGFAEMAAPLYPLTKTGTLFNWGPDQQKAYQEIKQALLTAPALGLPDLTKPFELFVDEKQGYAKGVLTQKLGPWRRPVAYLSKKLDPVAAGWPPCLRMVAAIAVLTKDAGKLTMGQPLVILAPHAVEALVKQPPDRWLSNARMTHYQAMLLDTDRVQFGPVVALNPATLLPLPEKEAPHDCLEILAETHGTRPDLTDQPIPDADYTWYTDGSSFLQEGQRRAGAAVTTETEVIWARALPAGTSAQRAELIALTQALKMAEGKKLNVYTDSRYAFATAHVHGEIYRRRGLLTSEGREIKNKNEILALLKALFLPKRLSIIHCPGHQKGNSAEARGNRMADQAAREAAMKAVLETSTLLAGKRTADGSEFEKRTADGSEFESPKKKAKVE

SEQ ID NO: 7095 - protein, 2096 aa, synthetic construct
MPAAKRVKLDGGDKKYSIGLDIGTNSVGWAVITDEYKVPSKKFKVLGNTDRHSIKKNLIGALLFDSGETAEATRLKRTARRRYTRRKNRICYLQEIFSNEMAKVDDSFFHRLEESFLVEEDKKHERHPIFGNIVDEVAYHEKYPTIYHLRKKLVDSTDKADLRLIYLALAHMIKFRGHFLIEGDLNPDNSDVDKLFIQLVQTYNQLFEENPINASGVDAKAILSARLSKSRRLENLIAQLPGEKKNGLFGNLIALSLGLTPNFKSNFDLAEDAKLQLSKDTYDDDLDNLLAQIGDQYADLFLAAKNLSDAILLSDILRVNTEITKAPLSASMIKRYDEHHQDLTLLKALVRQQLPEKYKEIFFDQSKNGYAGYIDGGASQEEFYKFIKPILEKMDGTEELLVKLNREDLLRKQRTFDNGSIPHQIHLGELHAILRRQEDFYPFLKDNREKIEKILTFRIPYYVGPLARGNSRFAWMTRKSEETITPWNFEEVVDKGASAQSFIERMTNFDKNLPNEKVLPKHSLLYEYFTVYNELTKVKYVTEGMRKPAFLSGEQKKAIVDLLFKTNRKVTVKQLKEDYFKKIECFDSVEISGVEDRFNASLGTYHDLLKIIKDKDFLDNEENEDILEDIVLTLTLFEDREMIEERLKTYAHLFDDKVMKQLKRRRYTGWGRLSRKLINGIRDKQSGKTILDFLKSDGFANRNFMQLIHDDSLTFKEDIQKAQVSGQGDSLHEHIANLAGSPAIKKGILQTVKVVDELVKVMGRHKPENIVIEMARENQTTQKGQKNSRERMKRIEEGIKELGSQILKEHPVENTQLQNEKLYLYYLQNGRDMYVDQELDINRLSDYDVDHIVPQSFLKDDSIDNKVLTRSDKARGKSDNVPSEEVVKKMKNYWRQLLNAKLITQRKFDNLTKAERGGLSELDKAGFIKRQLVETRQITKHVAQILDSRMNTKYDENDKLIREVKVITLKSKLVSDFRKDFQFYKVREINNYHHAHDAYLNAVVGTALIKKYPKLESEFVYGDYKVYDVRKMIAKSEQEIGKATAKYFFYSNIMNFFKTEITLANGEIRKRPLIETNGETGEIVWDKGRDFATVRKVLSMPQVNIVKKTEVQTGGFSKESILPKRNSDKLIARKKDWDPKKYGGFDSPTVAYSVLVVAKVEKGKSKKLKSVKELLGITIMERSSFEKNPIDFLEAKGYKEVKKDLIIKLPKYSLFELENGRKRMLASAGELQKGNELALPSKYVNFLYLASHYEKLKGSPEDNEQKQLFVEQHKHYLDEIIEQISEFSKRVILADANLDKVLSAYNKHRDKPIREQAENIIHLFTLTNLGAPAAFKYFDTTIDRKRYTSTKEVLDATLIHQSITGLYETRIDLSQLGGDGGGSSEAAAKGGSGGTLNIEDEYRLHETSKEPDVPLGSTWLSDFPQAWAETGGMGLAVRQAPLIIPLKATSTPVSIKQYPMSQEARLGIKPHIQRLLDQGILVPCQSPWNTPLLPVKKPGTNDYRPVQDLREVNKRVEDIHPTVPNPYNLLSGLPPSHQWYTVLDLKDAFFCLRLHPTSQPLFAFEWRDPEMGISGQLTWTRLPQGFKNSPTLFNEALHRDLADFRIQHPDLILLQYVDDLLLAATSEQDCQRGTRALLQTLGNLGYRASAKKAQICQKQVKYLGYLLKEGQRWLTEARKETVMGQPTPKTPRQLREFLGTAGFCRLWIPGFAEMAAPLYPLTKPGTLFNWGPDQQKAYQEIKQALLTAPALGLPDLTKPFELFVDEKQGYAKGVLTQKLGPWRRPVAYLSKKLDPVAAGWPPCLRMVAAIAVLTKDAGKLTMGQPLVILAPHAVEALVKQPPDRWLSNARMTHYQAMLLDTDRVQFGPVVALNPATLLPLPEKEAPHDCLEILAETHGTRPDLTDQPIPDADYTWYTDGSSFLQEGQRRAGAAVTTETEVIWARALPAGTSAQRAELIALTQALKMAEGKKLNVYTDSRYAFATAHVHGEIYRRRGWLTSEGREIKNKNEILALLKALFLPKRLSIIHCPGHQKGNSAEARGNRMADQAAREAAMKAVLETSTLLAGKRTADGSEFEKRTADGSEFESPKKKAKVE

SEQ ID NO: 7096 - protein, 2098 aa, synthetic construct
MPAAKRVKLDGGDKKYSIGLDIGTNSVGWAVITDEYKVPSKKFKVLGNTDRHSIKKNLIGALLFDSGETAEATRLKRTARRRYTRRKNRICYLQEIFSNEMAKVDDSFFHRLEESFLVEEDKKHERHPIFGNIVDEVAYHEKYPTIYHLRKKLVDSTDKADLRLIYLALAHMIKFRGHFLIEGDLNPDNSDVDKLFIQLVQTYNQLFEENPINASGVDAKAILSARLSKSRRLENLIAQLPGEKKNGLFGNLIALSLGLTPNFKSNFDLAEDAKLQLSKDTYDDDLDNLLAQIGDQYADLFLAAKNLSDAILLSDILRVNTEITKAPLSASMIKRYDEHHQDLTLLKALVRQQLPEKYKEIFFDQSKNGYAGYIDGGASQEEFYKFIKPILEKMDGTEELLVKLNREDLLRKQRTFDNGSIPHQIHLGELHAILRRQEDFYPFLKDNREKIEKILTFRIPYYVGPLARGNSRFAWMTRKSEETITPWNFEEVVDKGASAQSFIERMTNFDKNLPNEKVLPKHSLLYEYFTVYNELTKVKYVTEGMRKPAFLSGEQKKAIVDLLFKTNRKVTVKQLKEDYFKKIECFDSVEISGVEDRFNASLGTYHDLLKIIKDKDFLDNEENEDILEDIVLTLTLFEDREMIEERLKTYAHLFDDKVMKQLKRRRYTGWGRLSRKLINGIRDKQSGKTILDFLKSDGFANRNFMQLIHDDSLTFKEDIQKAQVSGQGDSLHEHIANLAGSPAIKKGILQTVKVVDELVKVMGRHKPENIVIEMARENQTTQKGQKNSRERMKRIEEGIKELGSQILKEHPVENTQLQNEKLYLYYLQNGRDMYVDQELDINRLSDYDVDHIVPQSFLKDDSIDNKVLTRSDKARGKSDNVPSEEVVKKMKNYWRQLLNAKLITQRKFDNLTKAERGGLSELDKAGFIKRQLVETRQITKHVAQILDSRMNTKYDENDKLIREVKVITLKSKLVSDFRKDFQFYKVREINNYHHAHDAYLNAVVGTALIKKYPKLESEFVYGDYKVYDVRKMIAKSEQEIGKATAKYFFYSNIMNFFKTEITLANGEIRKRPLIETNGETGEIVWDKGRDFATVRKVLSMPQVNIVKKTEVQTGGFSKESILPKRNSDKLIARKKDWDPKKYGGFDSPTVAYSVLVVAKVEKGKSKKLKSVKELLGITIMERSSFEKNPIDFLEAKGYKEVKKDLIIKLPKYSLFELENGRKRMLASAGELQKGNELALPSKYVNFLYLASHYEKLKGSPEDNEQKQLFVEQHKHYLDEIIEQISEFSKRVILADANLDKVLSAYNKHRDKPIREQAENIIHLFTLTNLGAPAAFKYFDTTIDRKRYTSTKEVLDATLIHQSITGLYETRIDLSQLGGDGGEAAAKGGSGSSGGTAPLEEEYRLFLEAPIQNVTLLEQWKREIPKVWAEINPPGLASTQAPIHVQLLSTALPVRVRQYPITLEAKRSLRETIRKFRAAGILRPVHSPWNTPLLPVRKSGTSEYRMVQDLREVNKRVETIHPTVPNPYTLLSLLPPDRIWYSVLDLKDAFFCIPLAPESQLIFAFEWADAEEGESGQLTWTRLPQGFKNSPTLFNEALNRDLQGFRLDHPSVSLLQYVDDLLIAADTQAACLSATRDLLMTLAELGYRVSGKKAQLCQEEVTYLGFKIHKGSRSLSNSRTQAILQIPVPKTKRQVREFLGTIGYCRLWIPGFAELAQPLYAATRPGNDPLVWGEKEEEAFQSLKLALTQPPALALPSLDKPFQLFVEETSGAAKGVLTQALGPWKRPVAYLSKRLDPVAAGWPRCLRAIAAAALLTREASKLTFGQDIEITSSHNLESLLRSPPDKWLTNARITQYQVLLLDPPRVRFKQTAALNPATLLPETDDTLPIHHCLDTLDSLTSTRPDLTDQPLAQAEATLFTDGSSYIRDGKRYAGAAVVTLDSVIWAEPLPIGTSAQKAELIALTKALEWSKDKSVNIYTDSRYAFATLHVHGMIYRERGWLTAGGKAIKNAPEILALLTAVWLPKRVAVMHCKGHQKDDAPTSTGNRRADEVAREVAIRPLSTQATISAGKRTADGSEFEKRTADGSEFESPKKKAKVE

SEQ ID NO: 7097 - protein, 2102 aa, synthetic construct
MPAAKRVKLDGGDKKYSIGLDIGTNSVGWAVITDEYKVPSKKFKVLGNTDRHSIKKNLIGALLFDSGETAEATRLKRTARRRYTRRKNRICYLQEIFSNEMAKVDDSFFHRLEESFLVEEDKKHERHPIFGNIVDEVAYHEKYPTIYHLRKKLVDSTDKADLRLIYLALAHMIKFRGHFLIEGDLNPDNSDVDKLFIQLVQTYNQLFEENPINASGVDAKAILSARLSKSRRLENLIAQLPGEKKNGLFGNLIALSLGLTPNFKSNFDLAEDAKLQLSKDTYDDDLDNLLAQIGDQYADLFLAAKNLSDAILLSDILRVNTEITKAPLSASMIKRYDEHHQDLTLLKALVRQQLPEKYKEIFFDQSKNGYAGYIDGGASQEEFYKFIKPILEKMDGTEELLVKLNREDLLRKQRTFDNGSIPHQIHLGELHAILRRQEDFYPFLKDNREKIEKILTFRIPYYVGPLARGNSRFAWMTRKSEETITPWNFEEVVDKGASAQSFIERMTNFDKNLPNEKVLPKHSLLYEYFTVYNELTKVKYVTEGMRKPAFLSGEQKKAIVDLLFKTNRKVTVKQLKEDYFKKIECFDSVEISGVEDRFNASLGTYHDLLKIIKDKDFLDNEENEDILEDIVLTLTLFEDREMIEERLKTYAHLFDDKVMKQLKRRRYTGWGRLSRKLINGIRDKQSGKTILDFLKSDGFANRNFMQLIHDDSLTFKEDIQKAQVSGQGDSLHEHIANLAGSPAIKKGILQTVKVVDELVKVMGRHKPENIVIEMARENQTTQKGQKNSRERMKRIEEGIKELGSQILKEHPVENTQLQNEKLYLYYLQNGRDMYVDQELDINRLSDYDVDHIVPQSFLKDDSIDNKVLTRSDKARGKSDNVPSEEVVKKMKNYWRQLLNAKLITQRKFDNLTKAERGGLSELDKAGFIKRQLVETRQITKHVAQILDSRMNTKYDENDKLIREVKVITLKSKLVSDFRKDFQFYKVREINNYHHAHDAYLNAVVGTALIKKYPKLESEFVYGDYKVYDVRKMIAKSEQEIGKATAKYFFYSNIMNFFKTEITLANGEIRKRPLIETNGETGEIVWDKGRDFATVRKVLSMPQVNIVKKTEVQTGGFSKESILPKRNSDKLIARKKDWDPKKYGGFDSPTVAYSVLVVAKVEKGKSKKLKSVKELLGITIMERSSFEKNPIDFLEAKGYKEVKKDLIIKLPKYSLFELENGRKRMLASAGELQKGNELALPSKYVNFLYLASHYEKLKGSPEDNEQKQLFVEQHKHYLDEIIEQISEFSKRVILADANLDKVLSAYNKHRDKPIREQAENIIHLFTLTNLGAPAAFKYFDTTIDRKRYTSTKEVLDATLIHQSITGLYETRIDLSQLGGDGGEAAAKGGSGSSGGTVSLQDEHRLFDIPVTTSLPDVWLQDFPQAWAETGGLGRAKCQAPIIIDLKPTAVPVSIKQYPMSLEAHMGIRQHIIKFLELGVLRPCRSPWNTPLLPVKKPGTQDYRPVQDLREINKRTVDIHPTVPNPYNLLSTLKPDYSWYTVLDLKDAFFCLPLAPQSQELFAFEWKDPERGISGQLTWTRLPQGFKNSPTLFNEALHRDLTDFRTQHPEVTLLQYVDDLLLAAPTKKACTQGTRHLLQELGEKGYRASAKKAQICQTKVTYLGYILSEGKRWLTPGRIETVARIPPPRNPREVREFLGTAGFCRLWIPGFAELAAPLYALTKPSTPFTWQTEHQLAFEALKKALLSAPALGLPDTSKPFTLFLDERQGIAKGVLTQKLGPWKRPVAYLSKKLDPVAAGWPPCLRIMAATAMLVKDSAKLTLGQPLTVITPHTLEAIVRQPPDRWITNARLTHYQALLLDTDRVQFGPPVTLNPATLLPVPENQPSPHDCRQVLAETHGTREDLKDQELPDADHTWYTDGSSYLDSGTRRAGAAVVDGHNTIWAQSLPPGTSAQKAELIALTKALELSKGKKANIYTDSRYAFATAHTHGSIYERRGWLTSEGKEIKNKAEIIALLKALFLPQEVAIIHCPGHQKGQDPVAVGNRQADRVARQAAMAEVLTLATEPDNTSHITAGKRTADGSEFEKRTADGSEFESPKKKAKVE

SEQ ID NO: 7098 - protein, 2218 aa, synthetic construct
MPAAKRVKLDGGDKKYSIGLDIGTNSVGWAVITDEYKVPSKKFKVLGNTDRHSIKKNLIGALLFDSGETAEATRLKRTARRRYTRRKNRICYLQEIFSNEMAKVDDSFFHRLEESFLVEEDKKHERHPIFGNIVDEVAYHEKYPTIYHLRKKLVDSTDKADLRLIYLALAHMIKFRGHFLIEGDLNPDNSDVDKLFIQLVQTYNQLFEENPINASGVDAKAILSARLSKSRRLENLIAQLPGEKKNGLFGNLIALSLGLTPNFKSNFDLAEDAKLQLSKDTYDDDLDNLLAQIGDQYADLFLAAKNLSDAILLSDILRVNTEITKAPLSASMIKRYDEHHQDLTLLKALVRQQLPEKYKEIFFDQSKNGYAGYIDGGASQEEFYKFIKPILEKMDGTEELLVKLNREDLLRKQRTFDNGSIPHQIHLGELHAILRRQEDFYPFLKDNREKIEKILTFRIPYYVGPLARGNSRFAWMTRKSEETITPWNFEEVVDKGASAQSFIERMTNFDKNLPNEKVLPKHSLLYEYFTVYNELTKVKYVTEGMRKPAFLSGEQKKAIVDLLFKTNRKVTVKQLKEDYFKKIECFDSVEISGVEDRFNASLGTYHDLLKIIKDKDFLDNEENEDILEDIVLTLTLFEDREMIEERLKTYAHLFDDKVMKQLKRRRYTGWGRLSRKLINGIRDKQSGKTILDFLKSDGFANRNFMQLIHDDSLTFKEDIQKAQVSGQGDSLHEHIANLAGSPAIKKGILQTVKVVDELVKVMGRHKPENIVIEMARENQTTQKGQKNSRERMKRIEEGIKELGSQILKEHPVENTQLQNEKLYLYYLQNGRDMYVDQELDINRLSDYDVDHIVPQSFLKDDSIDNKVLTRSDKARGKSDNVPSEEVVKKMKNYWRQLLNAKLITQRKFDNLTKAERGGLSELDKAGFIKRQLVETRQITKHVAQILDSRMNTKYDENDKLIREVKVITLKSKLVSDFRKDFQFYKVREINNYHHAHDAYLNAVVGTALIKKYPKLESEFVYGDYKVYDVRKMIAKSEQEIGKATAKYFFYSNIMNFFKTEITLANGEIRKRPLIETNGETGEIVWDKGRDFATVRKVLSMPQVNIVKKTEVQTGGFSKESILPKRNSDKLIARKKDWDPKKYGGFDSPTVAYSVLVVAKVEKGKSKKLKSVKELLGITIMERSSFEKNPIDFLEAKGYKEVKKDLIIKLPKYSLFELENGRKRMLASAGELQKGNELALPSKYVNFLYLASHYEKLKGSPEDNEQKQLFVEQHKHYLDEIIEQISEFSKRVILADANLDKVLSAYNKHRDKPIREQAENIIHLFTLTNLGAPAAFKYFDTTIDRKRYTSTKEVLDATLIHQSITGLYETRIDLSQLGGDGGEAAAKGGSGSSGGTLGDQGSRGSDPLPEPRVTLTVEGIPTEFLVNTGAEHSVLTKPMGKMGSKRTVVAGATGSKVYPWTTKRLLKIGQKQVTHSFLVIPECPAPLLGRDLLTKLKAQIQFSTEGPQVTWEDRPAMCLVLNLEEEYRLHEKPVPPSIDPSWLQLFPMVWAEKAGMGLANQVPPVVVELKSDASPVAVRQYPMSKEAREGIRPHIQRFLDLGILVPCQSPWNTPLLPVKKPGTNDYRPVQDLREVNKRVQDIHPTVPNPYNLLSSLPPSHTWYSVLDLKDAFFCLKLHPNSQPLFAFEWRDPEKGNTGQLTWTRLPQGFKNSPTLFNEALHRDLASFRALNPQVVMLQYVDDLLVAAPTYRDCKEGTRRLLQELSKLGYRVSAKKAQLCREEVTYLGYLLKGGKRWLTPARKATVMKIPTPTTPRQVREFLGTAGFCRLWIPGFASLAAPLYPLTRPKVPFTWTEAHQEAFGRIKEALLSAPALALPDLTKPFALYVDEKEGVARGVLTQTLGPWRRPVAYLSKKLDPVASGWPTCLKAIAAVALLLKDADKLTLGQNVLVIAPHNLESIVRQPPDRWMTNARMTHYQSLLLNERVSFAPPAILNPATLLPVESDDTPIHICSEILAEETGTRPDLRDQPLPGVPAWYTDGSSFIMDGRRQAGAAIVDNKRTVWASNLPEGTSAQKAELIALTQALRLAEGKSINIYTDSRYAFATAHVHGAIYKQRGWLTSAGKDIKNKEEILALLEAIHLPKRVAIIHCPGHQRGTDPVATGNRKADEAAKQAAQSTRILTETTKNAGKRTADGSEFEKRTADGSEFESPKKKAKVE

SEQ ID NO: 7099 - protein, 2218 aa, synthetic construct
MPAAKRVKLDGGDKKYSIGLDIGTNSVGWAVITDEYKVPSKKFKVLGNTDRHSIKKNLIGALLFDSGETAEATRLKRTARRRYTRRKNRICYLQEIFSNEMAKVDDSFFHRLEESFLVEEDKKHERHPIFGNIVDEVAYHEKYPTIYHLRKKLVDSTDKADLRLIYLALAHMIKFRGHFLIEGDLNPDNSDVDKLFIQLVQTYNQLFEENPINASGVDAKAILSARLSKSRRLENLIAQLPGEKKNGLFGNLIALSLGLTPNFKSNFDLAEDAKLQLSKDTYDDDLDNLLAQIGDQYADLFLAAKNLSDAILLSDILRVNTEITKAPLSASMIKRYDEHHQDLTLLKALVRQQLPEKYKEIFFDQSKNGYAGYIDGGASQEEFYKFIKPILEKMDGTEELLVKLNREDLLRKQRTFDNGSIPHQIHLGELHAILRRQEDFYPFLKDNREKIEKILTFRIPYYVGPLARGNSRFAWMTRKSEETITPWNFEEVVDKGASAQSFIERMTNFDKNLPNEKVLPKHSLLYEYFTVYNELTKVKYVTEGMRKPAFLSGEQKKAIVDLLFKTNRKVTVKQLKEDYFKKIECFDSVEISGVEDRFNASLGTYHDLLKIIKDKDFLDNEENEDILEDIVLTLTLFEDREMIEERLKTYAHLFDDKVMKQLKRRRYTGWGRLSRKLINGIRDKQSGKTILDFLKSDGFANRNFMQLIHDDSLTFKEDIQKAQVSGQGDSLHEHIANLAGSPAIKKGILQTVKVVDELVKVMGRHKPENIVIEMARENQTTQKGQKNSRERMKRIEEGIKELGSQILKEHPVENTQLQNEKLYLYYLQNGRDMYVDQELDINRLSDYDVDHIVPQSFLKDDSIDNKVLTRSDKARGKSDNVPSEEVVKKMKNYWRQLLNAKLITQRKFDNLTKAERGGLSELDKAGFIKRQLVETRQITKHVAQILDSRMNTKYDENDKLIREVKVITLKSKLVSDFRKDFQFYKVREINNYHHAHDAYLNAVVGTALIKKYPKLESEFVYGDYKVYDVRKMIAKSEQEIGKATAKYFFYSNIMNFFKTEITLANGEIRKRPLIETNGETGEIVWDKGRDFATVRKVLSMPQVNIVKKTEVQTGGFSKESILPKRNSDKLIARKKDWDPKKYGGFDSPTVAYSVLVVAKVEKGKSKKLKSVKELLGITIMERSSFEKNPIDFLEAKGYKEVKKDLIIKLPKYSLFELENGRKRMLASAGELQKGNELALPSKYVNFLYLASHYEKLKGSPEDNEQKQLFVEQHKHYLDEIIEQISEFSKRVILADANLDKVLSAYNKHRDKPIREQAENIIHLFTLTNLGAPAAFKYFDTTIDRKRYTSTKEVLDATLIHQSITGLYETRIDLSQLGGDGGEAAAKGGSGSSGGTLGDQGSRGSDPLPEPRVTLTVEGIPTEFLVNTGAEHSVLTKPMGKMGSKRTVVAGATGSKVYPWTTKRLLKIGQKQVTHSFLVIPECPAPLLGRDLLTKLKAQIQFSTEGPQVTWEDRPAMCLVLNLEEEYRLHEKPVPPSIDPSWLQLFPMVWAEKAGMGLANQVPPVVVELKSDASPVAVRQYPMSKEAREGIRPHIQRFLDLGILVPCQSPWNTPLLPVKKPGTNDYRPVQDLREVNKRVQDIHPTVPNPYNLLSSLPPSHTWYSVLDLKDAFFCLKLHPNSQPLFAFEWRDPEKGNTGQLTWTRLPQGFKNSPTLFNEALHRDLASFRALNPQVVMLQYVDDLLVAAPTYRDCKEGTRRLLQELSKLGYRVSAKKAQLCREEVTYLGYLLKGGKRWLTPARKATVMKIPTPTTPRQVREFLGKAGFCRLFIPGFASLAAPLYPLTRPKVPFTWTEAHQEAFGRIKEALLSAPALALPDLTKPFALYVDEKEGVARGVLTQTLGPWRRPVAYLSKKLDPVASGWPTCLKAIAAVALLLKDADKLTLGQNVLVIAPHNLESIVRQPPDRWMTNARMTHYQSLLLNERVSFAPPAILNPATLLPVESDDTPIHICSEILAEETGTRPDLRDQPLPGVPAWYTDGSSFIMDGRRQAGAAIVDNKRTVWASNLPEGTSAQKAELIALTQALRLAEGKSINIYTDSRYAFATAHVHGAIYKQRGWLTSAGKDIKNKEEILALLEAIHLPKRVAIIHCPGHQRGTDPVATGNRKADEAAKQAAQSTRILTETTKNAGKRTADGSEFEKRTADGSEFESPKKKAKVE

SEQ ID NO: 7100 - protein, 2096 aa, synthetic construct
MPAAKRVKLDGGDKKYSIGLDIGTNSVGWAVITDEYKVPSKKFKVLGNTDRHSIKKNLIGALLFDSGETAEATRLKRTARRRYTRRKNRICYLQEIFSNEMAKVDDSFFHRLEESFLVEEDKKHERHPIFGNIVDEVAYHEKYPTIYHLRKKLVDSTDKADLRLIYLALAHMIKFRGHFLIEGDLNPDNSDVDKLFIQLVQTYNQLFEENPINASGVDAKAILSARLSKSRRLENLIAQLPGEKKNGLFGNLIALSLGLTPNFKSNFDLAEDAKLQLSKDTYDDDLDNLLAQIGDQYADLFLAAKNLSDAILLSDILRVNTEITKAPLSASMIKRYDEHHQDLTLLKALVRQQLPEKYKEIFFDQSKNGYAGYIDGGASQEEFYKFIKPILEKMDGTEELLVKLNREDLLRKQRTFDNGSIPHQIHLGELHAILRRQEDFYPFLKDNREKIEKILTFRIPYYVGPLARGNSRFAWMTRKSEETITPWNFEEVVDKGASAQSFIERMTNFDKNLPNEKVLPKHSLLYEYFTVYNELTKVKYVTEGMRKPAFLSGEQKKAIVDLLFKTNRKVTVKQLKEDYFKKIECFDSVEISGVEDRFNASLGTYHDLLKIIKDKDFLDNEENEDILEDIVLTLTLFEDREMIEERLKTYAHLFDDKVMKQLKRRRYTGWGRLSRKLINGIRDKQSGKTILDFLKSDGFANRNFMQLIHDDSLTFKEDIQKAQVSGQGDSLHEHIANLAGSPAIKKGILQTVKVVDELVKVMGRHKPENIVIEMARENQTTQKGQKNSRERMKRIEEGIKELGSQILKEHPVENTQLQNEKLYLYYLQNGRDMYVDQELDINRLSDYDVDHIVPQSFLKDDSIDNKVLTRSDKARGKSDNVPSEEVVKKMKNYWRQLLNAKLITQRKFDNLTKAERGGLSELDKAGFIKRQLVETRQITKHVAQILDSRMNTKYDENDKLIREVKVITLKSKLVSDFRKDFQFYKVREINNYHHAHDAYLNAVVGTALIKKYPKLESEFVYGDYKVYDVRKMIAKSEQEIGKATAKYFFYSNIMNFFKTEITLANGEIRKRPLIETNGETGEIVWDKGRDFATVRKVLSMPQVNIVKKTEVQTGGFSKESILPKRNSDKLIARKKDWDPKKYGGFDSPTVAYSVLVVAKVEKGKSKKLKSVKELLGITIMERSSFEKNPIDFLEAKGYKEVKKDLIIKLPKYSLFELENGRKRMLASAGELQKGNELALPSKYVNFLYLASHYEKLKGSPEDNEQKQLFVEQHKHYLDEIIEQISEFSKRVILADANLDKVLSAYNKHRDKPIREQAENIIHLFTLTNLGAPAAFKYFDTTIDRKRYTSTKEVLDATLIHQSITGLYETRIDLSQLGGDGGEAAAKGGSGSSGGTLNLEDEYRLYETSAEPEVSPGSTWLSDFPQAWAETGGMGLAVRQAPLIIPLKATSTPVSIKQYPMSQEAKLGIKPHIQRLLDQGILVPCQSPWNTPLLPVKKPGTNDYRPVQDLREVNKRVEDIHPTVPNPYNLLSGLPPSHRWYTVLDLKDAFFCLRLHPTSQPLFAFEWRDPGMGISGQLTWTRLPQGFKNSPTLFNEALHRDLADFRIQHPDLILLQYVDDILLAATSELDCQQGTRALLLTLGNLGYRASAKKAQLCQKQVKYLGYLLKEGQRWLTEARKETVMGQPTPKTPRQLREFLGKAGFCRLFIPGFAEMAAPLYPLTKPGTLFNWGPDQQKAYQEIKQALLTAPALGLPDLTKPFELFVDEKQGYAKGVLTQKLGPWRRPVAYLSKKLDPVAAGWPPCLRMVAAIAVLRKDAGKLTMGQPLVILAPHAVEALVKQPPDRWLSNARMTHYQAMLLDTDRVQFGPVVALNPATLLPLPEEGAPHDCLEILAETHGTRPDLTDQPIPDADHTWYTDGSSFLQEGQRKAGAAVTTETEVIWARALPAGTSAQRAELIALTQALKMAEGKRLNVYTDSRYAFATAHIHGEIYRRRGWLTSEGREIKNKSEILALLKALFLPKRLSIIHCLGHQKGDSAEARGNRLADQAAREAAIKTPPDTSTLLAGKRTADGSEFEKRTADGSEFESPKKKAKVE

SEQ ID NO: 7101 - protein, 2096 aa, synthetic construct
MPAAKRVKLDGGDKKYSIGLDIGTNSVGWAVITDEYKVPSKKFKVLGNTDRHSIKKNLIGALLFDSGETAEATRLKRTARRRYTRRKNRICYLQEIFSNEMAKVDDSFFHRLEESFLVEEDKKHERHPIFGNIVDEVAYHEKYPTIYHLRKKLVDSTDKADLRLIYLALAHMIKFRGHFLIEGDLNPDNSDVDKLFIQLVQTYNQLFEENPINASGVDAKAILSARLSKSRRLENLIAQLPGEKKNGLFGNLIALSLGLTPNFKSNFDLAEDAKLQLSKDTYDDDLDNLLAQIGDQYADLFLAAKNLSDAILLSDILRVNTEITKAPLSASMIKRYDEHHQDLTLLKALVRQQLPEKYKEIFFDQSKNGYAGYIDGGASQEEFYKFIKPILEKMDGTEELLVKLNREDLLRKQRTFDNGSIPHQIHLGELHAILRRQEDFYPFLKDNREKIEKILTFRIPYYVGPLARGNSRFAWMTRKSEETITPWNFEEVVDKGASAQSFIERMTNFDKNLPNEKVLPKHSLLYEYFTVYNELTKVKYVTEGMRKPAFLSGEQKKAIVDLLFKTNRKVTVKQLKEDYFKKIECFDSVEISGVEDRFNASLGTYHDLLKIIKDKDFLDNEENEDILEDIVLTLTLFEDREMIEERLKTYAHLFDDKVMKQLKRRRYTGWGRLSRKLINGIRDKQSGKTILDFLKSDGFANRNFMQLIHDDSLTFKEDIQKAQVSGQGDSLHEHIANLAGSPAIKKGILQTVKVVDELVKVMGRHKPENIVIEMARENQTTQKGQKNSRERMKRIEEGIKELGSQILKEHPVENTQLQNEKLYLYYLQNGRDMYVDQELDINRLSDYDVDHIVPQSFLKDDSIDNKVLTRSDKARGKSDNVPSEEVVKKMKNYWRQLLNAKLITQRKFDNLTKAERGGLSELDKAGFIKRQLVETRQITKHVAQILDSRMNTKYDENDKLIREVKVITLKSKLVSDFRKDFQFYKVREINNYHHAHDAYLNAVVGTALIKKYPKLESEFVYGDYKVYDVRKMIAKSEQEIGKATAKYFFYSNIMNFFKTEITLANGEIRKRPLIETNGETGEIVWDKGRDFATVRKVLSMPQVNIVKKTEVQTGGFSKESILPKRNSDKLIARKKDWDPKKYGGFDSPTVAYSVLVVAKVEKGKSKKLKSVKELLGITIMERSSFEKNPIDFLEAKGYKEVKKDLIIKLPKYSLFELENGRKRMLASAGELQKGNELALPSKYVNFLYLASHYEKLKGSPEDNEQKQLFVEQHKHYLDEIIEQISEFSKRVILADANLDKVLSAYNKHRDKPIREQAENIIHLFTLTNLGAPAAFKYFDTTIDRKRYTSTKEVLDATLIHQSITGLYETRIDLSQLGGDGGEAAAKGGSGSSGGTLNIEDEYRLHETSKGPDVPLGSTWLSDFPQAWAETGGMGLAVRQAPLIIPLKATSTPVSIKQYPMSQEARLGIKPHIQRLLDQGILVPCQSPWNTPLLPVKKPGTNDYRPVQDLREVNKRVEDIHPTVPNPYNLLSGLPPSHQWYTVLDLKDAFFCLRLHPTSQSLFAFEWRDPEMGISGQLTWTRLPQGFKNSPTLFDEALHRDLADFRIQHPDLILLQYVDDLLLAATSELDCQQGTRALLQTLGDLGYRASAKKAQICQKQVKYLGYLLKEGQRWLTEARKETVMGQPTPKTPRQLREFLGTAGFCRLWIPGFAEMAAPLYPLTKTGTLFEWGPDQQKAYQEIKQALLTAPALGLPDLTKPFELFVDEKQGYAKGVLTQKLGPWRRPVAYLSKKLDPVAAGWPPCLRMVAAIAVLTKDAGKLTMGQPLVILAPHAVEALVKQPPDRWLSNARMTHYQALLLDTDRVQFGPIVALNPATLLPLPEEGLQHDCLDILAEAHGTRPDLTDQPLPDADHTWYTDGSSFLQEGQRKAGAAVTTETEVVWAKALPAGTSAQRAELIALTQALKMAEGKKLNVYTDSRYAFATAHIHGEIYRRRGLLTSEGKEIKNKDEILALLKALFLPKRLSIIHCPGHQKGNRAEARGNRMADQAAREVATRETPETSTLLAGKRTADGSEFEKRTADGSEFESPKKKAKVE

SEQ ID NO: 7102 - protein, 2087 aa, synthetic construct
MPAAKRVKLDGGDKKYSIGLDIGTNSVGWAVITDEYKVPSKKFKVLGNTDRHSIKKNLIGALLFDSGETAEATRLKRTARRRYTRRKNRICYLQEIFSNEMAKVDDSFFHRLEESFLVEEDKKHERHPIFGNIVDEVAYHEKYPTIYHLRKKLVDSTDKADLRLIYLALAHMIKFRGHFLIEGDLNPDNSDVDKLFIQLVQTYNQLFEENPINASGVDAKAILSARLSKSRRLENLIAQLPGEKKNGLFGNLIALSLGLTPNFKSNFDLAEDAKLQLSKDTYDDDLDNLLAQIGDQYADLFLAAKNLSDAILLSDILRVNTEITKAPLSASMIKRYDEHHQDLTLLKALVRQQLPEKYKEIFFDQSKNGYAGYIDGGASQEEFYKFIKPILEKMDGTEELLVKLNREDLLRKQRTFDNGSIPHQIHLGELHAILRRQEDFYPFLKDNREKIEKILTFRIPYYVGPLARGNSRFAWMTRKSEETITPWNFEEVVDKGASAQSFIERMTNFDKNLPNEKVLPKHSLLYEYFTVYNELTKVKYVTEGMRKPAFLSGEQKKAIVDLLFKTNRKVTVKQLKEDYFKKIECFDSVEISGVEDRFNASLGTYHDLLKIIKDKDFLDNEENEDILEDIVLTLTLFEDREMIEERLKTYAHLFDDKVMKQLKRRRYTGWGRLSRKLINGIRDKQSGKTILDFLKSDGFANRNFMQLIHDDSLTFKEDIQKAQVSGQGDSLHEHIANLAGSPAIKKGILQTVKVVDELVKVMGRHKPENIVIEMARENQTTQKGQKNSRERMKRIEEGIKELGSQILKEHPVENTQLQNEKLYLYYLQNGRDMYVDQELDINRLSDYDVDHIVPQSFLKDDSIDNKVLTRSDKARGKSDNVPSEEVVKKMKNYWRQLLNAKLITQRKFDNLTKAERGGLSELDKAGFIKRQLVETRQITKHVAQILDSRMNTKYDENDKLIREVKVITLKSKLVSDFRKDFQFYKVREINNYHHAHDAYLNAVVGTALIKKYPKLESEFVYGDYKVYDVRKMIAKSEQEIGKATAKYFFYSNIMNFFKTEITLANGEIRKRPLIETNGETGEIVWDKGRDFATVRKVLSMPQVNIVKKTEVQTGGFSKESILPKRNSDKLIARKKDWDPKKYGGFDSPTVAYSVLVVAKVEKGKSKKLKSVKELLGITIMERSSFEKNPIDFLEAKGYKEVKKDLIIKLPKYSLFELENGRKRMLASAGELQKGNELALPSKYVNFLYLASHYEKLKGSPEDNEQKQLFVEQHKHYLDEIIEQISEFSKRVILADANLDKVLSAYNKHRDKPIREQAENIIHLFTLTNLGAPAAFKYFDTTIDRKRYTSTKEVLDATLIHQSITGLYETRIDLSQLGGDGGEAAAKGGSGSSGGIPWLMKKPLQLTTLVPLQEYEERLLKQTMLTGSYKEKLQSLFLKYDALWQHWENQVGHRRIKPHHIATGTVNPRPQKQYPINPKAKASIQTVINDLLKQGVLIQQNSIMNTPVYPVPKPDGKWRMVLDYREVNKTIPLIAAQNQHSAGILSSIFRGKYKTTLDLSNGFWAHSITPESYWLTAFTWLGQQYCWTRLPQGFLNSPALFNADVVDLLKEVPNVQVYVDDIYISHDDPREHLEQLEKVFSLLLNAGYVVSLKKSEIAQHEVEFLGFNITKEGRGLTETFKQKLLNITPPRDLKQLQSILGLLNFARNFIPNFSELVKPLYNIIATAPGKYITWTTDNSQQLQNIISMLNSAENLEERNPEVRLIMKVNTSPSAGYIRFYNEFAKRPIMYLNYVYTKAEVKFTNTEKLLTTIHKGLIKALDLGMGQEILVYSPIVSMTKIQKTPLPERKALPIRWITWMSYLEDPRIQFHYDKTLPELQQVPTVTDDIIAKIKHPSEFSMVFYTDGSAIKHPNVNKSHNAGMGIAQVQFKPEFTVINTWSIPLGDHTAQLAEVAAVEFACKKALKIDGPVLIVTDSFYVAESVNKELPYWQSNGFFNNKKKPLKHVSKWKSIADCIQLKPDIIIIHEKGHQPTASTFHTEGNNLADKLATQGSYVVNAGKRTADGSEFEKRTADGSEFESPKKKAKVE

SEQ ID NO: 7103 - protein, 2096 aa, synthetic construct; identical to SEQ ID NO: 4523

SEQ ID NO: 7104 - protein, 2098 aa, synthetic construct
MPAAKRVKLDGGDKKYSIGLDIGTNSVGWAVITDEYKVPSKKFKVLGNTDRHSIKKNLIGALLFDSGETAEATRLKRTARRRYTRRKNRICYLQEIFSNEMAKVDDSFFHRLEESFLVEEDKKHERHPIFGNIVDEVAYHEKYPTIYHLRKKLVDSTDKADLRLIYLALAHMIKFRGHFLIEGDLNPDNSDVDKLFIQLVQTYNQLFEENPINASGVDAKAILSARLSKSRRLENLIAQLPGEKKNGLFGNLIALSLGLTPNFKSNFDLAEDAKLQLSKDTYDDDLDNLLAQIGDQYADLFLAAKNLSDAILLSDILRVNTEITKAPLSASMIKRYDEHHQDLTLLKALVRQQLPEKYKEIFFDQSKNGYAGYIDGGASQEEFYKFIKPILEKMDGTEELLVKLNREDLLRKQRTFDNGSIPHQIHLGELHAILRRQEDFYPFLKDNREKIEKILTFRIPYYVGPLARGNSRFAWMTRKSEETITPWNFEEVVDKGASAQSFIERMTNFDKNLPNEKVLPKHSLLYEYFTVYNELTKVKYVTEGMRKPAFLSGEQKKAIVDLLFKTNRKVTVKQLKEDYFKKIECFDSVEISGVEDRFNASLGTYHDLLKIIKDKDFLDNEENEDILEDIVLTLTLFEDREMIEERLKTYAHLFDDKVMKQLKRRRYTGWGRLSRKLINGIRDKQSGKTILDFLKSDGFANRNFMQLIHDDSLTFKEDIQKAQVSGQGDSLHEHIANLAGSPAIKKGILQTVKVVDELVKVMGRHKPENIVIEMARENQTTQKGQKNSRERMKRIEEGIKELGSQILKEHPVENTQLQNEKLYLYYLQNGRDMYVDQELDINRLSDYDVDHIVPQSFLKDDSIDNKVLTRSDKARGKSDNVPSEEVVKKMKNYWRQLLNAKLITQRKFDNLTKAERGGLSELDKAGFIKRQLVETRQITKHVAQILDSRMNTKYDENDKLIREVKVITLKSKLVSDFRKDFQFYKVREINNYHHAHDAYLNAVVGTALIKKYPKLESEFVYGDYKVYDVRKMIAKSEQEIGKATAKYFFYSNIMNFFKTEITLANGEIRKRPLIETNGETGEIVWDKGRDFATVRKVLSMPQVNIVKKTEVQTGGFSKESILPKRNSDKLIARKKDWDPKKYGGFDSPTVAYSVLVVAKVEKGKSKKLKSVKELLGITIMERSSFEKNPIDFLEAKGYKEVKKDLIIKLPKYSLFELENGRKRMLASAGELQKGNELALPSKYVNFLYLASHYEKLKGSPEDNEQKQLFVEQHKHYLDEIIEQISEFSKRVILADANLDKVLSAYNKHRDKPIREQAENIIHLFTLTNLGAPAAFKYFDTTIDRKRYTSTKEVLDATLIHQSITGLYETRIDLSQLGGDGGEAAAKGSSGGSGGTAPLEEEYRLFLEAPIQNVTLLEQWKREIPKVWAEINPPGLASTQAPIHVQLLSTALPVRVRQYPITLEAKRSLRETIRKFRAAGILRPVHSPWNTPLLPVRKSGTSEYRMVQDLREVNKRVETIHPTVPNPYTLLSLLPPDRIWYSVLDLKDAFFCIPLAPESQLIFAFEWADAEEGESGQLTWTRLPQGFKNSPTLFNEALNRDLQGFRLDHPSVSLLQYVDDLLIAADTQAACLSATRDLLMTLAELGYRVSGKKAQLCQEEVTYLGFKIHKGSRSLSNSRTQAILQIPVPKTKRQVREFLGTIGYCRLWIPGFAELAQPLYAATRPGNDPLVWGEKEEEAFQSLKLALTQPPALALPSLDKPFQLFVEETSGAAKGVLTQALGPWKRPVAYLSKRLDPVAAGWPRCLRAIAAAALLTREASKLTFGQDIEITSSHNLESLLRSPPDKWLTNARITQYQVLLLDPPRVRFKQTAALNPATLLPETDDTLPIHHCLDTLDSLTSTRPDLTDQPLAQAEATLFTDGSSYIRDGKRYAGAAVVTLDSVIWAEPLPIGTSAQKAELIALTKALEWSKDKSVNIYTDSRYAFATLHVHGMIYRERGWLTAGGKAIKNAPEILALLTAVWLPKRVAVMHCKGHQKDDAPTSTGNRRADEVAREVAIRPLSTQATISAGKRTADGSEFEKRTADGSEFESPKKKAKVE

SEQ ID NO: 7105 - protein, 2098 aa, synthetic construct
MPAAKRVKLDGGDKKYSIGLDIGTNSVGWAVITDEYKVPSKKFKVLGNTDRHSIKKNLIGALLFDSGETAEATRLKRTARRRYTRRKNRICYLQEIFSNEMAKVDDSFFHRLEESFLVEEDKKHERHPIFGNIVDEVAYHEKYPTIYHLRKKLVDSTDKADLRLIYLALAHMIKFRGHFLIEGDLNPDNSDVDKLFIQLVQTYNQLFEENPINASGVDAKAILSARLSKSRRLENLIAQLPGEKKNGLFGNLIALSLGLTPNFKSNFDLAEDAKLQLSKDTYDDDLDNLLAQIGDQYADLFLAAKNLSDAILLSDILRVNTEITKAPLSASMIKRYDEHHQDLTLLKALVRQQLPEKYKEIFFDQSKNGYAGYIDGGASQEEFYKFIKPILEKMDGTEELLVKLNREDLLRKQRTFDNGSIPHQIHLGELHAILRRQEDFYPFLKDNREKIEKILTFRIPYYVGPLARGNSRFAWMTRKSEETITPWNFEEVVDKGASAQSFIERMTNFDKNLPNEKVLPKHSLLYEYFTVYNELTKVKYVTEGMRKPAFLSGEQKKAIVDLLFKTNRKVTVKQLKEDYFKKIECFDSVEISGVEDRFNASLGTYHDLLKIIKDKDFLDNEENEDILEDIVLTLTLFEDREMIEERLKTYAHLFDDKVMKQLKRRRYTGWGRLSRKLINGIRDKQSGKTILDFLKSDGFANRNFMQLIHDDSLTFKEDIQKAQVSGQGDSLHEHIANLAGSPAIKKGILQTVKVVDELVKVMGRHKPENIVIEMARENQTTQKGQKNSRERMKRIEEGIKELGSQILKEHPVENTQLQNEKLYLYYLQNGRDMYVDQELDINRLSDYDVDHIVPQSFLKDDSIDNKVLTRSDKARGKSDNVPSEEVVKKMKNYWRQLLNAKLITQRKFDNLTKAERGGLSELDKAGFIKRQLVETRQITKHVAQILDSRMNTKYDENDKLIREVKVITLKSKLVSDFRKDFQFYKVREINNYHHAHDAYLNAVVGTALIKKYPKLESEFVYGDYKVYDVRKMIAKSEQEIGKATAKYFFYSNIMNFFKTEITLANGEIRKRPLIETNGETGEIVWDKGRDFATVRKVLSMPQVNIVKKTEVQTGGFSKESILPKRNSDKLIARKKDWDPKKYGGFDSPTVAYSVLVVAKVEKGKSKKLKSVKELLGITIMERSSFEKNPIDFLEAKGYKEVKKDLIIKLPKYSLFELENGRKRMLASAGELQKGNELALPSKYVNFLYLASHYEKLKGSPEDNEQKQLFVEQHKHYLDEIIEQISEFSKRVILADANLDKVLSAYNKHRDKPIREQAENIIHLFTLTNLGAPAAFKYFDTTIDRKRYTSTKEVLDATLIHQSITGLYETRIDLSQLGGDGGEAAAKGSSGGSGGTAPLEEEYRLFLEAPIQNVTLLEQWKREIPKVWAEINPPGLASTQAPIHVQLLSTALPVRVRQYPITLEAKRSLRETIRKFRAAGILRPVHSPWNTPLLPVRKSGTSEYRMVQDLREVNKRVETIHPTVPNPYTLLSLLPPDRIWYSVLDLKDAFFCIPLAPESQLIFAFEWADAEEGESGQLTWTRLPQGFKNSPTLFNEALNRDLQGFRLDHPSVSLLQYVDDLLIAADTQAACLSATRDLLMTLAELGYRVSGKKAQLCQEEVTYLGFKIHKGSRSLSNSRTQAILQIPVPKTKRQVREFLGKIGYCRLFIPGFAELAQPLYAATRPGNDPLVWGEKEEEAFQSLKLALTQPPALALPSLDKPFQLFVEETSGAAKGVLTQALGPWKRPVAYLSKRLDPVAAGWPRCLRAIAAAALLTREASKLTFGQDIEITSSHNLESLLRSPPDKWLTNARITQYQVLLLDPPRVRFKQTAALNPATLLPETDDTLPIHHCLDTLDSLTSTRPDLTDQPLAQAEATLFTDGSSYIRDGKRYAGAAVVTLDSVIWAEPLPIGTSAQKAELIALTKALEWSKDKSVNIYTDSRYAFATLHVHGMIYRERGWLTAGGKAIKNAPEILALLTAVWLPKRVAVMHCKGHQKDDAPTSTGNRRADEVAREVAIRPLSTQATISAGKRTADGSEFEKRTADGSEFESPKKKAKVE

SEQ ID NO: 7106 - protein, 2102 aa, synthetic construct
MPAAKRVKLDGGDKKYSIGLDIGTNSVGWAVITDEYKVPSKKFKVLGNTDRHSIKKNLIGALLFDSGETAEATRLKRTARRRYTRRKNRICYLQEIFSNEMAKVDDSFFHRLEESFLVEEDKKHERHPIFGNIVDEVAYHEKYPTIYHLRKKLVDSTDKADLRLIYLALAHMIKFRGHFLIEGDLNPDNSDVDKLFIQLVQTYNQLFEENPINASGVDAKAILSARLSKSRRLENLIAQLPGEKKNGLFGNLIALSLGLTPNFKSNFDLAEDAKLQLSKDTYDDDLDNLLAQIGDQYADLFLAAKNLSDAILLSDILRVNTEITKAPLSASMIKRYDEHHQDLTLLKALVRQQLPEKYKEIFFDQSKNGYAGYIDGGASQEEFYKFIKPILEKMDGTEELLVKLNREDLLRKQRTFDNGSIPHQIHLGELHAILRRQEDFYPFLKDNREKIEKILTFRIPYYVGPLARGNSRFAWMTRKSEETITPWNFEEVVDKGASAQSFIERMTNFDKNLPNEKVLPKHSLLYEYFTVYNELTKVKYVTEGMRKPAFLSGEQKKAIVDLLFKTNRKVTVKQLKEDYFKKIECFDSVEISGVEDRFNASLGTYHDLLKIIKDKDFLDNEENEDILEDIVLTLTLFEDREMIEERLKTYAHLFDDKVMKQLKRRRYTGWGRLSRKLINGIRDKQSGKTILDFLKSDGFANRNFMQLIHDDSLTFKEDIQKAQVSGQGDSLHEHIANLAGSPAIKKGILQTVKVVDELVKVMGRHKPENIVIEMARENQTTQKGQKNSRERMKRIEEGIKELGSQILKEHPVENTQLQNEKLYLYYLQNGRDMYVDQELDINRLSDYDVDHIVPQSFLKDDSIDNKVLTRSDKARGKSDNVPSEEVVKKMKNYWRQLLNAKLITQRKFDNLTKAERGGLSELDKAGFIKRQLVETRQITKHVAQILDSRMNTKYDENDKLIREVKVITLKSKLVSDFRKDFQFYKVREINNYHHAHDAYLNAVVGTALIKKYPKLESEFVYGDYKVYDVRKMIAKSEQEIGKATAKYFFYSNIMNFFKTEITLANGEIRKRPLIETNGETGEIVWDKGRDFATVRKVLSMPQVNIVKKTEVQTGGFSKESILPKRNSDKLIARKKDWDPKKYGGFDSPTVAYSVLVVAKVEKGKSKKLKSVKELLGITIMERSSFEKNPIDFLEAKGYKEVKKDLIIKLPKYSLFELENGRKRMLASAGELQKGNELALPSKYVNFLYLASHYEKLKGSPEDNEQKQLFVEQHKHYLDEIIEQISEFSKRVILADANLDKVLSAYNKHRDKPIREQAENIIHLFTLTNLGAPAAFKYFDTTIDRKRYTSTKEVLDATLIHQSITGLYETRIDLSQLGGDGGEAAAKGSSGGSGGTVSLQDEHRLFDIPVTTSLPDVWLQDFPQAWAETGGLGRAKCQAPIIIDLKPTAVPVSIKQYPMSLEAHMGIRQHIIKFLELGVLRPCRSPWNTPLLPVKKPGTQDYRPVQDLREINKRTVDIHPTVPNPYNLLSTLKPDYSWYTVLDLKDAFFCLPLAPQSQELFAFEWKDPERGISGQLTWTRLPQGFKNSPTLFNEALHRDLTDFRTQHPEVTLLQYVDDLLLAAPTKKACTQGTRHLLQELGEKGYRASAKKAQICQTKVTYLGYILSEGKRWLTPGRIETVARIPPPRNPREVREFLGKAGFCRLFIPGFAELAAPLYALTKPSTPFTWQTEHQLAFEALKKALLSAPALGLPDTSKPFTLFLDERQGIAKGVLTQKLGPWKRPVAYLSKKLDPVAAGWPPCLRIMAATAMLVKDSAKLTLGQPLTVITPHTLEAIVRQPPDRWITNARLTHYQALLLDTDRVQFGPPVTLNPATLLPVPENQPSPHDCRQVLAETHGTREDLKDQELPDADHTWYTDGSSYLDSGTRRAGAAVVDGHNTIWAQSLPPGTSAQKAELIALTKALELSKGKKANIYTDSRYAFATAHTHGSIYERRGWLTSEGKEIKNKAEIIALLKALFLPQEVAIIHCPGHQKGQDPVAVGNRQADRVARQAAMAEVLTLATEPDNTSHITAGKRTADGSEFEKRTADGSEFESPKKKAKVE

SEQ ID NO: 7107 - protein, 2087 aa, synthetic construct
MPAAKRVKLDGGDKKYSIGLDIGTNSVGWAVITDEYKVPSKKFKVLGNTDRHSIKKNLIGALLFDSGETAEATRLKRTARRRYTRRKNRICYLQEIFSNEMAKVDDSFFHRLEESFLVEEDKKHERHPIFGNIVDEVAYHEKYPTIYHLRKKLVDSTDKADLRLIYLALAHMIKFRGHFLIEGDLNPDNSDVDKLFIQLVQTYNQLFEENPINASGVDAKAILSARLSKSRRLENLIAQLPGEKKNGLFGNLIALSLGLTPNFKSNFDLAEDAKLQLSKDTYDDDLDNLLAQIGDQYADLFLAAKNLSDAILLSDILRVNTEITKAPLSASMIKRYDEHHQDLTLLKALVRQQLPEKYKEIFFDQSKNGYAGYIDGGASQEEFYKFIKPILEKMDGTEELLVKLNREDLLRKQRTFDNGSIPHQIHLGELHAILRRQEDFYPFLKDNREKIEKILTFRIPYYVGPLARGNSRFAWMTRKSEETITPWNFEEVVDKGASAQSFIERMTNFDKNLPNEKVLPKHSLLYEYFTVYNELTKVKYVTEGMRKPAFLSGEQKKAIVDLLFKTNRKVTVKQLKEDYFKKIECFDSVEISGVEDRFNASLGTYHDLLKIIKDKDFLDNEENEDILEDIVLTLTLFEDREMIEERLKTYAHLFDDKVMKQLKRRRYTGWGRLSRKLINGIRDKQSGKTILDFLKSDGFANRNFMQLIHDDSLTFKEDIQKAQVSGQGDSLHEHIANLAGSPAIKKGILQTVKVVDELVKVMGRHKPENIVIEMARENQTTQKGQKNSRERMKRIEEGIKELGSQILKEHPVENTQLQNEKLYLYYLQNGRDMYVDQELDINRLSDYDVDHIVPQSFLKDDSIDNKVLTRSDKARGKSDNVPSEEVVKKMKNYWRQLLNAKLITQRKFDNLTKAERGGLSELDKAGFIKRQLVETRQITKHVAQILDSRMNTKYDENDKLIREVKVITLKSKLVSDFRKDFQFYKVREINNYHHAHDAYLNAVVGTALIKKYPKLESEFVYGDYKVYDVRKMIAKSEQEIGKATAKYFFYSNIMNFFKTEITLANGEIRKRPLIETNGETGEIVWDKGRDFATVRKVLSMPQVNIVKKTEVQTGGFSKESILPKRNSDKLIARKKDWDPKKYGGFDSPTVAYSVLVVAKVEKGKSKKLKSVKELLGITIMERSSFEKNPIDFLEAKGYKEVKKDLIIKLPKYSLFELENGRKRMLASAGELQKGNELALPSKYVNFLYLASHYEKLKGSPEDNEQKQLFVEQHKHYLDEIIEQISEFSKRVILADANLDKVLSAYNKHRDKPIREQAENIIHLFTLTNLGAPAAFKYFDTTIDRKRYTSTKEVLDATLIHQSITGLYETRIDLSQLGGDGGEAAAKGSSGGSGGVPWILKKPLELTIKLDLEEQQGTLLNNSILSKKGKEELKQLFEKYSALWQSWENQVGHRRIRPHKIATGTVKPTPQKQYHINPKAKPDIQIVINDLLKQGVLIQKESTMNTPVYPVPKPNGRWRMVLDYRAVNKVTPLIAVQNQHSYGILGSLFKGRYKTTIDLSNGFWAHPIVPEDYWITAFTWQGKQYCWTVLPQGFLNSPGLFTGDVVDLLQGIPNVEVYVDDVYISHDSEKEHLEYLDILFNRLKEAGYIISLKKSNIANSIVDFLGFQITNEGRGLTDTFKEKLENITAPTTLKQLQSILGLLNFARNFIPDFTELIAPLYALIPKSTKNYVPWQIEHSTTLETLITKLNGAEYLQGRKGDKTLIMKVNASYTTGYIRYYNEGEKKPISYVSIVFSKTELKFTELEKLLTTVHKGLLKALDLSMGQNIHVYSPIVSMQNIQKTPQTAKKALASRWLSWLSYLEDPRIRFFYDPQMPALKDLPAVDTGKDNKKHPSNFQHIFYTDGSAITSPTKEGHLNAGMGIVYFINKDGNLQKQQEWSISLGNHTAQFAEIAAFEFALKKCLPLGGNILVVTDSNYVAKAYNEELDVWASNGFVNNRKKPLKHISKWKSVADLKRLRPDVVVTHEPGHQKLDSSPHAYGNNLADQLATQASFKVHAGKRTADGSEFEKRTADGSEFESPKKKAKVE

SEQ ID NO: 7108 - protein, 2087 aa, synthetic construct
MPAAKRVKLDGGDKKYSIGLDIGTNSVGWAVITDEYKVPSKKFKVLGNTDRHSIKKNLIGALLFDSGETAEATRLKRTARRRYTRRKNRICYLQEIFSNEMAKVDDSFFHRLEESFLVEEDKKHERHPIFGNIVDEVAYHEKYPTIYHLRKKLVDSTDKADLRLIYLALAHMIKFRGHFLIEGDLNPDNSDVDKLFIQLVQTYNQLFEENPINASGVDAKAILSARLSKSRRLENLIAQLPGEKKNGLFGNLIALSLGLTPNFKSNFDLAEDAKLQLSKDTYDDDLDNLLAQIGDQYADLFLAAKNLSDAILLSDILRVNTEITKAPLSASMIKRYDEHHQDLTLLKALVRQQLPEKYKEIFFDQSKNGYAGYIDGGASQEEFYKFIKPILEKMDGTEELLVKLNREDLLRKQRTFDNGSIPHQIHLGELHAILRRQEDFYPFLKDNREKIEKILTFRIPYYVGPLARGNSRFAWMTRKSEETITPWNFEEVVDKGASAQSFIERMTNFDKNLPNEKVLPKHSLLYEYFTVYNELTKVKYVTEGMRKPAFLSGEQKKAIVDLLFKTNRKVTVKQLKEDYFKKIECFDSVEISGVEDRFNASLGTYHDLLKIIKDKDFLDNEENEDILEDIVLTLTLFEDREMIEERLKTYAHLFDDKVMKQLKRRRYTGWGRLSRKLINGIRDKQSGKTILDFLKSDGFANRNFMQLIHDDSLTFKEDIQKAQVSGQGDSLHEHIANLAGSPAIKKGILQTVKVVDELVKVMGRHKPENIVIEMARENQTTQKGQKNSRERMKRIEEGIKELGSQILKEHPVENTQLQNEKLYLYYLQNGRDMYVDQELDINRLSDYDVDHIVPQSFLKDDSIDNKVLTRSDKARGKSDNVPSEEVVKKMKNYWRQLLNAKLITQRKFDNLTKAERGGLSELDKAGFIKRQLVETRQITKHVAQILDSRMNTKYDENDKLIREVKVITLKSKLVSDFRKDFQFYKVREINNYHHAHDAYLNAVVGTALIKKYPKLESEFVYGDYKVYDVRKMIAKSEQEIGKATAKYFFYSNIMNFFKTEITLANGEIRKRPLIETNGETGEIVWDKGRDFATVRKVLSMPQVNIVKKTEVQTGGFSKESILPKRNSDKLIARKKDWDPKKYGGFDSPTVAYSVLVVAKVEKGKSKKLKSVKELLGITIMERSSFEKNPIDFLEAKGYKEVKKDLIIKLPKYSLFELENGRKRMLASAGELQKGNELALPSKYVNFLYLASHYEKLKGSPEDNEQKQLFVEQHKHYLDEIIEQISEFSKRVILADANLDKVLSAYNKHRDKPIREQAENIIHLFTLTNLGAPAAFKYFDTTIDRKRYTSTKEVLDATLIHQSITGLYETRIDLSQLGGDGGEAAAKGSSGGSGGVPWILKKPLELTIKLDLEEQQGTLLNNSILSKKGKEELKQLFEKYSALWQSWENQVGHRRIRPHKIATGTVKPTPQKQYHINPKAKPDIQIVINDLLKQGVLIQKESTMNTPVYPVPKPNGRWRMVLDYRAVNKVTPLIAVQNQHSYGILGSLFKGRYKTTIDLSNGFWAHPIVPEDYWITAFTWQGKQYCWTVLPQGFLNSPGLFNGDVVDLLQGIPNVEVYVDDVYISHDSEKEHLEYLDILFNRLKEAGYIISLKKSNIANSIVDFLGFQITNEGRGLTDTFKEKLENITAPTTLKQLQSILGKLNFARNFIPDFTELIAPLYALIPKSPKNYVPWQIEHSTTLETLITKLNGAEYLQGRKGDKTLIMKVNASYTTGYIRYYNEGEKKPISYVSIVFSKTELKFTELEKLLTTVHKGLLKALDLSMGQNIHVYSPIVSMQNIQKTPQTAKKALASRWLSWLSYLEDPRIRFFYDPQMPALKDLPAVDTGKDNKKHPSNFQHIFYTDGSAITSPTKEGHLNAGMGIVYFINKDGNLQKQQEWSISLGNHTAQFAEIAAFEFALKKCLPLGGNILVVTDSNYVAKAYNEELDVWASNGFVNNRKKPLKHISKWKSVADLKRLRPDVVVTHEPGHQKLDSSPHAYGNNLADQLATQASFKVHAGKRTADGSEFEKRTADGSEFESPKKKAKVE

SEQ ID NO: 7109 - protein, 2094 aa, synthetic construct
MPAAKRVKLDGGDKKYSIGLDIGTNSVGWAVITDEYKVPSKKFKVLGNTDRHSIKKNLIGALLFDSGETAEATRLKRTARRRYTRRKNRICYLQEIFSNEMAKVDDSFFHRLEESFLVEEDKKHERHPIFGNIVDEVAYHEKYPTIYHLRKKLVDSTDKADLRLIYLALAHMIKFRGHFLIEGDLNPDNSDVDKLFIQLVQTYNQLFEENPINASGVDAKAILSARLSKSRRLENLIAQLPGEKKNGLFGNLIALSLGLTPNFKSNFDLAEDAKLQLSKDTYDDDLDNLLAQIGDQYADLFLAAKNLSDAILLSDILRVNTEITKAPLSASMIKRYDEHHQDLTLLKALVRQQLPEKYKEIFFDQSKNGYAGYIDGGASQEEFYKFIKPILEKMDGTEELLVKLNREDLLRKQRTFDNGSIPHQIHLGELHAILRRQEDFYPFLKDNREKIEKILTFRIPYYVGPLARGNSRFAWMTRKSEETITPWNFEEVVDKGASAQSFIERMTNFDKNLPNEKVLPKHSLLYEYFTVYNELTKVKYVTEGMRKPAFLSGEQKKAIVDLLFKTNRKVTVKQLKEDYFKKIECFDSVEISGVEDRFNASLGTYHDLLKIIKDKDFLDNEENEDILEDIVLTLTLFEDREMIEERLKTYAHLFDDKVMKQLKRRRYTGWGRLSRKLINGIRDKQSGKTILDFLKSDGFANRNFMQLIHDDSLTFKEDIQKAQVSGQGDSLHEHIANLAGSPAIKKGILQTVKVVDELVKVMGRHKPENIVIEMARENQTTQKGQKNSRERMKRIEEGIKELGSQILKEHPVENTQLQNEKLYLYYLQNGRDMYVDQELDINRLSDYDVDHIVPQSFLKDDSIDNKVLTRSDKARGKSDNVPSEEVVKKMKNYWRQLLNAKLITQRKFDNLTKAERGGLSELDKAGFIKRQLVETRQITKHVAQILDSRMNTKYDENDKLIREVKVITLKSKLVSDFRKDFQFYKVREINNYHHAHDAYLNAVVGTALIKKYPKLESEFVYGDYKVYDVRKMIAKSEQEIGKATAKYFFYSNIMNFFKTEITLANGEIRKRPLIETNGETGEIVWDKGRDFATVRKVLSMPQVNIVKKTEVQTGGFSKESILPKRNSDKLIARKKDWDPKKYGGFDSPTVAYSVLVVAKVEKGKSKKLKSVKELLGITIMERSSFEKNPIDFLEAKGYKEVKKDLIIKLPKYSLFELENGRKRMLASAGELQKGNELALPSKYVNFLYLASHYEKLKGSPEDNEQKQLFVEQHKHYLDEIIEQISEFSKRVILADANLDKVLSAYNKHRDKPIREQAENIIHLFTLTNLGAPAAFKYFDTTIDRKRYTSTKEVLDATLIHQSITGLYETRIDLSQLGGDGGEAAAKGSSGGSGGVLNLEEEYRLHEKPVPSSIDPSWLQLFPTVWAERAGMGLANQVPPVVVELRSGASPVAVRQYPMSKEAREGIRPHIQKFLDLGVLVPCRSPWNTPLLPVKKPGTNDYRPVQDLREINKRVQDIHPTVPNPYNLLSSLPPSYTWYSVLDLKDAFFCLRLHPNSQPLFAFEWKDPEKGNTGQLTWTRLPQGFKNSPTLFNEALHRDLAPFRALNPQVVLLQYVDDLLVAAPTYEDCKKGTQKLLQELSKLGYRVSAKKAQLCQREVTYLGYLLKEGKRWLTPARKATVMKIPVPTTPRQVREFLGTAGFCRLWIPGFASLAAPLYPLTKPSIPFIWTEEHQQAFDHIKKALLSAPALALPDLTKPFTLYIDERAGVARGVLTQTLGPWRRPVAYLSKKLDPVASGWPTCLKAVAAVALLLKDADKLTLGQNVTVIASHSLESIVRQPPDRWMTNARMTHYQSLLLNERVSFAPPAVLNPATLLPVESEATPVHRCSEILAEETGTRRDLEDQPLPGVPTWYTDGSSFITEGKRRAGAPIVDGKRTVWASSLPEGTSAQKAELVALTQALRLAEGKNINIYTDSRYAFATAHIHGAIYKQRGWLTSAGKDIKNKEEILALLEAIHLPRRVAIIHCPGHQRGSNPVATGNRRADEAAKQAALSTRVLAGTTKPAGKRTADGSEFEKRTADGSEFESPKKKAKVE

SEQ ID NO: 7110 - protein, 2127 aa, synthetic construct
MPAAKRVKLDGGDKKYSIGLDIGTNSVGWAVITDEYKVPSKKFKVLGNTDRHSIKKNLIGALLFDSGETAEATRLKRTARRRYTRRKNRICYLQEIFSNEMAKVDDSFFHRLEESFLVEEDKKHERHPIFGNIVDEVAYHEKYPTIYHLRKKLVDSTDKADLRLIYLALAHMIKFRGHFLIEGDLNPDNSDVDKLFIQLVQTYNQLFEENPINASGVDAKAILSARLSKSRRLENLIAQLPGEKKNGLFGNLIALSLGLTPNFKSNFDLAEDAKLQLSKDTYDDDLDNLLAQIGDQYADLFLAAKNLSDAILLSDILRVNTEITKAPLSASMIKRYDEHHQDLTLLKALVRQQLPEKYKEIFFDQSKNGYAGYIDGGASQEEFYKFIKPILEKMDGTEELLVKLNREDLLRKQRTFDNGSIPHQIHLGELHAILRRQEDFYPFLKDNREKIEKILTFRIPYYVGPLARGNSRFAWMTRKSEETITPWNFEEVVDKGASAQSFIERMTNFDKNLPNEKVLPKHSLLYEYFTVYNELTKVKYVTEGMRKPAFLSGEQKKAIVDLLFKTNRKVTVKQLKEDYFKKIECFDSVEISGVEDRFNASLGTYHDLLKIIKDKDFLDNEENEDILEDIVLTLTLFEDREMIEERLKTYAHLFDDKVMKQLKRRRYTGWGRLSRKLINGIRDKQSGKTILDFLKSDGFANRNFMQLIHDDSLTFKEDIQKAQVSGQGDSLHEHIANLAGSPAIKKGILQTVKVVDELVKVMGRHKPENIVIEMARENQTTQKGQKNSRERMKRIEEGIKELGSQILKEHPVENTQLQNEKLYLYYLQNGRDMYVDQELDINRLSDYDVDHIVPQSFLKDDSIDNKVLTRSDKARGKSDNVPSEEVVKKMKNYWRQLLNAKLITQRKFDNLTKAERGGLSELDKAGFIKRQLVETRQITKHVAQILDSRMNTKYDENDKLIREVKVITLKSKLVSDFRKDFQFYKVREINNYHHAHDAYLNAVVGTALIKKYPKLESEFVYGDYKVYDVRKMIAKSEQEIGKATAKYFFYSNIMNFFKTEITLANGEIRKRPLIETNGETGEIVWDKGRDFATVRKVLSMPQVNIVKKTEVQTGGFSKESILPKRNSDKLIARKKDWDPKKYGGFDSPTVAYSVLVVAKVEKGKSKKLKSVKELLGITIMERSSFEKNPIDFLEAKGYKEVKKDLIIKLPKYSLFELENGRKRMLASAGELQKGNELALPSKYVNFLYLASHYEKLKGSPEDNEQKQLFVEQHKHYLDEIIEQISEFSKRVILADANLDKVLSAYNKHRDKPIREQAENIIHLFTLTNLGAPAAFKYFDTTIDRKRYTSTKEVLDATLIHQSITGLYETRIDLSQLGGDGGEAAAKGSSGGSGGLLGRDLLTKLKAQIQFSTEGPQVTWEDRPAMCLVLNLEEEYRLHEKPVPPSIDPSWLQLFPMVWAEKAGMGLANQVPPVVVELKSDASPVAVRQYPMSKEAREGIRPHIQRFLDLGILVPCQSPWNTPLLPVKKPGTNDYRPVQDLREVNKRVQDIHPTVPNPYNLLSSLPPSHTWYSVLDLKDAFFCLKLHPNSQPLFAFEWRDPEKGNTGQLTWTRLPQGFKNSPTLFNEALHRDLASFRALNPQVVMLQYVDDLLVAAPTYRDCKEGTRRLLQELSKLGYRVSAKKAQLCREEVTYLGYLLKGGKRWLTPARKATVMKIPTPTTPRQVREFLGTAGFCRLWIPGFASLAAPLYPLTRPKVPFTWTEAHQEAFGRIKEALLSAPALALPDLTKPFALYVDEKEGVARGVLTQTLGPWRRPVAYLSKKLDPVASGWPTCLKAIAAVALLLKDADKLTLGQNVLVIAPHNLESIVRQPPDRWMTNARMTHYQSLLLNERVSFAPPAILNPATLLPVESDDTPIHICSEILAEETGTRPDLRDQPLPGVPAWYTDGSSFIMDGRRQAGAAIVDNKRTVWASNLPEGTSAQKAELIALTQALRLAEGKSINIYTDSRYAFATAHVHGAIYKQRGWLTSAGKDIKNKEEILALLEAIHLPKRVAIIHCPGHQRGTDPVATGNRKADEAAKQAAQSTRILTETTKNAGKRTADGSEFEKRTADGSEFESPKKKAKVE

SEQ ID NO: 7111 - protein, 2218 aa, synthetic construct
MPAAKRVKLDGGDKKYSIGLDIGTNSVGWAVITDEYKVPSKKFKVLGNTDRHSIKKNLIGALLFDSGETAEATRLKRTARRRYTRRKNRICYLQEIFSNEMAKVDDSFFHRLEESFLVEEDKKHERHPIFGNIVDEVAYHEKYPTIYHLRKKLVDSTDKADLRLIYLALAHMIKFRGHFLIEGDLNPDNSDVDKLFIQLVQTYNQLFEENPINASGVDAKAILSARLSKSRRLENLIAQLPGEKKNGLFGNLIALSLGLTPNFKSNFDLAEDAKLQLSKDTYDDDLDNLLAQIGDQYADLFLAAKNLSDAILLSDILRVNTEITKAPLSASMIKRYDEHHQDLTLLKALVRQQLPEKYKEIFFDQSKNGYAGYIDGGASQEEFYKFIKPILEKMDGTEELLVKLNREDLLRKQRTFDNGSIPHQIHLGELHAILRRQEDFYPFLKDNREKIEKILTFRIPYYVGPLARGNSRFAWMTRKSEETITPWNFEEVVDKGASAQSFIERMTNFDKNLPNEKVLPKHSLLYEYFTVYNELTKVKYVTEGMRKPAFLSGEQKKAIVDLLFKTNRKVTVKQLKEDYFKKIECFDSVEISGVEDRFNASLGTYHDLLKIIKDKDFLDNEENEDILEDIVLTLTLFEDREMIEERLKTYAHLFDDKVMKQLKRRRYTGWGRLSRKLINGIRDKQSGKTILDFLKSDGFANRNFMQLIHDDSLTFKEDIQKAQVSGQGDSLHEHIANLAGSPAIKKGILQTVKVVDELVKVMGRHKPENIVIEMARENQTTQKGQKNSRERMKRIEEGIKELGSQILKEHPVENTQLQNEKLYLYYLQNGRDMYVDQELDINRLSDYDVDHIVPQSFLKDDSIDNKVLTRSDKARGKSDNVPSEEVVKKMKNYWRQLLNAKLITQRKFDNLTKAERGGLSELDKAGFIKRQLVETRQITKHVAQILDSRMNTKYDENDKLIREVKVITLKSKLVSDFRKDFQFYKVREINNYHHAHDAYLNAVVGTALIKKYPKLESEFVYGDYKVYDVRKMIAKSEQEIGKATAKYFFYSNIMNFFKTEITLANGEIRKRPLIETNGETGEIVWDKGRDFATVRKVLSMPQVNIVKKTEVQTGGFSKESILPKRNSDKLIARKKDWDPKKYGGFDSPTVAYSVLVVAKVEKGKSKKLKSVKELLGITIMERSSFEKNPIDFLEAKGYKEVKKDLIIKLPKYSLFELENGRKRMLASAGELQKGNELALPSKYVNFLYLASHYEKLKGSPEDNEQKQLFVEQHKHYLDEIIEQISEFSKRVILADANLDKVLSAYNKHRDKPIREQAENIIHLFTLTNLGAPAAFKYFDTTIDRKRYTSTKEVLDATLIHQSITGLYETRIDLSQLGGDGGEAAAKGSSGGSGGTLGDQGSRGSDPLPEPRVTLTVEGIPTEFLVNTGAEHSVLTKPMGKMGSKRTVVAGATGSKVYPWTTKRLLKIGQKQVTHSFLVIPECPAPLLGRDLLTKLKAQIQFSTEGPQVTWEDRPAMCLVLNLEEEYRLHEKPVPPSIDPSWLQLFPMVWAEKAGMGLANQVPPVVVELKSDASPVAVRQYPMSKEAREGIRPHIQRFLDLGILVPCQSPWNTPLLPVKKPGTNDYRPVQDLREVNKRVQDIHPTVPNPYNLLSSLPPSHTWYSVLDLKDAFFCLKLHPNSQPLFAFEWRDPEKGNTGQLTWTRLPQGFKNSPTLFNEALHRDLASFRALNPQVVMLQYVDDLLVAAPTYRDCKEGTRRLLQELSKLGYRVSAKKAQLCREEVTYLGYLLKGGKRWLTPARKATVMKIPTPTTPRQVREFLGTAGFCRLWIPGFASLAAPLYPLTRPKVPFTWTEAHQEAFGRIKEALLSAPALALPDLTKPFALYVDEKEGVARGVLTQTLGPWRRPVAYLSKKLDPVASGWPTCLKAIAAVALLLKDADKLTLGQNVLVIAPHNLESIVRQPPDRWMTNARMTHYQSLLLNERVSFAPPAILNPATLLPVESDDTPIHICSEILAEETGTRPDLRDQPLPGVPAWYTDGSSFIMDGRRQAGAAIVDNKRTVWASNLPEGTSAQKAELIALTQALRLAEGKSINIYTDSRYAFATAHVHGAIYKQRGWLTSAGKDIKNKEEILALLEAIHLPKRVAIIHCPGHQRGTDPVATGNRKADEAAKQAAQSTRILTETTKNAGKRTADGSEFEKRTADGSEFESPKKKAKVE

SEQ ID NO: 7112 - protein, 2218 aa, synthetic construct
MPAAKRVKLDGGDKKYSIGLDIGTNSVGWAVITDEYKVPSKKFKVLGNTDRHSIKKNLIGALLFDSGETAEATRLKRTARRRYTRRKNRICYLQEIFSNEMAKVDDSFFHRLEESFLVEEDKKHERHPIFGNIVDEVAYHEKYPTIYHLRKKLVDSTDKADLRLIYLALAHMIKFRGHFLIEGDLNPDNSDVDKLFIQLVQTYNQLFEENPINASGVDAKAILSARLSKSRRLENLIAQLPGEKKNGLFGNLIALSLGLTPNFKSNFDLAEDAKLQLSKDTYDDDLDNLLAQIGDQYADLFLAAKNLSDAILLSDILRVNTEITKAPLSASMIKRYDEHHQDLTLLKALVRQQLPEKYKEIFFDQSKNGYAGYIDGGASQEEFYKFIKPILEKMDGTEELLVKLNREDLLRKQRTFDNGSIPHQIHLGELHAILRRQEDFYPFLKDNREKIEKILTFRIPYYVGPLARGNSRFAWMTRKSEETITPWNFEEVVDKGASAQSFIERMTNFDKNLPNEKVLPKHSLLYEYFTVYNELTKVKYVTEGMRKPAFLSGEQKKAIVDLLFKTNRKVTVKQLKEDYFKKIECFDSVEISGVEDRFNASLGTYHDLLKIIKDKDFLDNEENEDILEDIVLTLTLFEDREMIEERLKTYAHLFDDKVMKQLKRRRYTGWGRLSRKLINGIRDKQSGKTILDFLKSDGFANRNFMQLIHDDSLTFKEDIQKAQVSGQGDSLHEHIANLAGSPAIKKGILQTVKVVDELVKVMGRHKPENIVIEMARENQTTQKGQKNSRERMKRIEEGIKELGSQILKEHPVENTQLQNEKLYLYYLQNGRDMYVDQELDINRLSDYDVDHIVPQSFLKDDSIDNKVLTRSDKARGKSDNVPSEEVVKKMKNYWRQLLNAKLITQRKFDNLTKAERGGLSELDKAGFIKRQLVETRQITKHVAQILDSRMNTKYDENDKLIREVKVITLKSKLVSDFRKDFQFYKVREINNYHHAHDAYLNAVVGTALIKKYPKLESEFVYGDYKVYDVRKMIAKSEQEIGKATAKYFFYSNIMNFFKTEITLANGEIRKRPLIETNGETGEIVWDKGRDFATVRKVLSMPQVNIVKKTEVQTGGFSKESILPKRNSDKLIARKKDWDPKKYGGFDSPTVAYSVLVVAKVEKGKSKKLKSVKELLGITIMERSSFEKNPIDFLEAKGYKEVKKDLIIKLPKYSLFELENGRKRMLASAGELQKGNELALPSKYVNFLYLASHYEKLKGSPEDNEQKQLFVEQHKHYLDEIIEQISEFSKRVILADANLDKVLSAYNKHRDKPIREQAENIIHLFTLTNLGAPAAFKYFDTTIDRKRYTSTKEVLDATLIHQSITGLYETRIDLSQLGGDGGEAAAKGSSGGSGGTLGDQGSRGSDPLPEPRVTLTVEGIPTEFLVNTGAEHSVLTKPMGKMGSKRTVVAGATGSKVYPWTTKRLLKIGQKQVTHSFLVIPECPAPLLGRDLLTKLKAQIQFSTEGPQVTWEDRPAMCLVLNLEEEYRLHEKPVPPSIDPSWLQLFPMVWAEKAGMGLANQVPPVVVELKSDASPVAVRQYPMSKEAREGIRPHIQRFLDLGILVPCQSPWNTPLLPVKKPGTNDYRPVQDLREVNKRVQDIHPTVPNPYNLLSSLPPSHTWYSVLDLKDAFFCLKLHPNSQPLFAFEWRDPEKGNTGQLTWTRLPQGFKNSPTLFNEALHRDLASFRALNPQVVMLQYVDDLLVAAPTYRDCKEGTRRLLQELSKLGYRVSAKKAQLCREEVTYLGYLLKGGKRWLTPARKATVMKIPTPTTPRQVREFLGKAGFCRLFIPGFASLAAPLYPLTRPKVPFTWTEAHQEAFGRIKEALLSAPALALPDLTKPFALYVDEKEGVARGVLTQTLGPWRRPVAYLSKKLDPVASGWPTCLKAIAAVALLLKDADKLTLGQNVLVIAPHNLESIVRQPPDRWMTNARMTHYQSLLLNERVSFAPPAILNPATLLPVESDDTPIHICSEILAEETGTRPDLRDQPLPGVPAWYTDGSSFIMDGRRQAGAAIVDNKRTVWASNLPEGTSAQKAELIALTQALRLAEGKSINIYTDSRYAFATAHVHGAIYKQRGWLTSAGKDIKNKEEILALLEAIHLPKRVAIIHCPGHQRGTDPVATGNRKADEAAKQAAQSTRILTETTKNAGKRTADGSEFEKRTADGSEFESPKKKAKVE

SEQ ID NO: 7113 - protein, 2096 aa, synthetic construct
MPAAKRVKLDGGDKKYSIGLDIGTNSVGWAVITDEYKVPSKKFKVLGNTDRHSIKKNLIGALLFDSGETAEATRLKRTARRRYTRRKNRICYLQEIFSNEMAKVDDSFFHRLEESFLVEEDKKHERHPIFGNIVDEVAYHEKYPTIYHLRKKLVDSTDKADLRLIYLALAHMIKFRGHFLIEGDLNPDNSDVDKLFIQLVQTYNQLFEENPINASGVDAKAILSARLSKSRRLENLIAQLPGEKKNGLFGNLIALSLGLTPNFKSNFDLAEDAKLQLSKDTYDDDLDNLLAQIGDQYADLFLAAKNLSDAILLSDILRVNTEITKAPLSASMIKRYDEHHQDLTLLKALVRQQLPEKYKEIFFDQSKNGYAGYIDGGASQEEFYKFIKPILEKMDGTEELLVKLNREDLLRKQRTFDNGSIPHQIHLGELHAILRRQEDFYPFLKDNREKIEKILTFRIPYYVGPLARGNSRFAWMTRKSEETITPWNFEEVVDKGASAQSFIERMTNFDKNLPNEKVLPKHSLLYEYFTVYNELTKVKYVTEGMRKPAFLSGEQKKAIVDLLFKTNRKVTVKQLKEDYFKKIECFDSVEISGVEDRFNASLGTYHDLLKIIKDKDFLDNEENEDILEDIVLTLTLFEDREMIEERLKTYAHLFDDKVMKQLKRRRYTGWGRLSRKLINGIRDKQSGKTILDFLKSDGFANRNFMQLIHDDSLTFKEDIQKAQVSGQGDSLHEHIANLAGSPAIKKGILQTVKVVDELVKVMGRHKPENIVIEMARENQTTQKGQKNSRERMKRIEEGIKELGSQILKEHPVENTQLQNEKLYLYYLQNGRDMYVDQELDINRLSDYDVDHIVPQSFLKDDSIDNKVLTRSDKARGKSDNVPSEEVVKKMKNYWRQLLNAKLITQRKFDNLTKAERGGLSELDKAGFIKRQLVETRQITKHVAQILDSRMNTKYDENDKLIREVKVITLKSKLVSDFRKDFQFYKVREINNYHHAHDAYLNAVVGTALIKKYPKLESEFVYGDYKVYDVRKMIAKSEQEIGKATAKYFFYSNIMNFFKTEITLANGEIRKRPLIETNGETGEIVWDKGRDFATVRKVLSMPQVNIVKKTEVQTGGFSKESILPKRNSDKLIARKKDWDPKKYGGFDSPTVAYSVLVVAKVEKGKSKKLKSVKELLGITIMERSSFEKNPIDFLEAKGYKEVKKDLIIKLPKYSLFELENGRKRMLASAGELQKGNELALPSKYVNFLYLASHYEKLKGSPEDNEQKQLFVEQHKHYLDEIIEQISEFSKRVILADANLDKVLSAYNKHRDKPIREQAENIIHLFTLTNLGAPAAFKYFDTTIDRKRYTSTKEVLDATLIHQSITGLYETRIDLSQLGGDGGEAAAKGSSGGSGGTLNLEDEYRLYETSAEPEVSPGSTWLSDFPQAWAETGGMGLAVRQAPLIIPLKATSTPVSIKQYPMSQEAKLGIKPHIQRLLDQGILVPCQSPWNTPLLPVKKPGTNDYRPVQDLREVNKRVEDIHPTVPNPYNLLSGLPPSHRWYTVLDLKDAFFCLRLHPTSQPLFAFEWRDPGMGISGQLTWTRLPQGFKNSPTLFNEALHRDLADFRIQHPDLILLQYVDDILLAATSELDCQQGTRALLLTLGNLGYRASAKKAQLCQKQVKYLGYLLKEGQRWLTEARKETVMGQPTPKTPRQLREFLGTAGFCRLWIPGFAEMAAPLYPLTKPGTLFNWGPDQQKAYQEIKQALLTAPALGLPDLTKPFELFVDEKQGYAKGVLTQKLGPWRRPVAYLSKKLDPVAAGWPPCLRMVAAIAVLRKDAGKLTMGQPLVILAPHAVEALVKQPPDRWLSNARMTHYQAMLLDTDRVQFGPVVALNPATLLPLPEEGAPHDCLEILAETHGTRPDLTDQPIPDADHTWYTDGSSFLQEGQRKAGAAVTTETEVIWARALPAGTSAQRAELIALTQALKMAEGKRLNVYTDSRYAFATAHIHGEIYRRRGWLTSEGREIKNKSEILALLKALFLPKRLSIIHCLGHQKGDSAEARGNRLADQAAREAAIKTPPDTSTLLAGKRTADGSEFEKRTADGSEFESPKKKAKVE

SEQ ID NO: 7114 - protein, 2096 aa, synthetic construct
MPAAKRVKLDGGDKKYSIGLDIGTNSVGWAVITDEYKVPSKKFKVLGNTDRHSIKKNLIGALLFDSGETAEATRLKRTARRRYTRRKNRICYLQEIFSNEMAKVDDSFFHRLEESFLVEEDKKHERHPIFGNIVDEVAYHEKYPTIYHLRKKLVDSTDKADLRLIYLALAHMIKFRGHFLIEGDLNPDNSDVDKLFIQLVQTYNQLFEENPINASGVDAKAILSARLSKSRRLENLIAQLPGEKKNGLFGNLIALSLGLTPNFKSNFDLAEDAKLQLSKDTYDDDLDNLLAQIGDQYADLFLAAKNLSDAILLSDILRVNTEITKAPLSASMIKRYDEHHQDLTLLKALVRQQLPEKYKEIFFDQSKNGYAGYIDGGASQEEFYKFIKPILEKMDGTEELLVKLNREDLLRKQRTFDNGSIPHQIHLGELHAILRRQEDFYPFLKDNREKIEKILTFRIPYYVGPLARGNSRFAWMTRKSEETITPWNFEEVVDKGASAQSFIERMTNFDKNLPNEKVLPKHSLLYEYFTVYNELTKVKYVTEGMRKPAFLSGEQKKAIVDLLFKTNRKVTVKQLKEDYFKKIECFDSVEISGVEDRFNASLGTYHDLLKIIKDKDFLDNEENEDILEDIVLTLTLFEDREMIEERLKTYAHLFDDKVMKQLKRRRYTGWGRLSRKLINGIRDKQSGKTILDFLKSDGFANRNFMQLIHDDSLTFKEDIQKAQVSGQGDSLHEHIANLAGSPAIKKGILQTVKVVDELVKVMGRHKPENIVIEMARENQTTQKGQKNSRERMKRIEEGIKELGSQILKEHPVENTQLQNEKLYLYYLQNGRDMYVDQELDINRLSDYDVDHIVPQSFLKDDSIDNKVLTRSDKARGKSDNVPSEEVVKKMKNYWRQLLNAKLITQRKFDNLTKAERGGLSELDKAGFIKRQLVETRQITKHVAQILDSRMNTKYDENDKLIREVKVITLKSKLVSDFRKDFQFYKVREINNYHHAHDAYLNAVVGTALIKKYPKLESEFVYGDYKVYDVRKMIAKSEQEIGKATAKYFFYSNIMNFFKTEITLANGEIRKRPLIETNGETGEIVWDKGRDFATVRKVLSMPQVNIVKKTEVQTGGFSKESILPKRNSDKLIARKKDWDPKKYGGFDSPTVAYSVLVVAKVEKGKSKKLKSVKELLGITIMERSSFEKNPIDFLEAKGYKEVKKDLIIKLPKYSLFELENGRKRMLASAGELQKGNELALPSKYVNFLYLASHYEKLKGSPEDNEQKQLFVEQHKHYLDEIIEQISEFSKRVILADANLDKVLSAYNKHRDKPIREQAENIIHLFTLTNLGAPAAFKYFDTTIDRKRYTSTKEVLDATLIHQSITGLYETRIDLSQLGGDGGEAAAKGSSGGSGGTLNIEDEYRLHETSKGPDVPLGSTWLSDFPQAWAETGGMGLAVRQAPLIIPLKATSTPVSIKQYPMSQEARLGIKPHIQRLLDQGILVPCQSPWNTPLLPVKKPGTNDYRPVQDLREVNKRVEDIHPTVPNPYNLLSGLPPSHQWYTVLDLKDAFFCLRLHPTSQSLFAFEWRDPEMGISGQLTWTRLPQGFKNSPTLFDEALHRDLADFRIQHPDLILLQYVDDLLLAATSELDCQQGTRALLQTLGDLGYRASAKKAQICQKQVKYLGYLLKEGQRWLTEARKETVMGQPTPKTPRQLREFLGTAGFCRLWIPGFAEMAAPLYPLTKTGTLFEWGPDQQKAYQEIKQALLTAPALGLPDLTKPFELFVDEKQGYAKGVLTQKLGPWRRPVAYLSKKLDPVAAGWPPCLRMVAAIAVLTKDAGKLTMGQPLVILAPHAVEALVKQPPDRWLSNARMTHYQALLLDTDRVQFGPIVALNPATLLPLPEEGLQHDCLDILAEAHGTRPDLTDQPLPDADHTWYTDGSSFLQEGQRKAGAAVTTETEVVWAKALPAGTSAQRAELIALTQALKMAEGKKLNVYTDSRYAFATAHIHGEIYRRRGLLTSEGKEIKNKDEILALLKALFLPKRLSIIHCPGHQKGNRAEARGNRMADQAAREVATRETPETSTLLAGKRTADGSEFEKRTADGSEFESPKKKAKVE

SEQ ID NO: 7115 - protein, 2096 aa, synthetic construct
MPAAKRVKLDGGDKKYSIGLDIGTNSVGWAVITDEYKVPSKKFKVLGNTDRHSIKKNLIGALLFDSGETAEATRLKRTARRRYTRRKNRICYLQEIFSNEMAKVDDSFFHRLEESFLVEEDKKHERHPIFGNIVDEVAYHEKYPTIYHLRKKLVDSTDKADLRLIYLALAHMIKFRGHFLIEGDLNPDNSDVDKLFIQLVQTYNQLFEENPINASGVDAKAILSARLSKSRRLENLIAQLPGEKKNGLFGNLIALSLGLTPNFKSNFDLAEDAKLQLSKDTYDDDLDNLLAQIGDQYADLFLAAKNLSDAILLSDILRVNTEITKAPLSASMIKRYDEHHQDLTLLKALVRQQLPEKYKEIFFDQSKNGYAGYIDGGASQEEFYKFIKPILEKMDGTEELLVKLNREDLLRKQRTFDNGSIPHQIHLGELHAILRRQEDFYPFLKDNREKIEKILTFRIPYYVGPLARGNSRFAWMTRKSEETITPWNFEEVVDKGASAQSFIERMTNFDKNLPNEKVLPKHSLLYEYFTVYNELTKVKYVTEGMRKPAFLSGEQKKAIVDLLFKTNRKVTVKQLKEDYFKKIECFDSVEISGVEDRFNASLGTYHDLLKIIKDKDFLDNEENEDILEDIVLTLTLFEDREMIEERLKTYAHLFDDKVMKQLKRRRYTGWGRLSRKLINGIRDKQSGKTILDFLKSDGFANRNFMQLIHDDSLTFKEDIQKAQVSGQGDSLHEHIANLAGSPAIKKGILQTVKVVDELVKVMGRHKPENIVIEMARENQTTQKGQKNSRERMKRIEEGIKELGSQILKEHPVENTQLQNEKLYLYYLQNGRDMYVDQELDINRLSDYDVDHIVPQSFLKDDSIDNKVLTRSDKARGKSDNVPSEEVVKKMKNYWRQLLNAKLITQRKFDNLTKAERGGLSELDKAGFIKRQLVETRQITKHVAQILDSRMNTKYDENDKLIREVKVITLKSKLVSDFRKDFQFYKVREINNYHHAHDAYLNAVVGTALIKKYPKLESEFVYGDYKVYDVRKMIAKSEQEIGKATAKYFFYSNIMNFFKTEITLANGEIRKRPLIETNGETGEIVWDKGRDFATVRKVLSMPQVNIVKKTEVQTGGFSKESILPKRNSDKLIARKKDWDPKKYGGFDSPTVAYSVLVVAKVEKGKSKKLKSVKELLGITIMERSSFEKNPIDFLEAKGYKEVKKDLIIKLPKYSLFELENGRKRMLASAGELQKGNELALPSKYVNFLYLASHYEKLKGSPEDNEQKQLFVEQHKHYLDEIIEQISEFSKRVILADANLDKVLSAYNKHRDKPIREQAENIIHLFTLTNLGAPAAFKYFDTTIDRKRYTSTKEVLDATLIHQSITGLYETRIDLSQLGGDGGEAAAKGSSGGSGGTLNIEDEYRLHETSKGPDVPLGSTWLSDFPQAWAETGGMGLAVRQAPLIIPLKATSTPVSIKQYPMSQEARLGIKPHIQRLLDQGILVPCQSPWNTPLLPVKKPGTNDYRPVQDLREVNKRVEDIHPTVPNPYNLLSGLPPSHQWYTVLDLKDAFFCLRLHPTSQSLFAFEWRDPEMGISGQLTWTRLPQGFKNSPTLFNEALHRDLADFRIQHPDLILLQYVDDLLLAATSELDCQQGTRALLQTLGDLGYRASAKKAQICQKQVKYLGYLLKEGQRWLTEARKETVMGQPTPKTPRQLREFLGKAGFCRLFIPGFAEMAAPLYPLTKPGTLFEWGPDQQKAYQEIKQALLTAPALGLPDLTKPFELFVDEKQGYAKGVLTQKLGPWRRPVAYLSKKLDPVAAGWPPCLRMVAAIAVLTKDAGKLTMGQPLVILAPHAVEALVKQPPDRWLSNARMTHYQALLLDTDRVQFGPIVALNPATLLPLPEEGLQHDCLDILAEAHGTRPDLTDQPLPDADHTWYTDGSSFLQEGQRKAGAAVTTETEVVWAKALPAGTSAQRAELIALTQALKMAEGKKLNVYTDSRYAFATAHIHGEIYRRRGWLTSEGKEIKNKDEILALLKALFLPKRLSIIHCPGHQKGNRAEARGNRMADQAAREVATRETPETSTLLAGKRTADGSEFEKRTADGSEFESPKKKAKVE

SEQ ID NO: 7116 - protein, 2096 aa, synthetic construct
MPAAKRVKLDGGDKKYSIGLDIGTNSVGWAVITDEYKVPSKKFKVLGNTDRHSIKKNLIGALLFDSGETAEATRLKRTARRRYTRRKNRICYLQEIFSNEMAKVDDSFFHRLEESFLVEEDKKHERHPIFGNIVDEVAYHEKYPTIYHLRKKLVDSTDKADLRLIYLALAHMIKFRGHFLIEGDLNPDNSDVDKLFIQLVQTYNQLFEENPINASGVDAKAILSARLSKSRRLENLIAQLPGEKKNGLFGNLIALSLGLTPNFKSNFDLAEDAKLQLSKDTYDDDLDNLLAQIGDQYADLFLAAKNLSDAILLSDILRVNTEITKAPLSASMIKRYDEHHQDLTLLKALVRQQLPEKYKEIFFDQSKNGYAGYIDGGASQEEFYKFIKPILEKMDGTEELLVKLNREDLLRKQRTFDNGSIPHQIHLGELHAILRRQEDFYPFLKDNREKIEKILTFRIPYYVGPLARGNSRFAWMTRKSEETITPWNFEEVVDKGASAQSFIERMTNFDKNLPNEKVLPKHSLLYEYFTVYNELTKVKYVTEGMRKPAFLSGEQKKAIVDLLFKTNRKVTVKQLKEDYFKKIECFDSVEISGVEDRFNASLGTYHDLLKIIKDKDFLDNEENEDILEDIVLTLTLFEDREMIEERLKTYAHLFDDKVMKQLKRRRYTGWGRLSRKLINGIRDKQSGKTILDFLKSDGFANRNFMQLIHDDSLTFKEDIQKAQVSGQGDSLHEHIANLAGSPAIKKGILQTVKVVDELVKVMGRHKPENIVIEMARENQTTQKGQKNSRERMKRIEEGIKELGSQILKEHPVENTQLQNEKLYLYYLQNGRDMYVDQELDINRLSDYDVDHIVPQSFLKDDSIDNKVLTRSDKARGKSDNVPSEEVVKKMKNYWRQLLNAKLITQRKFDNLTKAERGGLSELDKAGFIKRQLVETRQITKHVAQILDSRMNTKYDENDKLIREVKVITLKSKLVSDFRKDFQFYKVREINNYHHAHDAYLNAVVGTALIKKYPKLESEFVYGDYKVYDVRKMIAKSEQEIGKATAKYFFYSNIMNFFKTEITLANGEIRKRPLIETNGETGEIVWDKGRDFATVRKVLSMPQVNIVKKTEVQTGGFSKESILPKRNSDKLIARKKDWDPKKYGGFDSPTVAYSVLVVAKVEKGKSKKLKSVKELLGITIMERSSFEKNPIDFLEAKGYKEVKKDLIIKLPKYSLFELENGRKRMLASAGELQKGNELALPSKYVNFLYLASHYEKLKGSPEDNEQKQLFVEQHKHYLDEIIEQISEFSKRVILADANLDKVLSAYNKHRDKPIREQAENIIHLFTLTNLGAPAAFKYFDTTIDRKRYTSTKEVLDATLIHQSITGLYETRIDLSQLGGDGGEAAAKGSSGGSGGTLNIEDEHRLHETSKEPDVSLGSTWLSDFPQAWAETGGMGLAVRQAPLIIPLKATSTPVSIKQYPMSQEARLGIKPHIQRLLDQGILVPCQSPWNTPLLPVKKPGTNDYRPVQDLREVNKRVEDIHPTVPNPYNLLSGLPPSHQWYTVLDLKDAFFCLRLHPTSQPLFAFEWRDPEMGISGQLTWTRLPQGFKNSPTLFDEALHRDLADFRIQHPDLILLQYVDDLLLAATSELDCQQGTRALLQTLGNLGYRASAKKAQICQKQVKYLGYLLKEGQRWLTEARKETVMGQPTPKTPRQLREFLGTAGFCRLWIPGFAEMAAPLYPLTKTGTLFNWGPDQQKAYQEIKQALLTAPALGLPDLTKPFELFVDEKQGYAKGVLTQKLGPWRRPVAYLSKKLDPVAAGWPPCLRMVAAIAVLTKDAGKLTMGQPLVILAPHAVEALVKQPPDRWLSNARMTHYQALLLDTDRVQFGPVVALNPATLLPLPEEGLQHNCLDILAEAHGTRPDLTDQPLPDADHTWYTDGSSLLQEGQRKAGAAVTTETEVIWAKALPAGTSAQRAELIALTQALKMAEGKKLNVYTDSRYAFATAHIHGEIYRRRGLLTSEGKEIKNKDEILALLKALFLPKRLSIIHCPGHQKGHSAEARGNRMADQAARKAAITETPDTSTLLAGKRTADGSEFEKRTADGSEFESPKKKAKVE

SEQ ID NO: 7117 - protein, 2090 aa, synthetic construct
MPAAKRVKLDGGDKKYSIGLDIGTNSVGWAVITDEYKVPSKKFKVLGNTDRHSIKKNLIGALLFDSGETAEATRLKRTARRRYTRRKNRICYLQEIFSNEMAKVDDSFFHRLEESFLVEEDKKHERHPIFGNIVDEVAYHEKYPTIYHLRKKLVDSTDKADLRLIYLALAHMIKFRGHFLIEGDLNPDNSDVDKLFIQLVQTYNQLFEENPINASGVDAKAILSARLSKSRRLENLIAQLPGEKKNGLFGNLIALSLGLTPNFKSNFDLAEDAKLQLSKDTYDDDLDNLLAQIGDQYADLFLAAKNLSDAILLSDILRVNTEITKAPLSASMIKRYDEHHQDLTLLKALVRQQLPEKYKEIFFDQSKNGYAGYIDGGASQEEFYKFIKPILEKMDGTEELLVKLNREDLLRKQRTFDNGSIPHQIHLGELHAILRRQEDFYPFLKDNREKIEKILTFRIPYYVGPLARGNSRFAWMTRKSEETITPWNFEEVVDKGASAQSFIERMTNFDKNLPNEKVLPKHSLLYEYFTVYNELTKVKYVTEGMRKPAFLSGEQKKAIVDLLFKTNRKVTVKQLKEDYFKKIECFDSVEISGVEDRFNASLGTYHDLLKIIKDKDFLDNEENEDILEDIVLTLTLFEDREMIEERLKTYAHLFDDKVMKQLKRRRYTGWGRLSRKLINGIRDKQSGKTILDFLKSDGFANRNFMQLIHDDSLTFKEDIQKAQVSGQGDSLHEHIANLAGSPAIKKGILQTVKVVDELVKVMGRHKPENIVIEMARENQTTQKGQKNSRERMKRIEEGIKELGSQILKEHPVENTQLQNEKLYLYYLQNGRDMYVDQELDINRLSDYDVDHIVPQSFLKDDSIDNKVLTRSDKARGKSDNVPSEEVVKKMKNYWRQLLNAKLITQRKFDNLTKAERGGLSELDKAGFIKRQLVETRQITKHVAQILDSRMNTKYDENDKLIREVKVITLKSKLVSDFRKDFQFYKVREINNYHHAHDAYLNAVVGTALIKKYPKLESEFVYGDYKVYDVRKMIAKSEQEIGKATAKYFFYSNIMNFFKTEITLANGEIRKRPLIETNGETGEIVWDKGRDFATVRKVLSMPQVNIVKKTEVQTGGFSKESILPKRNSDKLIARKKDWDPKKYGGFDSPTVAYSVLVVAKVEKGKSKKLKSVKELLGITIMERSSFEKNPIDFLEAKGYKEVKKDLIIKLPKYSLFELENGRKRMLASAGELQKGNELALPSKYVNFLYLASHYEKLKGSPEDNEQKQLFVEQHKHYLDEIIEQISEFSKRVILADANLDKVLSAYNKHRDKPIREQAENIIHLFTLTNLGAPAAFKYFDTTIDRKRYTSTKEVLDATLIHQSITGLYETRIDLSQLGGDGGEAAAKGSSGGSGGTLQLDDEYRLYSPLVKPDQNIQFWLEQFPQAWAETAGMGLAKQVPPQVIQLKASATPVSVRQYPLSKEAQEGIRPHVQRLIQQGILVPVQSPWNTPLLPVRKPGTNDYRPVQDLREVNKRVQDIHPTVPNPYNLLCALPPQRSWYTVLDLKDAFFCLRLHPTSQPLFAFEWRDPGTGRTGQLTWTRLPQGFKNSPTIFDEALHRDLANFRIQHPQVTLLQYVDDLLLAGATKQDCLEGTKALLLELSDLGYRASAKKAQICRREVTYLGYSLRDGQRWLTEARKKTVVQIPAPTTAKQVREFLGTAGFCRLWIPGFATLAAPLYPLTKEKGEFSWAPEHQKAFDAIKKALLSAPALALPDVTKPFTLYVDERKGVARGVLTQTLGPWRRPVAYLSKKLDPVASGWPVCLKAIAAVAILVKDADKLTLGQNITVIAPHALENIVRQPPDRWMTNARMTHYQSLLLTERVTFAPPAALNPATLLPEETDEPVTHDCHQLLIEETGVRKDLTDIPLTGEVLTWFTDGSSYVVEGKRMAGAAVVDGTRTIWASSLPEGTSAQKAELMALTQALRLAEGKSINIYTDSRYAFATAHVHGAIYKQRGLLTSAGREIKNKEEILSLLEALHLPKRLAIIHCPGHQKAKDPISRGNQMADRVAKQAAQGVNLLAGKRTADGSEFEKRTADGSEFESPKKKAKVE

SEQ ID NO: 7118 - protein, 2176 aa, synthetic construct
MPAAKRVKLDGGDKKYSIGLDIGTNSVGWAVITDEYKVPSKKFKVLGNTDRHSIKKNLIGALLFDSGETAEATRLKRTARRRYTRRKNRICYLQEIFSNEMAKVDDSFFHRLEESFLVEEDKKHERHPIFGNIVDEVAYHEKYPTIYHLRKKLVDSTDKADLRLIYLALAHMIKFRGHFLIEGDLNPDNSDVDKLFIQLVQTYNQLFEENPINASGVDAKAILSARLSKSRRLENLIAQLPGEKKNGLFGNLIALSLGLTPNFKSNFDLAEDAKLQLSKDTYDDDLDNLLAQIGDQYADLFLAAKNLSDAILLSDILRVNTEITKAPLSASMIKRYDEHHQDLTLLKALVRQQLPEKYKEIFFDQSKNGYAGYIDGGASQEEFYKFIKPILEKMDGTEELLVKLNREDLLRKQRTFDNGSIPHQIHLGELHAILRRQEDFYPFLKDNREKIEKILTFRIPYYVGPLARGNSRFAWMTRKSEETITPWNFEEVVDKGASAQSFIERMTNFDKNLPNEKVLPKHSLLYEYFTVYNELTKVKYVTEGMRKPAFLSGEQKKAIVDLLFKTNRKVTVKQLKEDYFKKIECFDSVEISGVEDRFNASLGTYHDLLKIIKDKDFLDNEENEDILEDIVLTLTLFEDREMIEERLKTYAHLFDDKVMKQLKRRRYTGWGRLSRKLINGIRDKQSGKTILDFLKSDGFANRNFMQLIHDDSLTFKEDIQKAQVSGQGDSLHEHIANLAGSPAIKKGILQTVKVVDELVKVMGRHKPENIVIEMARENQTTQKGQKNSRERMKRIEEGIKELGSQILKEHPVENTQLQNEKLYLYYLQNGRDMYVDQELDINRLSDYDVDHIVPQSFLKDDSIDNKVLTRSDKARGKSDNVPSEEVVKKMKNYWRQLLNAKLITQRKFDNLTKAERGGLSELDKAGFIKRQLVETRQITKHVAQILDSRMNTKYDENDKLIREVKVITLKSKLVSDFRKDFQFYKVREINNYHHAHDAYLNAVVGTALIKKYPKLESEFVYGDYKVYDVRKMIAKSEQEIGKATAKYFFYSNIMNFFKTEITLANGEIRKRPLIETNGETGEIVWDKGRDFATVRKVLSMPQVNIVKKTEVQTGGFSKESILPKRNSDKLIARKKDWDPKKYGGFDSPTVAYSVLVVAKVEKGKSKKLKSVKELLGITIMERSSFEKNPIDFLEAKGYKEVKKDLIIKLPKYSLFELENGRKRMLASAGELQKGNELALPSKYVNFLYLASHYEKLKGSPEDNEQKQLFVEQHKHYLDEIIEQISEFSKRVILADANLDKVLSAYNKHRDKPIREQAENIIHLFTLTNLGAPAAFKYFDTTIDRKRYTSTKEVLDATLIHQSITGLYETRIDLSQLGGDGGEAAAKGSSGGSGGMDPLQLLQPLEAEIKGTKLKAHWNSGATITCVPQAFLEEEVPIKNIWIKTIHGEKEQPVYYLTFKIQGRKVEAEVISSPYDYILVSPSDIPWLMKKPLQLTTLVPLQEYEERLLKQTMLTGSYKEKLQSLFLKYDALWQHWENQVGHRRIKPHHIATGTVNPRPQKQYPINPKAKASIQTVINDLLKQGVLIQQNSIMNTPVYPVPKPDGKWRMVLDYREVNKTIPLIAAQNQHSAGILSSIFRGKYKTTLDLSNGFWAHSITPESYWLTAFTWLGQQYCWTRLPQGFLNSPALFNADVVDLLKEVPNVQVYVDDIYISHDDPREHLEQLEKVFSLLLNAGYVVSLKKSEIAQHEVEFLGFNITKEGRGLTETFKQKLLNITPPRDLKQLQSILGLLNFARNFIPNFSELVKPLYNIIATAPGKYITWTTDNSQQLQNIISMLNSAENLEERNPEVRLIMKVNTSPSAGYIRFYNEFAKRPIMYLNYVYTKAEVKFTNTEKLLTTIHKGLIKALDLGMGQEILVYSPIVSMTKIQKTPLPERKALPIRWITWMSYLEDPRIQFHYDKTLPELQQVPTVTDDIIAKIKHPSEFSMVFYTDGSAIKHPNVNKSHNAGMGIAQVQFKPEFTVINTWSIPLGDHTAQLAEVAAVEFACKKALKIDGPVLIVTDSFYVAESVNKELPYWQSNGFFNNKKKPLKHVSKWKSIADCIQLKPDIIIIHEKGHQPTASTFHTEGNNLADKLATQGSYVVNAGKRTADGSEFEKRTADGSEFESPKKKAKVE

SEQ ID NO: 7119 - protein, 2094 aa, synthetic construct
MPAAKRVKLDGGDKKYSIGLDIGTNSVGWAVITDEYKVPSKKFKVLGNTDRHSIKKNLIGALLFDSGETAEATRLKRTARRRYTRRKNRICYLQEIFSNEMAKVDDSFFHRLEESFLVEEDKKHERHPIFGNIVDEVAYHEKYPTIYHLRKKLVDSTDKADLRLIYLALAHMIKFRGHFLIEGDLNPDNSDVDKLFIQLVQTYNQLFEENPINASGVDAKAILSARLSKSRRLENLIAQLPGEKKNGLFGNLIALSLGLTPNFKSNFDLAEDAKLQLSKDTYDDDLDNLLAQIGDQYADLFLAAKNLSDAILLSDILRVNTEITKAPLSASMIKRYDEHHQDLTLLKALVRQQLPEKYKEIFFDQSKNGYAGYIDGGASQEEFYKFIKPILEKMDGTEELLVKLNREDLLRKQRTFDNGSIPHQIHLGELHAILRRQEDFYPFLKDNREKIEKILTFRIPYYVGPLARGNSRFAWMTRKSEETITPWNFEEVVDKGASAQSFIERMTNFDKNLPNEKVLPKHSLLYEYFTVYNELTKVKYVTEGMRKPAFLSGEQKKAIVDLLFKTNRKVTVKQLKEDYFKKIECFDSVEISGVEDRFNASLGTYHDLLKIIKDKDFLDNEENEDILEDIVLTLTLFEDREMIEERLKTYAHLFDDKVMKQLKRRRYTGWGRLSRKLINGIRDKQSGKTILDFLKSDGFANRNFMQLIHDDSLTFKEDIQKAQVSGQGDSLHEHIANLAGSPAIKKGILQTVKVVDELVKVMGRHKPENIVIEMARENQTTQKGQKNSRERMKRIEEGIKELGSQILKEHPVENTQLQNEKLYLYYLQNGRDMYVDQELDINRLSDYDVDHIVPQSFLKDDSIDNKVLTRSDKARGKSDNVPSEEVVKKMKNYWRQLLNAKLITQRKFDNLTKAERGGLSELDKAGFIKRQLVETRQITKHVAQILDSRMNTKYDENDKLIREVKVITLKSKLVSDFRKDFQFYKVREINNYHHAHDAYLNAVVGTALIKKYPKLESEFVYGDYKVYDVRKMIAKSEQEIGKATAKYFFYSNIMNFFKTEITLANGEIRKRPLIETNGETGEIVWDKGRDFATVRKVLSMPQVNIVKKTEVQTGGFSKESILPKRNSDKLIARKKDWDPKKYGGFDSPTVAYSVLVVAKVEKGKSKKLKSVKELLGITIMERSSFEKNPIDFLEAKGYKEVKKDLIIKLPKYSLFELENGRKRMLASAGELQKGNELALPSKYVNFLYLASHYEKLKGSPEDNEQKQLFVEQHKHYLDEIIEQISEFSKRVILADANLDKVLSAYNKHRDKPIREQAENIIHLFTLTNLGAPAAFKYFDTTIDRKRYTSTKEVLDATLIHQSITGLYETRIDLSQLGGDGGEAAAKGSSGGSGGVLNLEEEYRLHEKPVPSSIDPSWLQLFPTVWAERAGMGLANQVPPVVVELRSGASPVAVRQYPMSKEAREGIRPHIQRFLDLGVLVPCQSPWNTPLLPVKKPGTNDYRPVQDLREINKRVQDIHPTVPNPYNLLSSLPPSHTWYSVLDLKDAFFCLKLHPNSQPLFAFEWRDPEKGNTGQLTWTRLPQGFKNSPTLFDEALHRDLAPFRALNPQVVLLQYVDDLLVAAPTYRDCKEGTQKLLQELSKLGYRVSAKKAQLCQKEVTYLGYLLKEGKRWLTPARKATVMKIPPPTTPRQVREFLGTAGFCRLWIPGFASLAAPLYPLTKESIPFIWTEEHQKAFDRIKEALLSAPALALPDLTKPFTLYVDERAGVARGVLTQTLGPWRRPVAYLSKKLDPVASGWPTCLKAVAAVALLLKDADKLTLGQNVTVIASHSLESIVRQPPDRWMTNARMTHYQSLLLNERVSFAPPAVLNPATLLPVESEATPVHRCSEILAEETGTRRDLKDQPLPGVPAWYTDGSSFIAEGKRRAGAAIVDGKRTVWASSLPEGTSAQKAELVALTQALRLAEGKDINIYTDSRYAFATAHIHGAIYKQRGLLTSAGKDIKNKEEILALLEAIHLPKRVAIIHCPGHQKGNDPVATGNRRADEAAKQAALSTRVLAETTKPAGKRTADGSEFEKRTADGSEFESPKKKAKVE

SEQ ID NO: 7120 - protein, 2094 aa, synthetic construct
MPAAKRVKLDGGDKKYSIGLDIGTNSVGWAVITDEYKVPSKKFKVLGNTDRHSIKKNLIGALLFDSGETAEATRLKRTARRRYTRRKNRICYLQEIFSNEMAKVDDSFFHRLEESFLVEEDKKHERHPIFGNIVDEVAYHEKYPTIYHLRKKLVDSTDKADLRLIYLALAHMIKFRGHFLIEGDLNPDNSDVDKLFIQLVQTYNQLFEENPINASGVDAKAILSARLSKSRRLENLIAQLPGEKKNGLFGNLIALSLGLTPNFKSNFDLAEDAKLQLSKDTYDDDLDNLLAQIGDQYADLFLAAKNLSDAILLSDILRVNTEITKAPLSASMIKRYDEHHQDLTLLKALVRQQLPEKYKEIFFDQSKNGYAGYIDGGASQEEFYKFIKPILEKMDGTEELLVKLNREDLLRKQRTFDNGSIPHQIHLGELHAILRRQEDFYPFLKDNREKIEKILTFRIPYYVGPLARGNSRFAWMTRKSEETITPWNFEEVVDKGASAQSFIERMTNFDKNLPNEKVLPKHSLLYEYFTVYNELTKVKYVTEGMRKPAFLSGEQKKAIVDLLFKTNRKVTVKQLKEDYFKKIECFDSVEISGVEDRFNASLGTYHDLLKIIKDKDFLDNEENEDILEDIVLTLTLFEDREMIEERLKTYAHLFDDKVMKQLKRRRYTGWGRLSRKLINGIRDKQSGKTILDFLKSDGFANRNFMQLIHDDSLTFKEDIQKAQVSGQGDSLHEHIANLAGSPAIKKGILQTVKVVDELVKVMGRHKPENIVIEMARENQTTQKGQKNSRERMKRIEEGIKELGSQILKEHPVENTQLQNEKLYLYYLQNGRDMYVDQELDINRLSDYDVDHIVPQSFLKDDSIDNKVLTRSDKARGKSDNVPSEEVVKKMKNYWRQLLNAKLITQRKFDNLTKAERGGLSELDKAGFIKRQLVETRQITKHVAQILDSRMNTKYDENDKLIREVKVITLKSKLVSDFRKDFQFYKVREINNYHHAHDAYLNAVVGTALIKKYPKLESEFVYGDYKVYDVRKMIAKSEQEIGKATAKYFFYSNIMNFFKTEITLANGEIRKRPLIETNGETGEIVWDKGRDFATVRKVLSMPQVNIVKKTEVQTGGFSKESILPKRNSDKLIARKKDWDPKKYGGFDSPTVAYSVLVVAKVEKGKSKKLKSVKELLGITIMERSSFEKNPIDFLEAKGYKEVKKDLIIKLPKYSLFELENGRKRMLASAGELQKGNELALPSKYVNFLYLASHYEKLKGSPEDNEQKQLFVEQHKHYLDEIIEQISEFSKRVILADANLDKVLSAYNKHRDKPIREQAENIIHLFTLTNLGAPAAFKYFDTTIDRKRYTSTKEVLDATLIHQSITGLYETRIDLSQLGGDGGEAAAKGSSGGSGGVLNLEEEYRLHEKPVPSSIDPSWLQLFPTVWAERAGMGLANQVPPVVVELRSGASPVAVRQYPMSKEAREGIRPHIQRFLDLGVLVPCQSPWNTPLLPVKKPGTNDYRPVQDLREINKRVQDIHPTVPNPYNLLSSLPPSHTWYSVLDLKDAFFCLKLHPNSQPLFAFEWRDPEKGNTGQLTWTRLPQGFKNSPTLFNEALHRDLAPFRALNPQVVLLQYVDDLLVAAPTYRDCKEGTQKLLQELSKLGYRVSAKKAQLCQKEVTYLGYLLKEGKRWLTPARKATVMKIPPPTTPRQVREFLGTAGFCRLWIPGFASLAAPLYPLTKPSIPFIWTEEHQKAFDRIKEALLSAPALALPDLTKPFTLYVDERAGVARGVLTQTLGPWRRPVAYLSKKLDPVASGWPTCLKAVAAVALLLKDADKLTLGQNVTVIASHSLESIVRQPPDRWMTNARMTHYQSLLLNERVSFAPPAVLNPATLLPVESEATPVHRCSEILAEETGTRRDLKDQPLPGVPAWYTDGSSFIAEGKRRAGAAIVDGKRTVWASSLPEGTSAQKAELVALTQALRLAEGKDINIYTDSRYAFATAHIHGAIYKQRGWLTSAGKDIKNKEEILALLEAIHLPKRVAIIHCPGHQKGNDPVATGNRRADEAAKQAALSTRVLAETTKPAGKRTADGSEFEKRTADGSEFESPKKKAKVE

SEQ ID NO: 7121 - protein, 2096 aa, synthetic construct; identical to SEQ ID NO: 4524

SEQ ID NO: 7122 - protein, 2096 aa, synthetic construct
MPAAKRVKLDGGDKKYSIGLDIGTNSVGWAVITDEYKVPSKKFKVLGNTDRHSIKKNLIGALLFDSGETAEATRLKRTARRRYTRRKNRICYLQEIFSNEMAKVDDSFFHRLEESFLVEEDKKHERHPIFGNIVDEVAYHEKYPTIYHLRKKLVDSTDKADLRLIYLALAHMIKFRGHFLIEGDLNPDNSDVDKLFIQLVQTYNQLFEENPINASGVDAKAILSARLSKSRRLENLIAQLPGEKKNGLFGNLIALSLGLTPNFKSNFDLAEDAKLQLSKDTYDDDLDNLLAQIGDQYADLFLAAKNLSDAILLSDILRVNTEITKAPLSASMIKRYDEHHQDLTLLKALVRQQLPEKYKEIFFDQSKNGYAGYIDGGASQEEFYKFIKPILEKMDGTEELLVKLNREDLLRKQRTFDNGSIPHQIHLGELHAILRRQEDFYPFLKDNREKIEKILTFRIPYYVGPLARGNSRFAWMTRKSEETITPWNFEEVVDKGASAQSFIERMTNFDKNLPNEKVLPKHSLLYEYFTVYNELTKVKYVTEGMRKPAFLSGEQKKAIVDLLFKTNRKVTVKQLKEDYFKKIECFDSVEISGVEDRFNASLGTYHDLLKIIKDKDFLDNEENEDILEDIVLTLTLFEDREMIEERLKTYAHLFDDKVMKQLKRRRYTGWGRLSRKLINGIRDKQSGKTILDFLKSDGFANRNFMQLIHDDSLTFKEDIQKAQVSGQGDSLHEHIANLAGSPAIKKGILQTVKVVDELVKVMGRHKPENIVIEMARENQTTQKGQKNSRERMKRIEEGIKELGSQILKEHPVENTQLQNEKLYLYYLQNGRDMYVDQELDINRLSDYDVDHIVPQSFLKDDSIDNKVLTRSDKARGKSDNVPSEEVVKKMKNYWRQLLNAKLITQRKFDNLTKAERGGLSELDKAGFIKRQLVETRQITKHVAQILDSRMNTKYDENDKLIREVKVITLKSKLVSDFRKDFQFYKVREINNYHHAHDAYLNAVVGTALIKKYPKLESEFVYGDYKVYDVRKMIAKSEQEIGKATAKYFFYSNIMNFFKTEITLANGEIRKRPLIETNGETGEIVWDKGRDFATVRKVLSMPQVNIVKKTEVQTGGFSKESILPKRNSDKLIARKKDWDPKKYGGFDSPTVAYSVLVVAKVEKGKSKKLKSVKELLGITIMERSSFEKNPIDFLEAKGYKEVKKDLIIKLPKYSLFELENGRKRMLASAGELQKGNELALPSKYVNFLYLASHYEKLKGSPEDNEQKQLFVEQHKHYLDEIIEQISEFSKRVILADANLDKVLSAYNKHRDKPIREQAENIIHLFTLTNLGAPAAFKYFDTTIDRKRYTSTKEVLDATLIHQSITGLYETRIDLSQLGGDGGGGSGSSPAPGGTAPLEEEYRLFLEAPIQNVTLLEQWKREIPKVWAEINPPGLASTQAPIHVQLLSTALPVRVRQYPITLEAKRSLRETIRKFRAAGILRPVHSPWNTPLLPVRKSGTSEYRMVQDLREVNKRVETIHPTVPNPYTLLSLLPPDRIWYSVLDLKDAFFCIPLAPESQLIFAFEWADAEEGESGQLTWTRLPQGFKNSPTLFNEALNRDLQGFRLDHPSVSLLQYVDDLLIAADTQAACLSATRDLLMTLAELGYRVSGKKAQLCQEEVTYLGFKIHKGSRSLSNSRTQAILQIPVPKTKRQVREFLGTIGYCRLWIPGFAELAQPLYAATRPGNDPLVWGEKEEEAFQSLKLALTQPPALALPSLDKPFQLFVEETSGAAKGVLTQALGPWKRPVAYLSKRLDPVAAGWPRCLRAIAAAALLTREASKLTFGQDIEITSSHNLESLLRSPPDKWLTNARITQYQVLLLDPPRVRFKQTAALNPATLLPETDDTLPIHHCLDTLDSLTSTRPDLTDQPLAQAEATLFTDGSSYIRDGKRYAGAAVVTLDSVIWAEPLPIGTSAQKAELIALTKALEWSKDKSVNIYTDSRYAFATLHVHGMIYRERGWLTAGGKAIKNAPEILALLTAVWLPKRVAVMHCKGHQKDDAPTSTGNRRADEVAREVAIRPLSTQATISAGKRTADGSEFEKRTADGSEFESPKKKAKVE

SEQ ID NO: 7123 - protein, 2096 aa, synthetic construct
MPAAKRVKLDGGDKKYSIGLDIGTNSVGWAVITDEYKVPSKKFKVLGNTDRHSIKKNLIGALLFDSGETAEATRLKRTARRRYTRRKNRICYLQEIFSNEMAKVDDSFFHRLEESFLVEEDKKHERHPIFGNIVDEVAYHEKYPTIYHLRKKLVDSTDKADLRLIYLALAHMIKFRGHFLIEGDLNPDNSDVDKLFIQLVQTYNQLFEENPINASGVDAKAILSARLSKSRRLENLIAQLPGEKKNGLFGNLIALSLGLTPNFKSNFDLAEDAKLQLSKDTYDDDLDNLLAQIGDQYADLFLAAKNLSDAILLSDILRVNTEITKAPLSASMIKRYDEHHQDLTLLKALVRQQLPEKYKEIFFDQSKNGYAGYIDGGASQEEFYKFIKPILEKMDGTEELLVKLNREDLLRKQRTFDNGSIPHQIHLGELHAILRRQEDFYPFLKDNREKIEKILTFRIPYYVGPLARGNSRFAWMTRKSEETITPWNFEEVVDKGASAQSFIERMTNFDKNLPNEKVLPKHSLLYEYFTVYNELTKVKYVTEGMRKPAFLSGEQKKAIVDLLFKTNRKVTVKQLKEDYFKKIECFDSVEISGVEDRFNASLGTYHDLLKIIKDKDFLDNEENEDILEDIVLTLTLFEDREMIEERLKTYAHLFDDKVMKQLKRRRYTGWGRLSRKLINGIRDKQSGKTILDFLKSDGFANRNFMQLIHDDSLTFKEDIQKAQVSGQGDSLHEHIANLAGSPAIKKGILQTVKVVDELVKVMGRHKPENIVIEMARENQTTQKGQKNSRERMKRIEEGIKELGSQILKEHPVENTQLQNEKLYLYYLQNGRDMYVDQELDINRLSDYDVDHIVPQSFLKDDSIDNKVLTRSDKARGKSDNVPSEEVVKKMKNYWRQLLNAKLITQRKFDNLTKAERGGLSELDKAGFIKRQLVETRQITKHVAQILDSRMNTKYDENDKLIREVKVITLKSKLVSDFRKDFQFYKVREINNYHHAHDAYLNAVVGTALIKKYPKLESEFVYGDYKVYDVRKMIAKSEQEIGKATAKYFFYSNIMNFFKTEITLANGEIRKRPLIETNGETGEIVWDKGRDFATVRKVLSMPQVNIVKKTEVQTGGFSKESILPKRNSDKLIARKKDWDPKKYGGFDSPTVAYSVLVVAKVEKGKSKKLKSVKELLGITIMERSSFEKNPIDFLEAKGYKEVKKDLIIKLPKYSLFELENGRKRMLASAGELQKGNELALPSKYVNFLYLASHYEKLKGSPEDNEQKQLFVEQHKHYLDEIIEQISEFSKRVILADANLDKVLSAYNKHRDKPIREQAENIIHLFTLTNLGAPAAFKYFDTTIDRKRYTSTKEVLDATLIHQSITGLYETRIDLSQLGGDGGGGSGSSPAPGGTAPLEEEYRLFLEAPIQNVTLLEQWKREIPKVWAEINPPGLASTQAPIHVQLLSTALPVRVRQYPITLEAKRSLRETIRKFRAAGILRPVHSPWNTPLLPVRKSGTSEYRMVQDLREVNKRVETIHPTVPNPYTLLSLLPPDRIWYSVLDLKDAFFCIPLAPESQLIFAFEWADAEEGESGQLTWTRLPQGFKNSPTLFNEALNRDLQGFRLDHPSVSLLQYVDDLLIAADTQAACLSATRDLLMTLAELGYRVSGKKAQLCQEEVTYLGFKIHKGSRSLSNSRTQAILQIPVPKTKRQVREFLGKIGYCRLFIPGFAELAQPLYAATRPGNDPLVWGEKEEEAFQSLKLALTQPPALALPSLDKPFQLFVEETSGAAKGVLTQALGPWKRPVAYLSKRLDPVAAGWPRCLRAIAAAALLTREASKLTFGQDIEITSSHNLESLLRSPPDKWLTNARITQYQVLLLDPPRVRFKQTAALNPATLLPETDDTLPIHHCLDTLDSLTSTRPDLTDQPLAQAEATLFTDGSSYIRDGKRYAGAAVVTLDSVIWAEPLPIGTSAQKAELIALTKALEWSKDKSVNIYTDSRYAFATLHVHGMIYRERGWLTAGGKAIKNAPEILALLTAVWLPKRVAVMHCKGHQKDDAPTSTGNRRADEVAREVAIRPLSTQATISAGKRTADGSEFEKRTADGSEFESPKKKAKVE

SEQ ID NO: 7124 - protein, 2093 aa, synthetic construct
MPAAKRVKLDGGDKKYSIGLDIGTNSVGWAVITDEYKVPSKKFKVLGNTDRHSIKKNLIGALLFDSGETAEATRLKRTARRRYTRRKNRICYLQEIFSNEMAKVDDSFFHRLEESFLVEEDKKHERHPIFGNIVDEVAYHEKYPTIYHLRKKLVDSTDKADLRLIYLALAHMIKFRGHFLIEGDLNPDNSDVDKLFIQLVQTYNQLFEENPINASGVDAKAILSARLSKSRRLENLIAQLPGEKKNGLFGNLIALSLGLTPNFKSNFDLAEDAKLQLSKDTYDDDLDNLLAQIGDQYADLFLAAKNLSDAILLSDILRVNTEITKAPLSASMIKRYDEHHQDLTLLKALVRQQLPEKYKEIFFDQSKNGYAGYIDGGASQEEFYKFIKPILEKMDGTEELLVKLNREDLLRKQRTFDNGSIPHQIHLGELHAILRRQEDFYPFLKDNREKIEKILTFRIPYYVGPLARGNSRFAWMTRKSEETITPWNFEEVVDKGASAQSFIERMTNFDKNLPNEKVLPKHSLLYEYFTVYNELTKVKYVTEGMRKPAFLSGEQKKAIVDLLFKTNRKVTVKQLKEDYFKKIECFDSVEISGVEDRFNASLGTYHDLLKIIKDKDFLDNEENEDILEDIVLTLTLFEDREMIEERLKTYAHLFDDKVMKQLKRRRYTGWGRLSRKLINGIRDKQSGKTILDFLKSDGFANRNFMQLIHDDSLTFKEDIQKAQVSGQGDSLHEHIANLAGSPAIKKGILQTVKVVDELVKVMGRHKPENIVIEMARENQTTQKGQKNSRERMKRIEEGIKELGSQILKEHPVENTQLQNEKLYLYYLQNGRDMYVDQELDINRLSDYDVDHIVPQSFLKDDSIDNKVLTRSDKARGKSDNVPSEEVVKKMKNYWRQLLNAKLITQRKFDNLTKAERGGLSELDKAGFIKRQLVETRQITKHVAQILDSRMNTKYDENDKLIREVKVITLKSKLVSDFRKDFQFYKVREINNYHHAHDAYLNAVVGTALIKKYPKLESEFVYGDYKVYDVRKMIAKSEQEIGKATAKYFFYSNIMNFFKTEITLANGEIRKRPLIETNGETGEIVWDKGRDFATVRKVLSMPQVNIVKKTEVQTGGFSKESILPKRNSDKLIARKKDWDPKKYGGFDSPTVAYSVLVVAKVEKGKSKKLKSVKELLGITIMERSSFEKNPIDFLEAKGYKEVKKDLIIKLPKYSLFELENGRKRMLASAGELQKGNELALPSKYVNFLYLASHYEKLKGSPEDNEQKQLFVEQHKHYLDEIIEQISEFSKRVILADANLDKVLSAYNKHRDKPIREQAENIIHLFTLTNLGAPAAFKYFDTTIDRKRYTSTKEVLDATLIHQSITGLYETRIDLSQLGGDGGGGSGSSPAPGGTLQLEEEYRLFEPESTQKQEMDIWLKNFPQAWAETGGMGTAHCQAPVLIQLKATATPISIRQYPMPHEAYQGIKPHIRRMLDQGILKPCQSPWNTPLLPVKKPGTEDYRPVQDLREVNKRVEDIHPTVPNPYNLLSTLPPSHPWYTVLDLKDAFFCLRLHSESQLLFAFEWRDPEIGLSGQLTWTRLPQGFKNSPTLFNEALHSDLADFRVRYPALVLLQYVDDLLLAAATRTECLEGTKALLETLGNKGYRASAKKAQICLQEVTYLGYSLKDGQRWLTKARKEAILSIPVPKNSRQVREFLGTAGYCRLWIPGFAELAAPLYPLTRPGTLFQWGTEQQLAFEDIKKALLSSPALGLPDITKPFELFIDENSGFAKGVLVQKLGPWKRPVAYLSKKLDTVASGWPPCLRMVAAIAILVKDAGKLTLGQPLTILTSHPVEALVRQPPNKWLSNARMTHYQAMLLDAERVHFGPTVSLNPATLLPLPSGGNHHDCLQILAETHGTRPDLTDQPLPDADLTWYTDGSSFIRNGEREAGAAVTTESEVIWAAPLPPGTSAQRAELIALTQALKMAEGKKLTVYTDSRYAFATTHVHGEIYRRRGWLTSEGKEIKNKNEILALLEALFLPKRLSIIHCPGHQKGDSPQAKGNRLADDTAKKAATETHSSLTVLPAGKRTADGSEFEKRTADGSEFESPKKKAKVE

SEQ ID NO: 7125 - protein, 2085 aa, synthetic construct
MPAAKRVKLDGGDKKYSIGLDIGTNSVGWAVITDEYKVPSKKFKVLGNTDRHSIKKNLIGALLFDSGETAEATRLKRTARRRYTRRKNRICYLQEIFSNEMAKVDDSFFHRLEESFLVEEDKKHERHPIFGNIVDEVAYHEKYPTIYHLRKKLVDSTDKADLRLIYLALAHMIKFRGHFLIEGDLNPDNSDVDKLFIQLVQTYNQLFEENPINASGVDAKAILSARLSKSRRLENLIAQLPGEKKNGLFGNLIALSLGLTPNFKSNFDLAEDAKLQLSKDTYDDDLDNLLAQIGDQYADLFLAAKNLSDAILLSDILRVNTEITKAPLSASMIKRYDEHHQDLTLLKALVRQQLPEKYKEIFFDQSKNGYAGYIDGGASQEEFYKFIKPILEKMDGTEELLVKLNREDLLRKQRTFDNGSIPHQIHLGELHAILRRQEDFYPFLKDNREKIEKILTFRIPYYVGPLARGNSRFAWMTRKSEETITPWNFEEVVDKGASAQSFIERMTNFDKNLPNEKVLPKHSLLYEYFTVYNELTKVKYVTEGMRKPAFLSGEQKKAIVDLLFKTNRKVTVKQLKEDYFKKIECFDSVEISGVEDRFNASLGTYHDLLKIIKDKDFLDNEENEDILEDIVLTLTLFEDREMIEERLKTYAHLFDDKVMKQLKRRRYTGWGRLSRKLINGIRDKQSGKTILDFLKSDGFANRNFMQLIHDDSLTFKEDIQKAQVSGQGDSLHEHIANLAGSPAIKKGILQTVKVVDELVKVMGRHKPENIVIEMARENQTTQKGQKNSRERMKRIEEGIKELGSQILKEHPVENTQLQNEKLYLYYLQNGRDMYVDQELDINRLSDYDVDHIVPQSFLKDDSIDNKVLTRSDKARGKSDNVPSEEVVKKMKNYWRQLLNAKLITQRKFDNLTKAERGGLSELDKAGFIKRQLVETRQITKHVAQILDSRMNTKYDENDKLIREVKVITLKSKLVSDFRKDFQFYKVREINNYHHAHDAYLNAVVGTALIKKYPKLESEFVYGDYKVYDVRKMIAKSEQEIGKATAKYFFYSNIMNFFKTEITLANGEIRKRPLIETNGETGEIVWDKGRDFATVRKVLSMPQVNIVKKTEVQTGGFSKESILPKRNSDKLIARKKDWDPKKYGGFDSPTVAYSVLVVAKVEKGKSKKLKSVKELLGITIMERSSFEKNPIDFLEAKGYKEVKKDLIIKLPKYSLFELENGRKRMLASAGELQKGNELALPSKYVNFLYLASHYEKLKGSPEDNEQKQLFVEQHKHYLDEIIEQISEFSKRVILADANLDKVLSAYNKHRDKPIREQAENIIHLFTLTNLGAPAAFKYFDTTIDRKRYTSTKEVLDATLIHQSITGLYETRIDLSQLGGDGGGGSGSSPAPGGVPWLTQQPLQLTILVPLQEYQEKILSKTALPEDQKQQLKTLFVKYDNLWQHWENQVGHRKIRPHNIATGDYPPRPQKQYPINPKAKPSIQIVIDDLLKQGVLTPQNSTMNTPVYPVPKPDGRWRMVLDYREVNKTIPLTAAQNQHSAGILATIVRQKYKTTLDLANGFWAHPITPESYWLTAFTWQGKQYCWTRLPQGFLNSPALFNADVVDLLKEIPNVQVYVDDIYLSHDDPKEHVQQLEKVFQILLQAGYVVSLKKSEIGQKTVEFLGFNITKEGRGLTDTFKTKLLNITPPKDLKQLQSILGLLNFARNFIPNFAELVQPLYNLIAPAKGKYIEWSEENTKQLNMVIEALNTASNLEERLPEQRLVIKVNTSPSAGYVRYYNETGKKPIMYLNYVFSKAELKFSMLEKLLTTMHKALIKAMDLAMGQEILVYSPIVSMTKIQKTPLPERKALPIRWITWMTYLEDPRIQFHYDKTLPELKHIPDVYTSSQSPVKHPSQYEGVFYTDGSAIKSPDPTKSNNAGMGIVHATYKPEYQVLNQWSIPLGNHTAQMAEIAAVEFACKKALKIPGPVLVITDSFYVAESANKELPYWKSNGFVNNKKKPLKHISKWKSIAECLSMKPDITIQHEKGISLQIPVFILKGNALADKLATQGSYVVNAGKRTADGSEFEKRTADGSEFESPKKKAKVE

SEQ ID NO: 7126 - protein, 2216 aa, synthetic construct
MPAAKRVKLDGGDKKYSIGLDIGTNSVGWAVITDEYKVPSKKFKVLGNTDRHSIKKNLIGALLFDSGETAEATRLKRTARRRYTRRKNRICYLQEIFSNEMAKVDDSFFHRLEESFLVEEDKKHERHPIFGNIVDEVAYHEKYPTIYHLRKKLVDSTDKADLRLIYLALAHMIKFRGHFLIEGDLNPDNSDVDKLFIQLVQTYNQLFEENPINASGVDAKAILSARLSKSRRLENLIAQLPGEKKNGLFGNLIALSLGLTPNFKSNFDLAEDAKLQLSKDTYDDDLDNLLAQIGDQYADLFLAAKNLSDAILLSDILRVNTEITKAPLSASMIKRYDEHHQDLTLLKALVRQQLPEKYKEIFFDQSKNGYAGYIDGGASQEEFYKFIKPILEKMDGTEELLVKLNREDLLRKQRTFDNGSIPHQIHLGELHAILRRQEDFYPFLKDNREKIEKILTFRIPYYVGPLARGNSRFAWMTRKSEETITPWNFEEVVDKGASAQSFIERMTNFDKNLPNEKVLPKHSLLYEYFTVYNELTKVKYVTEGMRKPAFLSGEQKKAIVDLLFKTNRKVTVKQLKEDYFKKIECFDSVEISGVEDRFNASLGTYHDLLKIIKDKDFLDNEENEDILEDIVLTLTLFEDREMIEERLKTYAHLFDDKVMKQLKRRRYTGWGRLSRKLINGIRDKQSGKTILDFLKSDGFANRNFMQLIHDDSLTFKEDIQKAQVSGQGDSLHEHIANLAGSPAIKKGILQTVKVVDELVKVMGRHKPENIVIEMARENQTTQKGQKNSRERMKRIEEGIKELGSQILKEHPVENTQLQNEKLYLYYLQNGRDMYVDQELDINRLSDYDVDHIVPQSFLKDDSIDNKVLTRSDKARGKSDNVPSEEVVKKMKNYWRQLLNAKLITQRKFDNLTKAERGGLSELDKAGFIKRQLVETRQITKHVAQILDSRMNTKYDENDKLIREVKVITLKSKLVSDFRKDFQFYKVREINNYHHAHDAYLNAVVGTALIKKYPKLESEFVYGDYKVYDVRKMIAKSEQEIGKATAKYFFYSNIMNFFKTEITLANGEIRKRPLIETNGETGEIVWDKGRDFATVRKVLSMPQVNIVKKTEVQTGGFSKESILPKRNSDKLIARKKDWDPKKYGGFDSPTVAYSVLVVAKVEKGKSKKLKSVKELLGITIMERSSFEKNPIDFLEAKGYKEVKKDLIIKLPKYSLFELENGRKRMLASAGELQKGNELALPSKYVNFLYLASHYEKLKGSPEDNEQKQLFVEQHKHYLDEIIEQISEFSKRVILADANLDKVLSAYNKHRDKPIREQAENIIHLFTLTNLGAPAAFKYFDTTIDRKRYTSTKEVLDATLIHQSITGLYETRIDLSQLGGDGGGGSGSSPAPGGTLGDQGSRGSDPLPEPRVTLTVEGIPTEFLVNTGAEHSVLTKPMGKMGSKRTVVAGATGSKVYPWTTKRLLKIGQKQVTHSFLVIPECPAPLLGRDLLTKLKAQIQFSTEGPQVTWEDRPAMCLVLNLEEEYRLHEKPVPPSIDPSWLQLFPMVWAEKAGMGLANQVPPVVVELKSDASPVAVRQYPMSKEAREGIRPHIQRFLDLGILVPCQSPWNTPLLPVKKPGTNDYRPVQDLREVNKRVQDIHPTVPNPYNLLSSLPPSHTWYSVLDLKDAFFCLKLHPNSQPLFAFEWRDPEKGNTGQLTWTRLPQGFKNSPTLFDEALHRDLASFRALNPQVVMLQYVDDLLVAAPTYRDCKEGTRRLLQELSKLGYRVSAKKAQLCREEVTYLGYLLKGGKRWLTPARKATVMKIPTPTTPRQVREFLGTAGFCRLWIPGFASLAAPLYPLTREKVPFTWTEAHQEAFGRIKEALLSAPALALPDLTKPFALYVDEKEGVARGVLTQTLGPWRRPVAYLSKKLDPVASGWPTCLKAIAAVALLLKDADKLTLGQNVLVIAPHNLESIVRQPPDRWMTNARMTHYQSLLLNERVSFAPPAILNPATLLPVESDDTPIHICSEILAEETGTRPDLRDQPLPGVPAWYTDGSSFIMDGRRQAGAAIVDNKRTVWASNLPEGTSAQKAELIALTQALRLAEGKSINIYTDSRYAFATAHVHGAIYKQRGLLTSAGKDIKNKEEILALLEAIHLPKRVAIIHCPGHQRGTDPVATGNRKADEAAKQAAQSTRILTETTKNAGKRTADGSEFEKRTADGSEFESPKKKAKVE

SEQ ID NO: 7127 - protein, 2125 aa, synthetic construct
MPAAKRVKLDGGDKKYSIGLDIGTNSVGWAVITDEYKVPSKKFKVLGNTDRHSIKKNLIGALLFDSGETAEATRLKRTARRRYTRRKNRICYLQEIFSNEMAKVDDSFFHRLEESFLVEEDKKHERHPIFGNIVDEVAYHEKYPTIYHLRKKLVDSTDKADLRLIYLALAHMIKFRGHFLIEGDLNPDNSDVDKLFIQLVQTYNQLFEENPINASGVDAKAILSARLSKSRRLENLIAQLPGEKKNGLFGNLIALSLGLTPNFKSNFDLAEDAKLQLSKDTYDDDLDNLLAQIGDQYADLFLAAKNLSDAILLSDILRVNTEITKAPLSASMIKRYDEHHQDLTLLKALVRQQLPEKYKEIFFDQSKNGYAGYIDGGASQEEFYKFIKPILEKMDGTEELLVKLNREDLLRKQRTFDNGSIPHQIHLGELHAILRRQEDFYPFLKDNREKIEKILTFRIPYYVGPLARGNSRFAWMTRKSEETITPWNFEEVVDKGASAQSFIERMTNFDKNLPNEKVLPKHSLLYEYFTVYNELTKVKYVTEGMRKPAFLSGEQKKAIVDLLFKTNRKVTVKQLKEDYFKKIECFDSVEISGVEDRFNASLGTYHDLLKIIKDKDFLDNEENEDILEDIVLTLTLFEDREMIEERLKTYAHLFDDKVMKQLKRRRYTGWGRLSRKLINGIRDKQSGKTILDFLKSDGFANRNFMQLIHDDSLTFKEDIQKAQVSGQGDSLHEHIANLAGSPAIKKGILQTVKVVDELVKVMGRHKPENIVIEMARENQTTQKGQKNSRERMKRIEEGIKELGSQILKEHPVENTQLQNEKLYLYYLQNGRDMYVDQELDINRLSDYDVDHIVPQSFLKDDSIDNKVLTRSDKARGKSDNVPSEEVVKKMKNYWRQLLNAKLITQRKFDNLTKAERGGLSELDKAGFIKRQLVETRQITKHVAQILDSRMNTKYDENDKLIREVKVITLKSKLVSDFRKDFQFYKVREINNYHHAHDAYLNAVVGTALIKKYPKLESEFVYGDYKVYDVRKMIAKSEQEIGKATAKYFFYSNIMNFFKTEITLANGEIRKRPLIETNGETGEIVWDKGRDFATVRKVLSMPQVNIVKKTEVQTGGFSKESILPKRNSDKLIARKKDWDPKKYGGFDSPTVAYSVLVVAKVEKGKSKKLKSVKELLGITIMERSSFEKNPIDFLEAKGYKEVKKDLIIKLPKYSLFELENGRKRMLASAGELQKGNELALPSKYVNFLYLASHYEKLKGSPEDNEQKQLFVEQHKHYLDEIIEQISEFSKRVILADANLDKVLSAYNKHRDKPIREQAENIIHLFTLTNLGAPAAFKYFDTTIDRKRYTSTKEVLDATLIHQSITGLYETRIDLSQLGGDGGGGSGSSPAPGGLLGRDLLTKLKAQIQFSTEGPQVTWEDRPAMCLVLNLEEEYRLHEKPVPPSIDPSWLQLFPMVWAEKAGMGLANQVPPVVVELKSDASPVAVRQYPMSKEAREGIRPHIQRFLDLGILVPCQSPWNTPLLPVKKPGTNDYRPVQDLREVNKRVQDIHPTVPNPYNLLSSLPPSHTWYSVLDLKDAFFCLKLHPNSQPLFAFEWRDPEKGNTGQLTWTRLPQGFKNSPTLFNEALHRDLASFRALNPQVVMLQYVDDLLVAAPTYRDCKEGTRRLLQELSKLGYRVSAKKAQLCREEVTYLGYLLKGGKRWLTPARKATVMKIPTPTTPRQVREFLGKAGFCRLFIPGFASLAAPLYPLTRPKVPFTWTEAHQEAFGRIKEALLSAPALALPDLTKPFALYVDEKEGVARGVLTQTLGPWRRPVAYLSKKLDPVASGWPTCLKAIAAVALLLKDADKLTLGQNVLVIAPHNLESIVRQPPDRWMTNARMTHYQSLLLNERVSFAPPAILNPATLLPVESDDTPIHICSEILAEETGTRPDLRDQPLPGVPAWYTDGSSFIMDGRRQAGAAIVDNKRTVWASNLPEGTSAQKAELIALTQALRLAEGKSINIYTDSRYAFATAHVHGAIYKQRGWLTSAGKDIKNKEEILALLEAIHLPKRVAIIHCPGHQRGTDPVATGNRKADEAAKQAAQSTRILTETTKNAGKRTADGSEFEKRTADGSEFESPKKKAKVE

SEQ ID NO: 7128 - protein, 2216 aa, synthetic construct
MPAAKRVKLDGGDKKYSIGLDIGTNSVGWAVITDEYKVPSKKFKVLGNTDRHSIKKNLIGALLFDSGETAEATRLKRTARRRYTRRKNRICYLQEIFSNEMAKVDDSFFHRLEESFLVEEDKKHERHPIFGNIVDEVAYHEKYPTIYHLRKKLVDSTDKADLRLIYLALAHMIKFRGHFLIEGDLNPDNSDVDKLFIQLVQTYNQLFEENPINASGVDAKAILSARLSKSRRLENLIAQLPGEKKNGLFGNLIALSLGLTPNFKSNFDLAEDAKLQLSKDTYDDDLDNLLAQIGDQYADLFLAAKNLSDAILLSDILRVNTEITKAPLSASMIKRYDEHHQDLTLLKALVRQQLPEKYKEIFFDQSKNGYAGYIDGGASQEEFYKFIKPILEKMDGTEELLVKLNREDLLRKQRTFDNGSIPHQIHLGELHAILRRQEDFYPFLKDNREKIEKILTFRIPYYVGPLARGNSRFAWMTRKSEETITPWNFEEVVDKGASAQSFIERMTNFDKNLPNEKVLPKHSLLYEYFTVYNELTKVKYVTEGMRKPAFLSGEQKKAIVDLLFKTNRKVTVKQLKEDYFKKIECFDSVEISGVEDRFNASLGTYHDLLKIIKDKDFLDNEENEDILEDIVLTLTLFEDREMIEERLKTYAHLFDDKVMKQLKRRRYTGWGRLSRKLINGIRDKQSGKTILDFLKSDGFANRNFMQLIHDDSLTFKEDIQKAQVSGQGDSLHEHIANLAGSPAIKKGILQTVKVVDELVKVMGRHKPENIVIEMARENQTTQKGQKNSRERMKRIEEGIKELGSQILKEHPVENTQLQNEKLYLYYLQNGRDMYVDQELDINRLSDYDVDHIVPQSFLKDDSIDNKVLTRSDKARGKSDNVPSEEVVKKMKNYWRQLLNAKLITQRKFDNLTKAERGGLSELDKAGFIKRQLVETRQITKHVAQILDSRMNTKYDENDKLIREVKVITLKSKLVSDFRKDFQFYKVREINNYHHAHDAYLNAVVGTALIKKYPKLESEFVYGDYKVYDVRKMIAKSEQEIGKATAKYFFYSNIMNFFKTEITLANGEIRKRPLIETNGETGEIVWDKGRDFATVRKVLSMPQVNIVKKTEVQTGGFSKESILPKRNSDKLIARKKDWDPKKYGGFDSPTVAYSVLVVAKVEKGKSKKLKSVKELLGITIMERSSFEKNPIDFLEAKGYKEVKKDLIIKLPKYSLFELENGRKRMLASAGELQKGNELALPSKYVNFLYLASHYEKLKGSPEDNEQKQLFVEQHKHYLDEIIEQISEFSKRVILADANLDKVLSAYNKHRDKPIREQAENIIHLFTLTNLGAPAAFKYFDTTIDRKRYTSTKEVLDATLIHQSITGLYETRIDLSQLGGDGGGGSGSSPAPGGTLGDQGSRGSDPLPEPRVTLTVEGIPTEFLVNTGAEHSVLTKPMGKMGSKRTVVAGATGSKVYPWTTKRLLKIGQKQVTHSFLVIPECPAPLLGRDLLTKLKAQIQFSTEGPQVTWEDRPAMCLVLNLEEEYRLHEKPVPPSIDPSWLQLFPMVWAEKAGMGLANQVPPVVVELKSDASPVAVRQYPMSKEAREGIRPHIQRFLDLGILVPCQSPWNTPLLPVKKPGTNDYRPVQDLREVNKRVQDIHPTVPNPYNLLSSLPPSHTWYSVLDLKDAFFCLKLHPNSQPLFAFEWRDPEKGNTGQLTWTRLPQGFKNSPTLFNEALHRDLASFRALNPQVVMLQYVDDLLVAAPTYRDCKEGTRRLLQELSKLGYRVSAKKAQLCREEVTYLGYLLKGGKRWLTPARKATVMKIPTPTTPRQVREFLGKAGFCRLFIPGFASLAAPLYPLTRPKVPFTWTEAHQEAFGRIKEALLSAPALALPDLTKPFALYVDEKEGVARGVLTQTLGPWRRPVAYLSKKLDPVASGWPTCLKAIAAVALLLKDADKLTLGQNVLVIAPHNLESIVRQPPDRWMTNARMTHYQSLLLNERVSFAPPAILNPATLLPVESDDTPIHICSEILAEETGTRPDLRDQPLPGVPAWYTDGSSFIMDGRRQAGAAIVDNKRTVWASNLPEGTSAQKAELIALTQALRLAEGKSINIYTDSRYAFATAHVHGAIYKQRGWLTSAGKDIKNKEEILALLEAIHLPKRVAIIHCPGHQRGTDPVATGNRKADEAAKQAAQSTRILTETTKNAGKRTADGSEFEKRTADGSEFESPKKKAKVE

SEQ ID NO: 7129 - protein, 2094 aa, synthetic construct
MPAAKRVKLDGGDKKYSIGLDIGTNSVGWAVITDEYKVPSKKFKVLGNTDRHSIKKNLIGALLFDSGETAEATRLKRTARRRYTRRKNRICYLQEIFSNEMAKVDDSFFHRLEESFLVEEDKKHERHPIFGNIVDEVAYHEKYPTIYHLRKKLVDSTDKADLRLIYLALAHMIKFRGHFLIEGDLNPDNSDVDKLFIQLVQTYNQLFEENPINASGVDAKAILSARLSKSRRLENLIAQLPGEKKNGLFGNLIALSLGLTPNFKSNFDLAEDAKLQLSKDTYDDDLDNLLAQIGDQYADLFLAAKNLSDAILLSDILRVNTEITKAPLSASMIKRYDEHHQDLTLLKALVRQQLPEKYKEIFFDQSKNGYAGYIDGGASQEEFYKFIKPILEKMDGTEELLVKLNREDLLRKQRTFDNGSIPHQIHLGELHAILRRQEDFYPFLKDNREKIEKILTFRIPYYVGPLARGNSRFAWMTRKSEETITPWNFEEVVDKGASAQSFIERMTNFDKNLPNEKVLPKHSLLYEYFTVYNELTKVKYVTEGMRKPAFLSGEQKKAIVDLLFKTNRKVTVKQLKEDYFKKIECFDSVEISGVEDRFNASLGTYHDLLKIIKDKDFLDNEENEDILEDIVLTLTLFEDREMIEERLKTYAHLFDDKVMKQLKRRRYTGWGRLSRKLINGIRDKQSGKTILDFLKSDGFANRNFMQLIHDDSLTFKEDIQKAQVSGQGDSLHEHIANLAGSPAIKKGILQTVKVVDELVKVMGRHKPENIVIEMARENQTTQKGQKNSRERMKRIEEGIKELGSQILKEHPVENTQLQNEKLYLYYLQNGRDMYVDQELDINRLSDYDVDHIVPQSFLKDDSIDNKVLTRSDKARGKSDNVPSEEVVKKMKNYWRQLLNAKLITQRKFDNLTKAERGGLSELDKAGFIKRQLVETRQITKHVAQILDSRMNTKYDENDKLIREVKVITLKSKLVSDFRKDFQFYKVREINNYHHAHDAYLNAVVGTALIKKYPKLESEFVYGDYKVYDVRKMIAKSEQEIGKATAKYFFYSNIMNFFKTEITLANGEIRKRPLIETNGETGEIVWDKGRDFATVRKVLSMPQVNIVKKTEVQTGGFSKESILPKRNSDKLIARKKDWDPKKYGGFDSPTVAYSVLVVAKVEKGKSKKLKSVKELLGITIMERSSFEKNPIDFLEAKGYKEVKKDLIIKLPKYSLFELENGRKRMLASAGELQKGNELALPSKYVNFLYLASHYEKLKGSPEDNEQKQLFVEQHKHYLDEIIEQISEFSKRVILADANLDKVLSAYNKHRDKPIREQAENIIHLFTLTNLGAPAAFKYFDTTIDRKRYTSTKEVLDATLIHQSITGLYETRIDLSQLGGDGGGGSGSSPAPGGTLNLEDEYRLYETSAEPEVSPGSTWLSDFPQAWAETGGMGLAVRQAPLIIPLKATSTPVSIKQYPMSQEAKLGIKPHIQRLLDQGILVPCQSPWNTPLLPVKKPGTNDYRPVQDLREVNKRVEDIHPTVPNPYNLLSGLPPSHRWYTVLDLKDAFFCLRLHPTSQPLFAFEWRDPGMGISGQLTWTRLPQGFKNSPTLFNEALHRDLADFRIQHPDLILLQYVDDILLAATSELDCQQGTRALLLTLGNLGYRASAKKAQLCQKQVKYLGYLLKEGQRWLTEARKETVMGQPTPKTPRQLREFLGKAGFCRLFIPGFAEMAAPLYPLTKPGTLFNWGPDQQKAYQEIKQALLTAPALGLPDLTKPFELFVDEKQGYAKGVLTQKLGPWRRPVAYLSKKLDPVAAGWPPCLRMVAAIAVLRKDAGKLTMGQPLVILAPHAVEALVKQPPDRWLSNARMTHYQAMLLDTDRVQFGPVVALNPATLLPLPEEGAPHDCLEILAETHGTRPDLTDQPIPDADHTWYTDGSSFLQEGQRKAGAAVTTETEVIWARALPAGTSAQRAELIALTQALKMAEGKRLNVYTDSRYAFATAHIHGEIYRRRGWLTSEGREIKNKSEILALLKALFLPKRLSIIHCLGHQKGDSAEARGNRLADQAAREAAIKTPPDTSTLLAGKRTADGSEFEKRTADGSEFESPKKKAKVE

SEQ ID NO: 7130 - protein, 2094 aa, synthetic construct
MPAAKRVKLDGGDKKYSIGLDIGTNSVGWAVITDEYKVPSKKFKVLGNTDRHSIKKNLIGALLFDSGETAEATRLKRTARRRYTRRKNRICYLQEIFSNEMAKVDDSFFHRLEESFLVEEDKKHERHPIFGNIVDEVAYHEKYPTIYHLRKKLVDSTDKADLRLIYLALAHMIKFRGHFLIEGDLNPDNSDVDKLFIQLVQTYNQLFEENPINASGVDAKAILSARLSKSRRLENLIAQLPGEKKNGLFGNLIALSLGLTPNFKSNFDLAEDAKLQLSKDTYDDDLDNLLAQIGDQYADLFLAAKNLSDAILLSDILRVNTEITKAPLSASMIKRYDEHHQDLTLLKALVRQQLPEKYKEIFFDQSKNGYAGYIDGGASQEEFYKFIKPILEKMDGTEELLVKLNREDLLRKQRTFDNGSIPHQIHLGELHAILRRQEDFYPFLKDNREKIEKILTFRIPYYVGPLARGNSRFAWMTRKSEETITPWNFEEVVDKGASAQSFIERMTNFDKNLPNEKVLPKHSLLYEYFTVYNELTKVKYVTEGMRKPAFLSGEQKKAIVDLLFKTNRKVTVKQLKEDYFKKIECFDSVEISGVEDRFNASLGTYHDLLKIIKDKDFLDNEENEDILEDIVLTLTLFEDREMIEERLKTYAHLFDDKVMKQLKRRRYTGWGRLSRKLINGIRDKQSGKTILDFLKSDGFANRNFMQLIHDDSLTFKEDIQKAQVSGQGDSLHEHIANLAGSPAIKKGILQTVKVVDELVKVMGRHKPENIVIEMARENQTTQKGQKNSRERMKRIEEGIKELGSQILKEHPVENTQLQNEKLYLYYLQNGRDMYVDQELDINRLSDYDVDHIVPQSFLKDDSIDNKVLTRSDKARGKSDNVPSEEVVKKMKNYWRQLLNAKLITQRKFDNLTKAERGGLSELDKAGFIKRQLVETRQITKHVAQILDSRMNTKYDENDKLIREVKVITLKSKLVSDFRKDFQFYKVREINNYHHAHDAYLNAVVGTALIKKYPKLESEFVYGDYKVYDVRKMIAKSEQEIGKATAKYFFYSNIMNFFKTEITLANGEIRKRPLIETNGETGEIVWDKGRDFATVRKVLSMPQVNIVKKTEVQTGGFSKESILPKRNSDKLIARKKDWDPKKYGGFDSPTVAYSVLVVAKVEKGKSKKLKSVKELLGITIMERSSFEKNPIDFLEAKGYKEVKKDLIIKLPKYSLFELENGRKRMLASAGELQKGNELALPSKYVNFLYLASHYEKLKGSPEDNEQKQLFVEQHKHYLDEIIEQISEFSKRVILADANLDKVLSAYNKHRDKPIREQAENIIHLFTLTNLGAPAAFKYFDTTIDRKRYTSTKEVLDATLIHQSITGLYETRIDLSQLGGDGGGGSGSSPAPGGLGIEDEYRLHETSTEPDVSLGSTWLSDFPQAWAETGGMGLAVRQAPLIIPLKATSTPVSIQQYPMSHEARLGIKPHIQRLLDQGILVPCQSPWNTPLLPVKKPGTNDYRPVQDLREVNKRVEDIHPTVPNPYNLLSGLPPSHQWYTVLDLKDAFFCLRLHPTSQPLFAFEWRDPGMGISGQLTWTRLPQGFKNSPTLFNEALHRDLADFRIQHPDLILLQYVDDILLAATSELDCQQGTRALLQTLGDLGYRASAKKAQICQKQVKYLGYLLREGQRWLTEARKETVMGQPVPKTPRQLREFLGKAGFCRLFIPGFAEMAAPLYPLTKPGTLFSWGPDQQKAYQEIKQALLTAPALGLPDLTKPFELFVDEKQGYAKGVLTQKLGPWRRPVAYLSKKLDPVAAGWPPCLRMVAAIAVLTKDAGKLTMGQPLVILAPHAVEALVKQPPDRWLSNARMTHYQAMLLDTDRVQFGPVVALNPATLLPLPEEGAPHDCLEILAETHGTRPDLTDQPIPDADHTWYTDGSSFLQEGQRKAGAAVTTETEVIWAGALPAGTSAQRAELIALTQALKMAEGKRLNVYTDSRYAFATAHIHGEIYRRRGWLTSEGREIKNKSEILALLKALFLPKRLSIIHCLGHQKGDSAEARGNRLADQAAREAAIKTPPDTSTLLIAGKRTADGSEFEKRTADGSEFESPKKKAKVE

SEQ ID NO: 7131 - protein, 2094 aa, synthetic construct; identical to SEQ ID NO: 7130

SEQ ID NO: 7132 - protein, 2094 aa, synthetic construct
MPAAKRVKLDGGDKKYSIGLDIGTNSVGWAVITDEYKVPSKKFKVLGNTDRHSIKKNLIGALLFDSGETAEATRLKRTARRRYTRRKNRICYLQEIFSNEMAKVDDSFFHRLEESFLVEEDKKHERHPIFGNIVDEVAYHEKYPTIYHLRKKLVDSTDKADLRLIYLALAHMIKFRGHFLIEGDLNPDNSDVDKLFIQLVQTYNQLFEENPINASGVDAKAILSARLSKSRRLENLIAQLPGEKKNGLFGNLIALSLGLTPNFKSNFDLAEDAKLQLSKDTYDDDLDNLLAQIGDQYADLFLAAKNLSDAILLSDILRVNTEITKAPLSASMIKRYDEHHQDLTLLKALVRQQLPEKYKEIFFDQSKNGYAGYIDGGASQEEFYKFIKPILEKMDGTEELLVKLNREDLLRKQRTFDNGSIPHQIHLGELHAILRRQEDFYPFLKDNREKIEKILTFRIPYYVGPLARGNSRFAWMTRKSEETITPWNFEEVVDKGASAQSFIERMTNFDKNLPNEKVLPKHSLLYEYFTVYNELTKVKYVTEGMRKPAFLSGEQKKAIVDLLFKTNRKVTVKQLKEDYFKKIECFDSVEISGVEDRFNASLGTYHDLLKIIKDKDFLDNEENEDILEDIVLTLTLFEDREMIEERLKTYAHLFDDKVMKQLKRRRYTGWGRLSRKLINGIRDKQSGKTILDFLKSDGFANRNFMQLIHDDSLTFKEDIQKAQVSGQGDSLHEHIANLAGSPAIKKGILQTVKVVDELVKVMGRHKPENIVIEMARENQTTQKGQKNSRERMKRIEEGIKELGSQILKEHPVENTQLQNEKLYLYYLQNGRDMYVDQELDINRLSDYDVDHIVPQSFLKDDSIDNKVLTRSDKARGKSDNVPSEEVVKKMKNYWRQLLNAKLITQRKFDNLTKAERGGLSELDKAGFIKRQLVETRQITKHVAQILDSRMNTKYDENDKLIREVKVITLKSKLVSDFRKDFQFYKVREINNYHHAHDAYLNAVVGTALIKKYPKLESEFVYGDYKVYDVRKMIAKSEQEIGKATAKYFFYSNIMNFFKTEITLANGEIRKRPLIETNGETGEIVWDKGRDFATVRKVLSMPQVNIVKKTEVQTGGFSKESILPKRNSDKLIARKKDWDPKKYGGFDSPTVAYSVLVVAKVEKGKSKKLKSVKELLGITIMERSSFEKNPIDFLEAKGYKEVKKDLIIKLPKYSLFELENGRKRMLASAGELQKGNELALPSKYVNFLYLASHYEKLKGSPEDNEQKQLFVEQHKHYLDEIIEQISEFSKRVILADANLDKVLSAYNKHRDKPIREQAENIIHLFTLTNLGAPAAFKYFDTTIDRKRYTSTKEVLDATLIHQSITGLYETRIDLSQLGGDGGGGSGSSPAPGGTLNIEDEYRLHETSKGPDVPLGSTWLSDFPQAWAETGGMGLAVRQAPLIIPLKATSTPVSIKQYPMSQEARLGIKPHIQRLLDQGILVPCQSPWNTPLLPVKKPGTNDYRPVQDLREVNKRVEDIHPTVPNPYNLLSGLPPSHQWYTVLDLKDAFFCLRLHPTSQSLFAFEWRDPEMGISGQLTWTRLPQGFKNSPTLFNEALHRDLADFRIQHPDLILLQYVDDLLLAATSELDCQQGTRALLQTLGDLGYRASAKKAQICQKQVKYLGYLLKEGQRWLTEARKETVMGQPTPKTPRQLREFLGTAGFCRLWIPGFAEMAAPLYPLTKPGTLFEWGPDQQKAYQEIKQALLTAPALGLPDLTKPFELFVDEKQGYAKGVLTQKLGPWRRPVAYLSKKLDPVAAGWPPCLRMVAAIAVLTKDAGKLTMGQPLVILAPHAVEALVKQPPDRWLSNARMTHYQALLLDTDRVQFGPIVALNPATLLPLPEEGLQHDCLDILAEAHGTRPDLTDQPLPDADHTWYTDGSSFLQEGQRKAGAAVTTETEVVWAKALPAGTSAQRAELIALTQALKMAEGKKLNVYTDSRYAFATAHIHGEIYRRRGWLTSEGKEIKNKDEILALLKALFLPKRLSIIHCPGHQKGNRAEARGNRMADQAAREVATRETPETSTLLAGKRTADGSEFEKRTADGSEFESPKKKAKVE

SEQ ID NO: 7133 - protein, 2094 aa, synthetic construct
MPAAKRVKLDGGDKKYSIGLDIGTNSVGWAVITDEYKVPSKKFKVLGNTDRHSIKKNLIGALLFDSGETAEATRLKRTARRRYTRRKNRICYLQEIFSNEMAKVDDSFFHRLEESFLVEEDKKHERHPIFGNIVDEVAYHEKYPTIYHLRKKLVDSTDKADLRLIYLALAHMIKFRGHFLIEGDLNPDNSDVDKLFIQLVQTYNQLFEENPINASGVDAKAILSARLSKSRRLENLIAQLPGEKKNGLFGNLIALSLGLTPNFKSNFDLAEDAKLQLSKDTYDDDLDNLLAQIGDQYADLFLAAKNLSDAILLSDILRVNTEITKAPLSASMIKRYDEHHQDLTLLKALVRQQLPEKYKEIFFDQSKNGYAGYIDGGASQEEFYKFIKPILEKMDGTEELLVKLNREDLLRKQRTFDNGSIPHQIHLGELHAILRRQEDFYPFLKDNREKIEKILTFRIPYYVGPLARGNSRFAWMTRKSEETITPWNFEEVVDKGASAQSFIERMTNFDKNLPNEKVLPKHSLLYEYFTVYNELTKVKYVTEGMRKPAFLSGEQKKAIVDLLFKTNRKVTVKQLKEDYFKKIECFDSVEISGVEDRFNASLGTYHDLLKIIKDKDFLDNEENEDILEDIVLTLTLFEDREMIEERLKTYAHLFDDKVMKQLKRRRYTGWGRLSRKLINGIRDKQSGKTILDFLKSDGFANRNFMQLIHDDSLTFKEDIQKAQVSGQGDSLHEHIANLAGSPAIKKGILQTVKVVDELVKVMGRHKPENIVIEMARENQTTQKGQKNSRERMKRIEEGIKELGSQILKEHPVENTQLQNEKLYLYYLQNGRDMYVDQELDINRLSDYDVDHIVPQSFLKDDSIDNKVLTRSDKARGKSDNVPSEEVVKKMKNYWRQLLNAKLITQRKFDNLTKAERGGLSELDKAGFIKRQLVETRQITKHVAQILDSRMNTKYDENDKLIREVKVITLKSKLVSDFRKDFQFYKVREINNYHHAHDAYLNAVVGTALIKKYPKLESEFVYGDYKVYDVRKMIAKSEQEIGKATAKYFFYSNIMNFFKTEITLANGEIRKRPLIETNGETGEIVWDKGRDFATVRKVLSMPQVNIVKKTEVQTGGFSKESILPKRNSDKLIARKKDWDPKKYGGFDSPTVAYSVLVVAKVEKGKSKKLKSVKELLGITIMERSSFEKNPIDFLEAKGYKEVKKDLIIKLPKYSLFELENGRKRMLASAGELQKGNELALPSKYVNFLYLASHYEKLKGSPEDNEQKQLFVEQHKHYLDEIIEQISEFSKRVILADANLDKVLSAYNKHRDKPIREQAENIIHLFTLTNLGAPAAFKYFDTTIDRKRYTSTKEVLDATLIHQSITGLYETRIDLSQLGGDGGGGSGSSPAPGGTLNIEDEYRLHEISTEPDVSPGSTWLSDFPQAWAETGGMGLAVRQAPLIIPLKATSTPVSIKQYPMSQEAKLGIKPHIQRLLDQGILVPCQSPWNTPLLPVKKPGTNDYRPVQGLREVNKRVEDIHPTVPNPYNLLSGLPTSHRWYTVLDLKDAFFCLRLHPTSQPLFASEWRDPGMGISGQLTWTRLPQGFKNSPTLFNEALHRGLADFRIQHPDLILLQYVDDLLLAATSELDCQQGTRALLKTLGNLGYRASAKKAQICQKQVKYLGYLLREGQRWLTEARKETVMGQPTPKTPRQLREFLGTAGFCRLWIPRFAEMAAPLYPLTKPGTLFNWGPDQQKAYHEIKQALLTAPALGLPDLTKPFELFVDEKQGYAKGVLTQKLGPWRRPVAYLSKKLDPVAAGWPPCLRMVAAIAVLTKDAGKLTMGQPLVILAPHAVEALVKQPPDRWLSNARMTHYQAMLLDTDRVQFGPVVALNPATLLPLPEEGAPHDCLEILAETHGTEPDLTDQPIPDADHTWYTDGSSFLQEGQRKAGAAVTTETEVIWARALPAGTSAQRAELIALTQALKMAEGKRLNVYTDSRYAFATAHIHGEIYKRRGWLTSEGREIKNKSEILALLKALFLPKRLSIIHCLGHQKGDSAEARGNRLADQAAREAAIKTPPDTSTLLAGKRTADGSEFEKRTADGSEFESPKKKAKVE

SEQ ID NO: 7134 - protein, 2088 aa, synthetic construct
MPAAKRVKLDGGDKKYSIGLDIGTNSVGWAVITDEYKVPSKKFKVLGNTDRHSIKKNLIGALLFDSGETAEATRLKRTARRRYTRRKNRICYLQEIFSNEMAKVDDSFFHRLEESFLVEEDKKHERHPIFGNIVDEVAYHEKYPTIYHLRKKLVDSTDKADLRLIYLALAHMIKFRGHFLIEGDLNPDNSDVDKLFIQLVQTYNQLFEENPINASGVDAKAILSARLSKSRRLENLIAQLPGEKKNGLFGNLIALSLGLTPNFKSNFDLAEDAKLQLSKDTYDDDLDNLLAQIGDQYADLFLAAKNLSDAILLSDILRVNTEITKAPLSASMIKRYDEHHQDLTLLKALVRQQLPEKYKEIFFDQSKNGYAGYIDGGASQEEFYKFIKPILEKMDGTEELLVKLNREDLLRKQRTFDNGSIPHQIHLGELHAILRRQEDFYPFLKDNREKIEKILTFRIPYYVGPLARGNSRFAWMTRKSEETITPWNFEEVVDKGASAQSFIERMTNFDKNLPNEKVLPKHSLLYEYFTVYNELTKVKYVTEGMRKPAFLSGEQKKAIVDLLFKTNRKVTVKQLKEDYFKKIECFDSVEISGVEDRFNASLGTYHDLLKIIKDKDFLDNEENEDILEDIVLTLTLFEDREMIEERLKTYAHLFDDKVMKQLKRRRYTGWGRLSRKLINGIRDKQSGKTILDFLKSDGFANRNFMQLIHDDSLTFKEDIQKAQVSGQGDSLHEHIANLAGSPAIKKGILQTVKVVDELVKVMGRHKPENIVIEMARENQTTQKGQKNSRERMKRIEEGIKELGSQILKEHPVENTQLQNEKLYLYYLQNGRDMYVDQELDINRLSDYDVDHIVPQSFLKDDSIDNKVLTRSDKARGKSDNVPSEEVVKKMKNYWRQLLNAKLITQRKFDNLTKAERGGLSELDKAGFIKRQLVETRQITKHVAQILDSRMNTKYDENDKLIREVKVITLKSKLVSDFRKDFQFYKVREINNYHHAHDAYLNAVVGTALIKKYPKLESEFVYGDYKVYDVRKMIAKSEQEIGKATAKYFFYSNIMNFFKTEITLANGEIRKRPLIETNGETGEIVWDKGRDFATVRKVLSMPQVNIVKKTEVQTGGFSKESILPKRNSDKLIARKKDWDPKKYGGFDSPTVAYSVLVVAKVEKGKSKKLKSVKELLGITIMERSSFEKNPIDFLEAKGYKEVKKDLIIKLPKYSLFELENGRKRMLASAGELQKGNELALPSKYVNFLYLASHYEKLKGSPEDNEQKQLFVEQHKHYLDEIIEQISEFSKRVILADANLDKVLSAYNKHRDKPIREQAENIIHLFTLTNLGAPAAFKYFDTTIDRKRYTSTKEVLDATLIHQSITGLYETRIDLSQLGGDGGGGSGSSPAPGGTLQLDDEYRLYSPLVKPDQNIQFWLEQFPQAWAETAGMGLAKQVPPQVIQLKASATPVSVRQYPLSKEAQEGIRPHVQRLIQQGILVPVQSPWNTPLLPVRKPGTNDYRPVQDLREVNKRVQDIHPTVPNPYNLLCALPPQRSWYTVLDLKDAFFCLRLHPTSQPLFAFEWRDPGTGRTGQLTWTRLPQGFKNSPTIFDEALHRDLANFRIQHPQVTLLQYVDDLLLAGATKQDCLEGTKALLLELSDLGYRASAKKAQICRREVTYLGYSLRDGQRWLTEARKKTVVQIPAPTTAKQVREFLGTAGFCRLWIPGFATLAAPLYPLTKEKGEFSWAPEHQKAFDAIKKALLSAPALALPDVTKPFTLYVDERKGVARGVLTQTLGPWRRPVAYLSKKLDPVASGWPVCLKAIAAVAILVKDADKLTLGQNITVIAPHALENIVRQPPDRWMTNARMTHYQSLLLTERVTFAPPAALNPATLLPEETDEPVTHDCHQLLIEETGVRKDLTDIPLTGEVLTWFTDGSSYVVEGKRMAGAAVVDGTRTIWASSLPEGTSAQKAELMALTQALRLAEGKSINIYTDSRYAFATAHVHGAIYKQRGLLTSAGREIKNKEEILSLLEALHLPKRLAIIHCPGHQKAKDPISRGNQMADRVAKQAAQGVNLLAGKRTADGSEFEKRTADGSEFESPKKKAKVE

SEQ ID NO: 7135 - protein, 2092 aa, synthetic construct
MPAAKRVKLDGGDKKYSIGLDIGTNSVGWAVITDEYKVPSKKFKVLGNTDRHSIKKNLIGALLFDSGETAEATRLKRTARRRYTRRKNRICYLQEIFSNEMAKVDDSFFHRLEESFLVEEDKKHERHPIFGNIVDEVAYHEKYPTIYHLRKKLVDSTDKADLRLIYLALAHMIKFRGHFLIEGDLNPDNSDVDKLFIQLVQTYNQLFEENPINASGVDAKAILSARLSKSRRLENLIAQLPGEKKNGLFGNLIALSLGLTPNFKSNFDLAEDAKLQLSKDTYDDDLDNLLAQIGDQYADLFLAAKNLSDAILLSDILRVNTEITKAPLSASMIKRYDEHHQDLTLLKALVRQQLPEKYKEIFFDQSKNGYAGYIDGGASQEEFYKFIKPILEKMDGTEELLVKLNREDLLRKQRTFDNGSIPHQIHLGELHAILRRQEDFYPFLKDNREKIEKILTFRIPYYVGPLARGNSRFAWMTRKSEETITPWNFEEVVDKGASAQSFIERMTNFDKNLPNEKVLPKHSLLYEYFTVYNELTKVKYVTEGMRKPAFLSGEQKKAIVDLLFKTNRKVTVKQLKEDYFKKIECFDSVEISGVEDRFNASLGTYHDLLKIIKDKDFLDNEENEDILEDIVLTLTLFEDREMIEERLKTYAHLFDDKVMKQLKRRRYTGWGRLSRKLINGIRDKQSGKTILDFLKSDGFANRNFMQLIHDDSLTFKEDIQKAQVSGQGDSLHEHIANLAGSPAIKKGILQTVKVVDELVKVMGRHKPENIVIEMARENQTTQKGQKNSRERMKRIEEGIKELGSQILKEHPVENTQLQNEKLYLYYLQNGRDMYVDQELDINRLSDYDVDHIVPQSFLKDDSIDNKVLTRSDKARGKSDNVPSEEVVKKMKNYWRQLLNAKLITQRKFDNLTKAERGGLSELDKAGFIKRQLVETRQITKHVAQILDSRMNTKYDENDKLIREVKVITLKSKLVSDFRKDFQFYKVREINNYHHAHDAYLNAVVGTALIKKYPKLESEFVYGDYKVYDVRKMIAKSEQEIGKATAKYFFYSNIMNFFKTEITLANGEIRKRPLIETNGETGEIVWDKGRDFATVRKVLSMPQVNIVKKTEVQTGGFSKESILPKRNSDKLIARKKDWDPKKYGGFDSPTVAYSVLVVAKVEKGKSKKLKSVKELLGITIMERSSFEKNPIDFLEAKGYKEVKKDLIIKLPKYSLFELENGRKRMLASAGELQKGNELALPSKYVNFLYLASHYEKLKGSPEDNEQKQLFVEQHKHYLDEIIEQISEFSKRVILADANLDKVLSAYNKHRDKPIREQAENIIHLFTLTNLGAPAAFKYFDTTIDRKRYTSTKEVLDATLIHQSITGLYETRIDLSQLGGDGGGGSGSSPAPGGVLNLEEEYRLHEKPVPSSIDPSWLQLFPTVWAERAGMGLANQVPPVVVELRSGASPVAVRQYPMSKEAREGIRPHIQRFLDLGVLVPCQSPWNTPLLPVKKPGTNDYRPVQDLREINKRVQDIHPTVPNPYNLLSSLPPSHTWYSVLDLKDAFFCLKLHPNSQPLFAFEWRDPEKGNTGQLTWTRLPQGFKNSPTLFNEALHRDLAPFRALNPQVVLLQYVDDLLVAAPTYRDCKEGTQKLLQELSKLGYRVSAKKAQLCQKEVTYLGYLLKEGKRWLTPARKATVMKIPPPTTPRQVREFLGTAGFCRLWIPGFASLAAPLYPLTKPSIPFIWTEEHQKAFDRIKEALLSAPALALPDLTKPFTLYVDERAGVARGVLTQTLGPWRRPVAYLSKKLDPVASGWPTCLKAVAAVALLLKDADKLTLGQNVTVIASHSLESIVRQPPDRWMTNARMTHYQSLLLNERVSFAPPAVLNPATLLPVESEATPVHRCSEILAEETGTRRDLKDQPLPGVPAWYTDGSSFIAEGKRRAGAAIVDGKRTVWASSLPEGTSAQKAELVALTQALRLAEGKDINIYTDSRYAFATAHIHGAIYKQRGWLTSAGKDIKNKEEILALLEAIHLPKRVAIIHCPGHQKGNDPVATGNRRADEAAKQAALSTRVLAETTKPAGKRTADGSEFEKRTADGSEFESPKKKAKVE

SEQ ID NO: 7136 - protein, 2094 aa, synthetic construct
MPAAKRVKLDGGDKKYSIGLDIGTNSVGWAVITDEYKVPSKKFKVLGNTDRHSIKKNLIGALLFDSGETAEATRLKRTARRRYTRRKNRICYLQEIFSNEMAKVDDSFFHRLEESFLVEEDKKHERHPIFGNIVDEVAYHEKYPTIYHLRKKLVDSTDKADLRLIYLALAHMIKFRGHFLIEGDLNPDNSDVDKLFIQLVQTYNQLFEENPINASGVDAKAILSARLSKSRRLENLIAQLPGEKKNGLFGNLIALSLGLTPNFKSNFDLAEDAKLQLSKDTYDDDLDNLLAQIGDQYADLFLAAKNLSDAILLSDILRVNTEITKAPLSASMIKRYDEHHQDLTLLKALVRQQLPEKYKEIFFDQSKNGYAGYIDGGASQEEFYKFIKPILEKMDGTEELLVKLNREDLLRKQRTFDNGSIPHQIHLGELHAILRRQEDFYPFLKDNREKIEKILTFRIPYYVGPLARGNSRFAWMTRKSEETITPWNFEEVVDKGASAQSFIERMTNFDKNLPNEKVLPKHSLLYEYFTVYNELTKVKYVTEGMRKPAFLSGEQKKAIVDLLFKTNRKVTVKQLKEDYFKKIECFDSVEISGVEDRFNASLGTYHDLLKIIKDKDFLDNEENEDILEDIVLTLTLFEDREMIEERLKTYAHLFDDKVMKQLKRRRYTGWGRLSRKLINGIRDKQSGKTILDFLKSDGFANRNFMQLIHDDSLTFKEDIQKAQVSGQGDSLHEHIANLAGSPAIKKGILQTVKVVDELVKVMGRHKPENIVIEMARENQTTQKGQKNSRERMKRIEEGIKELGSQILKEHPVENTQLQNEKLYLYYLQNGRDMYVDQELDINRLSDYDVDHIVPQSFLKDDSIDNKVLTRSDKARGKSDNVPSEEVVKKMKNYWRQLLNAKLITQRKFDNLTKAERGGLSELDKAGFIKRQLVETRQITKHVAQILDSRMNTKYDENDKLIREVKVITLKSKLVSDFRKDFQFYKVREINNYHHAHDAYLNAVVGTALIKKYPKLESEFVYGDYKVYDVRKMIAKSEQEIGKATAKYFFYSNIMNFFKTEITLANGEIRKRPLIETNGETGEIVWDKGRDFATVRKVLSMPQVNIVKKTEVQTGGFSKESILPKRNSDKLIARKKDWDPKKYGGFDSPTVAYSVLVVAKVEKGKSKKLKSVKELLGITIMERSSFEKNPIDFLEAKGYKEVKKDLIIKLPKYSLFELENGRKRMLASAGELQKGNELALPSKYVNFLYLASHYEKLKGSPEDNEQKQLFVEQHKHYLDEIIEQISEFSKRVILADANLDKVLSAYNKHRDKPIREQAENIIHLFTLTNLGAPAAFKYFDTTIDRKRYTSTKEVLDATLIHQSITGLYETRIDLSQLGGDGGGGSGSSPAPGGTLNIEDEYRLHETSKEPDVPLGSTWLSDFPQAWAETGGMGLAVRQAPLIIPLKATSTPVSIKQYPMSQEARLGIKPHIQRLLDQGILVPCQSPWNTPLLPVKKPGTNDYRPVQDLREVNKRVEDIHPTVPNPYNLLSGLPPSHQWYTVLDLKDAFFCLRLHPTSQPLFAFEWRDPEMGISGQLTWTRLPQGFKNSPTLFDEALHRDLADFRIQHPDLILLQYVDDLLLAATSEQDCQRGTRALLQTLGNLGYRASAKKAQICQKQVKYLGYLLKEGQRWLTEARKETVMGQPTPKTPRQLREFLGTAGFCRLWIPGFAEMAAPLYPLTKTGTLFNWGPDQQKAYQEIKQALLTAPALGLPDLTKPFELFVDEKQGYAKGVLTQKLGPWRRPVAYLSKKLDPVAAGWPPCLRMVAAIAVLTKDAGKLTMGQPLVILAPHAVEALVKQPPDRWLSNARMTHYQAMLLDTDRVQFGPVVALNPATLLPLPEKEAPHDCLEILAETHGTRPDLTDQPIPDADYTWYTDGSSFLQEGQRRAGAAVTTETEVIWARALPAGTSAQRAELIALTQALKMAEGKKLNVYTDSRYAFATAHVHGEIYRRRGLLTSEGREIKNKNEILALLKALFLPKRLSIIHCPGHQKGNSAEARGNRMADQAAREAAMKAVLETSTLLAGKRTADGSEFEKRTADGSEFESPKKKAKVE

SEQ ID NO: 7137 - protein, 2094 aa, synthetic construct
MPAAKRVKLDGGDKKYSIGLDIGTNSVGWAVITDEYKVPSKKFKVLGNTDRHSIKKNLIGALLFDSGETAEATRLKRTARRRYTRRKNRICYLQEIFSNEMAKVDDSFFHRLEESFLVEEDKKHERHPIFGNIVDEVAYHEKYPTIYHLRKKLVDSTDKADLRLIYLALAHMIKFRGHFLIEGDLNPDNSDVDKLFIQLVQTYNQLFEENPINASGVDAKAILSARLSKSRRLENLIAQLPGEKKNGLFGNLIALSLGLTPNFKSNFDLAEDAKLQLSKDTYDDDLDNLLAQIGDQYADLFLAAKNLSDAILLSDILRVNTEITKAPLSASMIKRYDEHHQDLTLLKALVRQQLPEKYKEIFFDQSKNGYAGYIDGGASQEEFYKFIKPILEKMDGTEELLVKLNREDLLRKQRTFDNGSIPHQIHLGELHAILRRQEDFYPFLKDNREKIEKILTFRIPYYVGPLARGNSRFAWMTRKSEETITPWNFEEVVDKGASAQSFIERMTNFDKNLPNEKVLPKHSLLYEYFTVYNELTKVKYVTEGMRKPAFLSGEQKKAIVDLLFKTNRKVTVKQLKEDYFKKIECFDSVEISGVEDRFNASLGTYHDLLKIIKDKDFLDNEENEDILEDIVLTLTLFEDREMIEERLKTYAHLFDDKVMKQLKRRRYTGWGRLSRKLINGIRDKQSGKTILDFLKSDGFANRNFMQLIHDDSLTFKEDIQKAQVSGQGDSLHEHIANLAGSPAIKKGILQTVKVVDELVKVMGRHKPENIVIEMARENQTTQKGQKNSRERMKRIEEGIKELGSQILKEHPVENTQLQNEKLYLYYLQNGRDMYVDQELDINRLSDYDVDHIVPQSFLKDDSIDNKVLTRSDKARGKSDNVPSEEVVKKMKNYWRQLLNAKLITQRKFDNLTKAERGGLSELDKAGFIKRQLVETRQITKHVAQILDSRMNTKYDENDKLIREVKVITLKSKLVSDFRKDFQFYKVREINNYHHAHDAYLNAVVGTALIKKYPKLESEFVYGDYKVYDVRKMIAKSEQEIGKATAKYFFYSNIMNFFKTEITLANGEIRKRPLIETNGETGEIVWDKGRDFATVRKVLSMPQVNIVKKTEVQTGGFSKESILPKRNSDKLIARKKDWDPKKYGGFDSPTVAYSVLVVAKVEKGKSKKLKSVKELLGITIMERSSFEKNPIDFLEAKGYKEVKKDLIIKLPKYSLFELENGRKRMLASAGELQKGNELALPSKYVNFLYLASHYEKLKGSPEDNEQKQLFVEQHKHYLDEIIEQISEFSKRVILADANLDKVLSAYNKHRDKPIREQAENIIHLFTLTNLGAPAAFKYFDTTIDRKRYTSTKEVLDATLIHQSITGLYETRIDLSQLGGDGGGGSGSSPAPGGTLNIEDEYRLHETSKEPDVPLGSTWLSDFPQAWAETGGMGLAVRQAPLIIPLKATSTPVSIKQYPMSQEARLGIKPHIQRLLDQGILVPCQSPWNTPLLPVKKPGTNDYRPVQDLREVNKRVEDIHPTVPNPYNLLSGLPPSHQWYTVLDLKDAFFCLRLHPTSQPLFAFEWRDPEMGISGQLTWTRLPQGFKNSPTLFNEALHRDLADFRIQHPDLILLQYVDDLLLAATSEQDCQRGTRALLQTLGNLGYRASAKKAQICQKQVKYLGYLLKEGQRWLTEARKETVMGQPTPKTPRQLREFLGTAGFCRLWIPGFAEMAAPLYPLTKPGTLFNWGPDQQKAYQEIKQALLTAPALGLPDLTKPFELFVDEKQGYAKGVLTQKLGPWRRPVAYLSKKLDPVAAGWPPCLRMVAAIAVLTKDAGKLTMGQPLVILAPHAVEALVKQPPDRWLSNARMTHYQAMLLDTDRVQFGPVVALNPATLLPLPEKEAPHDCLEILAETHGTRPDLTDQPIPDADYTWYTDGSSFLQEGQRRAGAAVTTETEVIWARALPAGTSAQRAELIALTQALKMAEGKKLNVYTDSRYAFATAHVHGEIYRRRGWLTSEGREIKNKNEILALLKALFLPKRLSIIHCPGHQKGNSAEARGNRMADQAAREAAMKAVLETSTLLAGKRTADGSEFEKRTADGSEFESPKKKAKVE

SEQ ID NO: 7138 - protein, 2093 aa, synthetic construct
MPAAKRVKLDGGDKKYSIGLDIGTNSVGWAVITDEYKVPSKKFKVLGNTDRHSIKKNLIGALLFDSGETAEATRLKRTARRRYTRRKNRICYLQEIFSNEMAKVDDSFFHRLEESFLVEEDKKHERHPIFGNIVDEVAYHEKYPTIYHLRKKLVDSTDKADLRLIYLALAHMIKFRGHFLIEGDLNPDNSDVDKLFIQLVQTYNQLFEENPINASGVDAKAILSARLSKSRRLENLIAQLPGEKKNGLFGNLIALSLGLTPNFKSNFDLAEDAKLQLSKDTYDDDLDNLLAQIGDQYADLFLAAKNLSDAILLSDILRVNTEITKAPLSASMIKRYDEHHQDLTLLKALVRQQLPEKYKEIFFDQSKNGYAGYIDGGASQEEFYKFIKPILEKMDGTEELLVKLNREDLLRKQRTFDNGSIPHQIHLGELHAILRRQEDFYPFLKDNREKIEKILTFRIPYYVGPLARGNSRFAWMTRKSEETITPWNFEEVVDKGASAQSFIERMTNFDKNLPNEKVLPKHSLLYEYFTVYNELTKVKYVTEGMRKPAFLSGEQKKAIVDLLFKTNRKVTVKQLKEDYFKKIECFDSVEISGVEDRFNASLGTYHDLLKIIKDKDFLDNEENEDILEDIVLTLTLFEDREMIEERLKTYAHLFDDKVMKQLKRRRYTGWGRLSRKLINGIRDKQSGKTILDFLKSDGFANRNFMQLIHDDSLTFKEDIQKAQVSGQGDSLHEHIANLAGSPAIKKGILQTVKVVDELVKVMGRHKPENIVIEMARENQTTQKGQKNSRERMKRIEEGIKELGSQILKEHPVENTQLQNEKLYLYYLQNGRDMYVDQELDINRLSDYDVDHIVPQSFLKDDSIDNKVLTRSDKARGKSDNVPSEEVVKKMKNYWRQLLNAKLITQRKFDNLTKAERGGLSELDKAGFIKRQLVETRQITKHVAQILDSRMNTKYDENDKLIREVKVITLKSKLVSDFRKDFQFYKVREINNYHHAHDAYLNAVVGTALIKKYPKLESEFVYGDYKVYDVRKMIAKSEQEIGKATAKYFFYSNIMNFFKTEITLANGEIRKRPLIETNGETGEIVWDKGRDFATVRKVLSMPQVNIVKKTEVQTGGFSKESILPKRNSDKLIARKKDWDPKKYGGFDSPTVAYSVLVVAKVEKGKSKKLKSVKELLGITIMERSSFEKNPIDFLEAKGYKEVKKDLIIKLPKYSLFELENGRKRMLASAGELQKGNELALPSKYVNFLYLASHYEKLKGSPEDNEQKQLFVEQHKHYLDEIIEQISEFSKRVILADANLDKVLSAYNKHRDKPIREQAENIIHLFTLTNLGAPAAFKYFDTTIDRKRYTSTKEVLDATLIHQSITGLYETRIDLSQLGGDGGGGSPAPGSSGGTLQLEEEYRLFEPESTQKQEMDIWLKNFPQAWAETGGMGTAHCQAPVLIQLKATATPISIRQYPMPHEAYQGIKPHIRRMLDQGILKPCQSPWNTPLLPVKKPGTEDYRPVQDLREVNKRVEDIHPTVPNPYNLLSTLPPSHPWYTVLDLKDAFFCLRLHSESQLLFAFEWRDPEIGLSGQLTWTRLPQGFKNSPTLFNEALHSDLADFRVRYPALVLLQYVDDLLLAAATRTECLEGTKALLETLGNKGYRASAKKAQICLQEVTYLGYSLKDGQRWLTKARKEAILSIPVPKNSRQVREFLGTAGYCRLWIPGFAELAAPLYPLTRPGTLFQWGTEQQLAFEDIKKALLSSPALGLPDITKPFELFIDENSGFAKGVLVQKLGPWKRPVAYLSKKLDTVASGWPPCLRMVAAIAILVKDAGKLTLGQPLTILTSHPVEALVRQPPNKWLSNARMTHYQAMLLDAERVHFGPTVSLNPATLLPLPSGGNHHDCLQILAETHGTRPDLTDQPLPDADLTWYTDGSSFIRNGEREAGAAVTTESEVIWAAPLPPGTSAQRAELIALTQALKMAEGKKLTVYTDSRYAFATTHVHGEIYRRRGWLTSEGKEIKNKNEILALLEALFLPKRLSIIHCPGHQKGDSPQAKGNRLADDTAKKAATETHSSLTVLPAGKRTADGSEFEKRTADGSEFESPKKKAKVE

SEQ ID NO: 7139 - protein, 2094 aa, synthetic construct
MPAAKRVKLDGGDKKYSIGLDIGTNSVGWAVITDEYKVPSKKFKVLGNTDRHSIKKNLIGALLFDSGETAEATRLKRTARRRYTRRKNRICYLQEIFSNEMAKVDDSFFHRLEESFLVEEDKKHERHPIFGNIVDEVAYHEKYPTIYHLRKKLVDSTDKADLRLIYLALAHMIKFRGHFLIEGDLNPDNSDVDKLFIQLVQTYNQLFEENPINASGVDAKAILSARLSKSRRLENLIAQLPGEKKNGLFGNLIALSLGLTPNFKSNFDLAEDAKLQLSKDTYDDDLDNLLAQIGDQYADLFLAAKNLSDAILLSDILRVNTEITKAPLSASMIKRYDEHHQDLTLLKALVRQQLPEKYKEIFFDQSKNGYAGYIDGGASQEEFYKFIKPILEKMDGTEELLVKLNREDLLRKQRTFDNGSIPHQIHLGELHAILRRQEDFYPFLKDNREKIEKILTFRIPYYVGPLARGNSRFAWMTRKSEETITPWNFEEVVDKGASAQSFIERMTNFDKNLPNEKVLPKHSLLYEYFTVYNELTKVKYVTEGMRKPAFLSGEQKKAIVDLLFKTNRKVTVKQLKEDYFKKIECFDSVEISGVEDRFNASLGTYHDLLKIIKDKDFLDNEENEDILEDIVLTLTLFEDREMIEERLKTYAHLFDDKVMKQLKRRRYTGWGRLSRKLINGIRDKQSGKTILDFLKSDGFANRNFMQLIHDDSLTFKEDIQKAQVSGQGDSLHEHIANLAGSPAIKKGILQTVKVVDELVKVMGRHKPENIVIEMARENQTTQKGQKNSRERMKRIEEGIKELGSQILKEHPVENTQLQNEKLYLYYLQNGRDMYVDQELDINRLSDYDVDHIVPQSFLKDDSIDNKVLTRSDKARGKSDNVPSEEVVKKMKNYWRQLLNAKLITQRKFDNLTKAERGGLSELDKAGFIKRQLVETRQITKHVAQILDSRMNTKYDENDKLIREVKVITLKSKLVSDFRKDFQFYKVREINNYHHAHDAYLNAVVGTALIKKYPKLESEFVYGDYKVYDVRKMIAKSEQEIGKATAKYFFYSNIMNFFKTEITLANGEIRKRPLIETNGETGEIVWDKGRDFATVRKVLSMPQVNIVKKTEVQTGGFSKESILPKRNSDKLIARKKDWDPKKYGGFDSPTVAYSVLVVAKVEKGKSKKLKSVKELLGITIMERSSFEKNPIDFLEAKGYKEVKKDLIIKLPKYSLFELENGRKRMLASAGELQKGNELALPSKYVNFLYLASHYEKLKGSPEDNEQKQLFVEQHKHYLDEIIEQISEFSKRVILADANLDKVLSAYNKHRDKPIREQAENIIHLFTLTNLGAPAAFKYFDTTIDRKRYTSTKEVLDATLIHQSITGLYETRIDLSQLGGDGGGGSPAPGSSGGTLNLEDEYRLYETSAEPEVSPGSTWLSDFPQAWAETGGMGLAVRQAPLIIPLKATSTPVSIKQYPMSQEAKLGIKPHIQRLLDQGILVPCQSPWNTPLLPVKKPGTNDYRPVQDLREVNKRVEDIHPTVPNPYNLLSGLPPSHRWYTVLDLKDAFFCLRLHPTSQPLFAFEWRDPGMGISGQLTWTRLPQGFKNSPTLFNEALHRDLADFRIQHPDLILLQYVDDILLAATSELDCQQGTRALLLTLGNLGYRASAKKAQLCQKQVKYLGYLLKEGQRWLTEARKETVMGQPTPKTPRQLREFLGTAGFCRLWIPGFAEMAAPLYPLTKPGTLFNWGPDQQKAYQEIKQALLTAPALGLPDLTKPFELFVDEKQGYAKGVLTQKLGPWRRPVAYLSKKLDPVAAGWPPCLRMVAAIAVLRKDAGKLTMGQPLVILAPHAVEALVKQPPDRWLSNARMTHYQAMLLDTDRVQFGPVVALNPATLLPLPEEGAPHDCLEILAETHGTRPDLTDQPIPDADHTWYTDGSSFLQEGQRKAGAAVTTETEVIWARALPAGTSAQRAELIALTQALKMAEGKRLNVYTDSRYAFATAHIHGEIYRRRGWLTSEGREIKNKSEILALLKALFLPKRLSIIHCLGHQKGDSAEARGNRLADQAAREAAIKTPPDTSTLLAGKRTADGSEFEKRTADGSEFESPKKKAKVE

SEQ ID NO: 7140 - protein, 2094 aa, synthetic construct
MPAAKRVKLDGGDKKYSIGLDIGTNSVGWAVITDEYKVPSKKFKVLGNTDRHSIKKNLIGALLFDSGETAEATRLKRTARRRYTRRKNRICYLQEIFSNEMAKVDDSFFHRLEESFLVEEDKKHERHPIFGNIVDEVAYHEKYPTIYHLRKKLVDSTDKADLRLIYLALAHMIKFRGHFLIEGDLNPDNSDVDKLFIQLVQTYNQLFEENPINASGVDAKAILSARLSKSRRLENLIAQLPGEKKNGLFGNLIALSLGLTPNFKSNFDLAEDAKLQLSKDTYDDDLDNLLAQIGDQYADLFLAAKNLSDAILLSDILRVNTEITKAPLSASMIKRYDEHHQDLTLLKALVRQQLPEKYKEIFFDQSKNGYAGYIDGGASQEEFYKFIKPILEKMDGTEELLVKLNREDLLRKQRTFDNGSIPHQIHLGELHAILRRQEDFYPFLKDNREKIEKILTFRIPYYVGPLARGNSRFAWMTRKSEETITPWNFEEVVDKGASAQSFIERMTNFDKNLPNEKVLPKHSLLYEYFTVYNELTKVKYVTEGMRKPAFLSGEQKKAIVDLLFKTNRKVTVKQLKEDYFKKIECFDSVEISGVEDRFNASLGTYHDLLKIIKDKDFLDNEENEDILEDIVLTLTLFEDREMIEERLKTYAHLFDDKVMKQLKRRRYTGWGRLSRKLINGIRDKQSGKTILDFLKSDGFANRNFMQLIHDDSLTFKEDIQKAQVSGQGDSLHEHIANLAGSPAIKKGILQTVKVVDELVKVMGRHKPENIVIEMARENQTTQKGQKNSRERMKRIEEGIKELGSQILKEHPVENTQLQNEKLYLYYLQNGRDMYVDQELDINRLSDYDVDHIVPQSFLKDDSIDNKVLTRSDKARGKSDNVPSEEVVKKMKNYWRQLLNAKLITQRKFDNLTKAERGGLSELDKAGFIKRQLVETRQITKHVAQILDSRMNTKYDENDKLIREVKVITLKSKLVSDFRKDFQFYKVREINNYHHAHDAYLNAVVGTALIKKYPKLESEFVYGDYKVYDVRKMIAKSEQEIGKATAKYFFYSNIMNFFKTEITLANGEIRKRPLIETNGETGEIVWDKGRDFATVRKVLSMPQVNIVKKTEVQTGGFSKESILPKRNSDKLIARKKDWDPKKYGGFDSPTVAYSVLVVAKVEKGKSKKLKSVKELLGITIMERSSFEKNPIDFLEAKGYKEVKKDLIIKLPKYSLFELENGRKRMLASAGELQKGNELALPSKYVNFLYLASHYEKLKGSPEDNEQKQLFVEQHKHYLDEIIEQISEFSKRVILADANLDKVLSAYNKHRDKPIREQAENIIHLFTLTNLGAPAAFKYFDTTIDRKRYTSTKEVLDATLIHQSITGLYETRIDLSQLGGDGGGGSPAPGSSGGTLNIEDEYRLHETSKGPDVPLGSTWLSDFPQAWAETGGMGLAVRQAPLIIPLKATSTPVSIKQYPMSQEARLGIKPHIQRLLDQGILVPCQSPWNTPLLPVKKPGTNDYRPVQDLREVNKRVEDIHPTVPNPYNLLSGLPPSHQWYTVLDLKDAFFCLRLHPTSQSLFAFEWRDPEMGISGQLTWTRLPQGFKNSPTLFNEALHRDLADFRIQHPDLILLQYVDDLLLAATSELDCQQGTRALLQTLGDLGYRASAKKAQICQKQVKYLGYLLKEGQRWLTEARKETVMGQPTPKTPRQLREFLGTAGFCRLWIPGFAEMAAPLYPLTKPGTLFEWGPDQQKAYQEIKQALLTAPALGLPDLTKPFELFVDEKQGYAKGVLTQKLGPWRRPVAYLSKKLDPVAAGWPPCLRMVAAIAVLTKDAGKLTMGQPLVILAPHAVEALVKQPPDRWLSNARMTHYQALLLDTDRVQFGPIVALNPATLLPLPEEGLQHDCLDILAEAHGTRPDLTDQPLPDADHTWYTDGSSFLQEGQRKAGAAVTTETEVVWAKALPAGTSAQRAELIALTQALKMAEGKKLNVYTDSRYAFATAHIHGEIYRRRGWLTSEGKEIKNKDEILALLKALFLPKRLSIIHCPGHQKGNRAEARGNRMADQAAREVATRETPETSTLLAGKRTADGSEFEKRTADGSEFESPKKKAKVE

SEQ ID NO: 7141 - protein, 2092 aa, synthetic construct
MPAAKRVKLDGGDKKYSIGLDIGTNSVGWAVITDEYKVPSKKFKVLGNTDRHSIKKNLIGALLFDSGETAEATRLKRTARRRYTRRKNRICYLQEIFSNEMAKVDDSFFHRLEESFLVEEDKKHERHPIFGNIVDEVAYHEKYPTIYHLRKKLVDSTDKADLRLIYLALAHMIKFRGHFLIEGDLNPDNSDVDKLFIQLVQTYNQLFEENPINASGVDAKAILSARLSKSRRLENLIAQLPGEKKNGLFGNLIALSLGLTPNFKSNFDLAEDAKLQLSKDTYDDDLDNLLAQIGDQYADLFLAAKNLSDAILLSDILRVNTEITKAPLSASMIKRYDEHHQDLTLLKALVRQQLPEKYKEIFFDQSKNGYAGYIDGGASQEEFYKFIKPILEKMDGTEELLVKLNREDLLRKQRTFDNGSIPHQIHLGELHAILRRQEDFYPFLKDNREKIEKILTFRIPYYVGPLARGNSRFAWMTRKSEETITPWNFEEVVDKGASAQSFIERMTNFDKNLPNEKVLPKHSLLYEYFTVYNELTKVKYVTEGMRKPAFLSGEQKKAIVDLLFKTNRKVTVKQLKEDYFKKIECFDSVEISGVEDRFNASLGTYHDLLKIIKDKDFLDNEENEDILEDIVLTLTLFEDREMIEERLKTYAHLFDDKVMKQLKRRRYTGWGRLSRKLINGIRDKQSGKTILDFLKSDGFANRNFMQLIHDDSLTFKEDIQKAQVSGQGDSLHEHIANLAGSPAIKKGILQTVKVVDELVKVMGRHKPENIVIEMARENQTTQKGQKNSRERMKRIEEGIKELGSQILKEHPVENTQLQNEKLYLYYLQNGRDMYVDQELDINRLSDYDVDHIVPQSFLKDDSIDNKVLTRSDKARGKSDNVPSEEVVKKMKNYWRQLLNAKLITQRKFDNLTKAERGGLSELDKAGFIKRQLVETRQITKHVAQILDSRMNTKYDENDKLIREVKVITLKSKLVSDFRKDFQFYKVREINNYHHAHDAYLNAVVGTALIKKYPKLESEFVYGDYKVYDVRKMIAKSEQEIGKATAKYFFYSNIMNFFKTEITLANGEIRKRPLIETNGETGEIVWDKGRDFATVRKVLSMPQVNIVKKTEVQTGGFSKESILPKRNSDKLIARKKDWDPKKYGGFDSPTVAYSVLVVAKVEKGKSKKLKSVKELLGITIMERSSFEKNPIDFLEAKGYKEVKKDLIIKLPKYSLFELENGRKRMLASAGELQKGNELALPSKYVNFLYLASHYEKLKGSPEDNEQKQLFVEQHKHYLDEIIEQISEFSKRVILADANLDKVLSAYNKHRDKPIREQAENIIHLFTLTNLGAPAAFKYFDTTIDRKRYTSTKEVLDATLIHQSITGLYETRIDLSQLGGDGGGGSPAPGSSGGVLNLEEEYRLHEKPVPSSIDPSWLQLFPTVWAERAGMGLANQVPPVVVELRSGASPVAVRQYPMSKEAREGIRPHIQRFLDLGVLVPCQSPWNTPLLPVKKPGTNDYRPVQDLREINKRVQDIHPTVPNPYNLLSSLPPSHTWYSVLDLKDAFFCLKLHPNSQPLFAFEWRDPEKGNTGQLTWTRLPQGFKNSPTLFNEALHRDLAPFRALNPQVVLLQYVDDLLVAAPTYRDCKEGTQKLLQELSKLGYRVSAKKAQLCQKEVTYLGYLLKEGKRWLTPARKATVMKIPPPTTPRQVREFLGTAGFCRLWIPGFASLAAPLYPLTKPSIPFIWTEEHQKAFDRIKEALLSAPALALPDLTKPFTLYVDERAGVARGVLTQTLGPWRRPVAYLSKKLDPVASGWPTCLKAVAAVALLLKDADKLTLGQNVTVIASHSLESIVRQPPDRWMTNARMTHYQSLLLNERVSFAPPAVLNPATLLPVESEATPVHRCSEILAEETGTRRDLKDQPLPGVPAWYTDGSSFIAEGKRRAGAAIVDGKRTVWASSLPEGTSAQKAELVALTQALRLAEGKDINIYTDSRYAFATAHIHGAIYKQRGWLTSAGKDIKNKEEILALLEAIHLPKRVAIIHCPGHQKGNDPVATGNRRADEAAKQAALSTRVLAETTKPAGKRTADGSEFEKRTADGSEFESPKKKAKVE

SEQ ID NO: 7142 - protein, 2094 aa, synthetic construct; identical to SEQ ID NO: 4525

SEQ ID NO: 7143 - protein, 2096 aa, synthetic construct
MPAAKRVKLDGGDKKYSIGLDIGTNSVGWAVITDEYKVPSKKFKVLGNTDRHSIKKNLIGALLFDSGETAEATRLKRTARRRYTRRKNRICYLQEIFSNEMAKVDDSFFHRLEESFLVEEDKKHERHPIFGNIVDEVAYHEKYPTIYHLRKKLVDSTDKADLRLIYLALAHMIKFRGHFLIEGDLNPDNSDVDKLFIQLVQTYNQLFEENPINASGVDAKAILSARLSKSRRLENLIAQLPGEKKNGLFGNLIALSLGLTPNFKSNFDLAEDAKLQLSKDTYDDDLDNLLAQIGDQYADLFLAAKNLSDAILLSDILRVNTEITKAPLSASMIKRYDEHHQDLTLLKALVRQQLPEKYKEIFFDQSKNGYAGYIDGGASQEEFYKFIKPILEKMDGTEELLVKLNREDLLRKQRTFDNGSIPHQIHLGELHAILRRQEDFYPFLKDNREKIEKILTFRIPYYVGPLARGNSRFAWMTRKSEETITPWNFEEVVDKGASAQSFIERMTNFDKNLPNEKVLPKHSLLYEYFTVYNELTKVKYVTEGMRKPAFLSGEQKKAIVDLLFKTNRKVTVKQLKEDYFKKIECFDSVEISGVEDRFNASLGTYHDLLKIIKDKDFLDNEENEDILEDIVLTLTLFEDREMIEERLKTYAHLFDDKVMKQLKRRRYTGWGRLSRKLINGIRDKQSGKTILDFLKSDGFANRNFMQLIHDDSLTFKEDIQKAQVSGQGDSLHEHIANLAGSPAIKKGILQTVKVVDELVKVMGRHKPENIVIEMARENQTTQKGQKNSRERMKRIEEGIKELGSQILKEHPVENTQLQNEKLYLYYLQNGRDMYVDQELDINRLSDYDVDHIVPQSFLKDDSIDNKVLTRSDKARGKSDNVPSEEVVKKMKNYWRQLLNAKLITQRKFDNLTKAERGGLSELDKAGFIKRQLVETRQITKHVAQILDSRMNTKYDENDKLIREVKVITLKSKLVSDFRKDFQFYKVREINNYHHAHDAYLNAVVGTALIKKYPKLESEFVYGDYKVYDVRKMIAKSEQEIGKATAKYFFYSNIMNFFKTEITLANGEIRKRPLIETNGETGEIVWDKGRDFATVRKVLSMPQVNIVKKTEVQTGGFSKESILPKRNSDKLIARKKDWDPKKYGGFDSPTVAYSVLVVAKVEKGKSKKLKSVKELLGITIMERSSFEKNPIDFLEAKGYKEVKKDLIIKLPKYSLFELENGRKRMLASAGELQKGNELALPSKYVNFLYLASHYEKLKGSPEDNEQKQLFVEQHKHYLDEIIEQISEFSKRVILADANLDKVLSAYNKHRDKPIREQAENIIHLFTLTNLGAPAAFKYFDTTIDRKRYTSTKEVLDATLIHQSITGLYETRIDLSQLGGDGGGSSGGSPAPGGTAPLEEEYRLFLEAPIQNVTLLEQWKREIPKVWAEINPPGLASTQAPIHVQLLSTALPVRVRQYPITLEAKRSLRETIRKFRAAGILRPVHSPWNTPLLPVRKSGTSEYRMVQDLREVNKRVETIHPTVPNPYTLLSLLPPDRIWYSVLDLKDAFFCIPLAPESQLIFAFEWADAEEGESGQLTWTRLPQGFKNSPTLFNEALNRDLQGFRLDHPSVSLLQYVDDLLIAADTQAACLSATRDLLMTLAELGYRVSGKKAQLCQEEVTYLGFKIHKGSRSLSNSRTQAILQIPVPKTKRQVREFLGKIGYCRLFIPGFAELAQPLYAATRPGNDPLVWGEKEEEAFQSLKLALTQPPALALPSLDKPFQLFVEETSGAAKGVLTQALGPWKRPVAYLSKRLDPVAAGWPRCLRAIAAAALLTREASKLTFGQDIEITSSHNLESLLRSPPDKWLTNARITQYQVLLLDPPRVRFKQTAALNPATLLPETDDTLPIHHCLDTLDSLTSTRPDLTDQPLAQAEATLFTDGSSYIRDGKRYAGAAVVTLDSVIWAEPLPIGTSAQKAELIALTKALEWSKDKSVNIYTDSRYAFATLHVHGMIYRERGWLTAGGKAIKNAPEILALLTAVWLPKRVAVMHCKGHQKDDAPTSTGNRRADEVAREVAIRPLSTQATISAGKRTADGSEFEKRTADGSEFESPKKKAKVE

SEQ ID NO: 7144 - protein, 2093 aa, synthetic construct
MPAAKRVKLDGGDKKYSIGLDIGTNSVGWAVITDEYKVPSKKFKVLGNTDRHSIKKNLIGALLFDSGETAEATRLKRTARRRYTRRKNRICYLQEIFSNEMAKVDDSFFHRLEESFLVEEDKKHERHPIFGNIVDEVAYHEKYPTIYHLRKKLVDSTDKADLRLIYLALAHMIKFRGHFLIEGDLNPDNSDVDKLFIQLVQTYNQLFEENPINASGVDAKAILSARLSKSRRLENLIAQLPGEKKNGLFGNLIALSLGLTPNFKSNFDLAEDAKLQLSKDTYDDDLDNLLAQIGDQYADLFLAAKNLSDAILLSDILRVNTEITKAPLSASMIKRYDEHHQDLTLLKALVRQQLPEKYKEIFFDQSKNGYAGYIDGGASQEEFYKFIKPILEKMDGTEELLVKLNREDLLRKQRTFDNGSIPHQIHLGELHAILRRQEDFYPFLKDNREKIEKILTFRIPYYVGPLARGNSRFAWMTRKSEETITPWNFEEVVDKGASAQSFIERMTNFDKNLPNEKVLPKHSLLYEYFTVYNELTKVKYVTEGMRKPAFLSGEQKKAIVDLLFKTNRKVTVKQLKEDYFKKIECFDSVEISGVEDRFNASLGTYHDLLKIIKDKDFLDNEENEDILEDIVLTLTLFEDREMIEERLKTYAHLFDDKVMKQLKRRRYTGWGRLSRKLINGIRDKQSGKTILDFLKSDGFANRNFMQLIHDDSLTFKEDIQKAQVSGQGDSLHEHIANLAGSPAIKKGILQTVKVVDELVKVMGRHKPENIVIEMARENQTTQKGQKNSRERMKRIEEGIKELGSQILKEHPVENTQLQNEKLYLYYLQNGRDMYVDQELDINRLSDYDVDHIVPQSFLKDDSIDNKVLTRSDKARGKSDNVPSEEVVKKMKNYWRQLLNAKLITQRKFDNLTKAERGGLSELDKAGFIKRQLVETRQITKHVAQILDSRMNTKYDENDKLIREVKVITLKSKLVSDFRKDFQFYKVREINNYHHAHDAYLNAVVGTALIKKYPKLESEFVYGDYKVYDVRKMIAKSEQEIGKATAKYFFYSNIMNFFKTEITLANGEIRKRPLIETNGETGEIVWDKGRDFATVRKVLSMPQVNIVKKTEVQTGGFSKESILPKRNSDKLIARKKDWDPKKYGGFDSPTVAYSVLVVAKVEKGKSKKLKSVKELLGITIMERSSFEKNPIDFLEAKGYKEVKKDLIIKLPKYSLFELENGRKRMLASAGELQKGNELALPSKYVNFLYLASHYEKLKGSPEDNEQKQLFVEQHKHYLDEIIEQISEFSKRVILADANLDKVLSAYNKHRDKPIREQAENIIHLFTLTNLGAPAAFKYFDTTIDRKRYTSTKEVLDATLIHQSITGLYETRIDLSQLGGDGGGSSGGSPAPGGTLQLEEEYRLFEPESTQKQEMDIWLKNFPQAWAETGGMGTAHCQAPVLIQLKATATPISIRQYPMPHEAYQGIKPHIRRMLDQGILKPCQSPWNTPLLPVKKPGTEDYRPVQDLREVNKRVEDIHPTVPNPYNLLSTLPPSHPWYTVLDLKDAFFCLRLHSESQLLFAFEWRDPEIGLSGQLTWTRLPQGFKNSPTLFNEALHSDLADFRVRYPALVLLQYVDDLLLAAATRTECLEGTKALLETLGNKGYRASAKKAQICLQEVTYLGYSLKDGQRWLTKARKEAILSIPVPKNSRQVREFLGKAGYCRLFIPGFAELAAPLYPLTRPGTLFQWGTEQQLAFEDIKKALLSSPALGLPDITKPFELFIDENSGFAKGVLVQKLGPWKRPVAYLSKKLDTVASGWPPCLRMVAAIAILVKDAGKLTLGQPLTILTSHPVEALVRQPPNKWLSNARMTHYQAMLLDAERVHFGPTVSLNPATLLPLPSGGNHHDCLQILAETHGTRPDLTDQPLPDADLTWYTDGSSFIRNGEREAGAAVTTESEVIWAAPLPPGTSAQRAELIALTQALKMAEGKKLTVYTDSRYAFATTHVHGEIYRRRGWLTSEGKEIKNKNEILALLEALFLPKRLSIIHCPGHQKGDSPQAKGNRLADDTAKKAATETHSSLTVLPAGKRTADGSEFEKRTADGSEFESPKKKAKVE

SEQ ID NO: 7145 - protein, 2174 aa, synthetic construct
MPAAKRVKLDGGDKKYSIGLDIGTNSVGWAVITDEYKVPSKKFKVLGNTDRHSIKKNLIGALLFDSGETAEATRLKRTARRRYTRRKNRICYLQEIFSNEMAKVDDSFFHRLEESFLVEEDKKHERHPIFGNIVDEVAYHEKYPTIYHLRKKLVDSTDKADLRLIYLALAHMIKFRGHFLIEGDLNPDNSDVDKLFIQLVQTYNQLFEENPINASGVDAKAILSARLSKSRRLENLIAQLPGEKKNGLFGNLIALSLGLTPNFKSNFDLAEDAKLQLSKDTYDDDLDNLLAQIGDQYADLFLAAKNLSDAILLSDILRVNTEITKAPLSASMIKRYDEHHQDLTLLKALVRQQLPEKYKEIFFDQSKNGYAGYIDGGASQEEFYKFIKPILEKMDGTEELLVKLNREDLLRKQRTFDNGSIPHQIHLGELHAILRRQEDFYPFLKDNREKIEKILTFRIPYYVGPLARGNSRFAWMTRKSEETITPWNFEEVVDKGASAQSFIERMTNFDKNLPNEKVLPKHSLLYEYFTVYNELTKVKYVTEGMRKPAFLSGEQKKAIVDLLFKTNRKVTVKQLKEDYFKKIECFDSVEISGVEDRFNASLGTYHDLLKIIKDKDFLDNEENEDILEDIVLTLTLFEDREMIEERLKTYAHLFDDKVMKQLKRRRYTGWGRLSRKLINGIRDKQSGKTILDFLKSDGFANRNFMQLIHDDSLTFKEDIQKAQVSGQGDSLHEHIANLAGSPAIKKGILQTVKVVDELVKVMGRHKPENIVIEMARENQTTQKGQKNSRERMKRIEEGIKELGSQILKEHPVENTQLQNEKLYLYYLQNGRDMYVDQELDINRLSDYDVDHIVPQSFLKDDSIDNKVLTRSDKARGKSDNVPSEEVVKKMKNYWRQLLNAKLITQRKFDNLTKAERGGLSELDKAGFIKRQLVETRQITKHVAQILDSRMNTKYDENDKLIREVKVITLKSKLVSDFRKDFQFYKVREINNYHHAHDAYLNAVVGTALIKKYPKLESEFVYGDYKVYDVRKMIAKSEQEIGKATAKYFFYSNIMNFFKTEITLANGEIRKRPLIETNGETGEIVWDKGRDFATVRKVLSMPQVNIVKKTEVQTGGFSKESILPKRNSDKLIARKKDWDPKKYGGFDSPTVAYSVLVVAKVEKGKSKKLKSVKELLGITIMERSSFEKNPIDFLEAKGYKEVKKDLIIKLPKYSLFELENGRKRMLASAGELQKGNELALPSKYVNFLYLASHYEKLKGSPEDNEQKQLFVEQHKHYLDEIIEQISEFSKRVILADANLDKVLSAYNKHRDKPIREQAENIIHLFTLTNLGAPAAFKYFDTTIDRKRYTSTKEVLDATLIHQSITGLYETRIDLSQLGGDGGGSSGGSPAPGGMNPLQLLQPLPAEIKGTKLLAHWNSGATITCIPESFLEDEQPIKKTLIKTIHGEKQQNVYYVTFKVKGRKVEAEVIASPYEYILLSPTDVPWLTQQPLQLTILVPLQEYQEKILSKTALPEDQKQQLKTLFVKYDNLWQHWENQVGHRKIRPHNIATGDYPPRPQKQYPINPKAKPSIQIVIDDLLKQGVLTPQNSTMNTPVYPVPKPDGRWRMVLDYREVNKTIPLTAAQNQHSAGILATIVRQKYKTTLDLANGFWAHPITPESYWLTAFTWQGKQYCWTRLPQGFLNSPALFNADVVDLLKEIPNVQVYVDDIYLSHDDPKEHVQQLEKVFQILLQAGYVVSLKKSEIGQKTVEFLGFNITKEGRGLTDTFKTKLLNITPPKDLKQLQSILGKLNFARNFIPNFAELVQPLYNLIAPAKGKYIEWSEENTKQLNMVIEALNTASNLEERLPEQRLVIKVNTSPSAGYVRYYNETGKKPIMYLNYVFSKAELKFSMLEKLLTTMHKALIKAMDLAMGQEILVYSPIVSMTKIQKTPLPERKALPIRWITWMTYLEDPRIQFHYDKTLPELKHIPDVYTSSQSPVKHPSQYEGVFYTDGSAIKSPDPTKSNNAGMGIVHATYKPEYQVLNQWSIPLGNHTAQMAEIAAVEFACKKALKIPGPVLVITDSFYVAESANKELPYWKSNGFVNNKKKPLKHISKWKSIAECLSMKPDITIQHEKGISLQIPVFILKGNALADKLATQGSYVVNAGKRTADGSEFEKRTADGSEFESPKKKAKVE

SEQ ID NO: 7146 - protein, 2092 aa, synthetic construct
MPAAKRVKLDGGDKKYSIGLDIGTNSVGWAVITDEYKVPSKKFKVLGNTDRHSIKKNLIGALLFDSGETAEATRLKRTARRRYTRRKNRICYLQEIFSNEMAKVDDSFFHRLEESFLVEEDKKHERHPIFGNIVDEVAYHEKYPTIYHLRKKLVDSTDKADLRLIYLALAHMIKFRGHFLIEGDLNPDNSDVDKLFIQLVQTYNQLFEENPINASGVDAKAILSARLSKSRRLENLIAQLPGEKKNGLFGNLIALSLGLTPNFKSNFDLAEDAKLQLSKDTYDDDLDNLLAQIGDQYADLFLAAKNLSDAILLSDILRVNTEITKAPLSASMIKRYDEHHQDLTLLKALVRQQLPEKYKEIFFDQSKNGYAGYIDGGASQEEFYKFIKPILEKMDGTEELLVKLNREDLLRKQRTFDNGSIPHQIHLGELHAILRRQEDFYPFLKDNREKIEKILTFRIPYYVGPLARGNSRFAWMTRKSEETITPWNFEEVVDKGASAQSFIERMTNFDKNLPNEKVLPKHSLLYEYFTVYNELTKVKYVTEGMRKPAFLSGEQKKAIVDLLFKTNRKVTVKQLKEDYFKKIECFDSVEISGVEDRFNASLGTYHDLLKIIKDKDFLDNEENEDILEDIVLTLTLFEDREMIEERLKTYAHLFDDKVMKQLKRRRYTGWGRLSRKLINGIRDKQSGKTILDFLKSDGFANRNFMQLIHDDSLTFKEDIQKAQVSGQGDSLHEHIANLAGSPAIKKGILQTVKVVDELVKVMGRHKPENIVIEMARENQTTQKGQKNSRERMKRIEEGIKELGSQILKEHPVENTQLQNEKLYLYYLQNGRDMYVDQELDINRLSDYDVDHIVPQSFLKDDSIDNKVLTRSDKARGKSDNVPSEEVVKKMKNYWRQLLNAKLITQRKFDNLTKAERGGLSELDKAGFIKRQLVETRQITKHVAQILDSRMNTKYDENDKLIREVKVITLKSKLVSDFRKDFQFYKVREINNYHHAHDAYLNAVVGTALIKKYPKLESEFVYGDYKVYDVRKMIAKSEQEIGKATAKYFFYSNIMNFFKTEITLANGEIRKRPLIETNGETGEIVWDKGRDFATVRKVLSMPQVNIVKKTEVQTGGFSKESILPKRNSDKLIARKKDWDPKKYGGFDSPTVAYSVLVVAKVEKGKSKKLKSVKELLGITIMERSSFEKNPIDFLEAKGYKEVKKDLIIKLPKYSLFELENGRKRMLASAGELQKGNELALPSKYVNFLYLASHYEKLKGSPEDNEQKQLFVEQHKHYLDEIIEQISEFSKRVILADANLDKVLSAYNKHRDKPIREQAENIIHLFTLTNLGAPAAFKYFDTTIDRKRYTSTKEVLDATLIHQSITGLYETRIDLSQLGGDGGGSSGGSPAPGGVLNLEEEYRLHEKPVPSSIDPSWLQLFPTVWAERAGMGLANQVPPVVVELRSGASPVAVRQYPMSKEAREGIRPHIQKFLDLGVLVPCRSPWNTPLLPVKKPGTNDYRPVQDLREINKRVQDIHPTVPNPYNLLSSLPPSYTWYSVLDLKDAFFCLRLHPNSQPLFAFEWKDPEKGNTGQLTWTRLPQGFKNSPTLFNEALHRDLAPFRALNPQVVLLQYVDDLLVAAPTYEDCKKGTQKLLQELSKLGYRVSAKKAQLCQREVTYLGYLLKEGKRWLTPARKATVMKIPVPTTPRQVREFLGKAGFCRLFIPGFASLAAPLYPLTKPSIPFIWTEEHQQAFDHIKKALLSAPALALPDLTKPFTLYIDERAGVARGVLTQTLGPWRRPVAYLSKKLDPVASGWPTCLKAVAAVALLLKDADKLTLGQNVTVIASHSLESIVRQPPDRWMTNARMTHYQSLLLNERVSFAPPAVLNPATLLPVESEATPVHRCSEILAEETGTRRDLEDQPLPGVPTWYTDGSSFITEGKRRAGAPIVDGKRTVWASSLPEGTSAQKAELVALTQALRLAEGKNINIYTDSRYAFATAHIHGAIYKQRGWLTSAGKDIKNKEEILALLEAIHLPRRVAIIHCPGHQRGSNPVATGNRRADEAAKQAALSTRVLAGTTKPAGKRTADGSEFEKRTADGSEFESPKKKAKVE

SEQ ID NO: 7147 - protein, 2094 aa, synthetic construct
MPAAKRVKLDGGDKKYSIGLDIGTNSVGWAVITDEYKVPSKKFKVLGNTDRHSIKKNLIGALLFDSGETAEATRLKRTARRRYTRRKNRICYLQEIFSNEMAKVDDSFFHRLEESFLVEEDKKHERHPIFGNIVDEVAYHEKYPTIYHLRKKLVDSTDKADLRLIYLALAHMIKFRGHFLIEGDLNPDNSDVDKLFIQLVQTYNQLFEENPINASGVDAKAILSARLSKSRRLENLIAQLPGEKKNGLFGNLIALSLGLTPNFKSNFDLAEDAKLQLSKDTYDDDLDNLLAQIGDQYADLFLAAKNLSDAILLSDILRVNTEITKAPLSASMIKRYDEHHQDLTLLKALVRQQLPEKYKEIFFDQSKNGYAGYIDGGASQEEFYKFIKPILEKMDGTEELLVKLNREDLLRKQRTFDNGSIPHQIHLGELHAILRRQEDFYPFLKDNREKIEKILTFRIPYYVGPLARGNSRFAWMTRKSEETITPWNFEEVVDKGASAQSFIERMTNFDKNLPNEKVLPKHSLLYEYFTVYNELTKVKYVTEGMRKPAFLSGEQKKAIVDLLFKTNRKVTVKQLKEDYFKKIECFDSVEISGVEDRFNASLGTYHDLLKIIKDKDFLDNEENEDILEDIVLTLTLFEDREMIEERLKTYAHLFDDKVMKQLKRRRYTGWGRLSRKLINGIRDKQSGKTILDFLKSDGFANRNFMQLIHDDSLTFKEDIQKAQVSGQGDSLHEHIANLAGSPAIKKGILQTVKVVDELVKVMGRHKPENIVIEMARENQTTQKGQKNSRERMKRIEEGIKELGSQILKEHPVENTQLQNEKLYLYYLQNGRDMYVDQELDINRLSDYDVDHIVPQSFLKDDSIDNKVLTRSDKARGKSDNVPSEEVVKKMKNYWRQLLNAKLITQRKFDNLTKAERGGLSELDKAGFIKRQLVETRQITKHVAQILDSRMNTKYDENDKLIREVKVITLKSKLVSDFRKDFQFYKVREINNYHHAHDAYLNAVVGTALIKKYPKLESEFVYGDYKVYDVRKMIAKSEQEIGKATAKYFFYSNIMNFFKTEITLANGEIRKRPLIETNGETGEIVWDKGRDFATVRKVLSMPQVNIVKKTEVQTGGFSKESILPKRNSDKLIARKKDWDPKKYGGFDSPTVAYSVLVVAKVEKGKSKKLKSVKELLGITIMERSSFEKNPIDFLEAKGYKEVKKDLIIKLPKYSLFELENGRKRMLASAGELQKGNELALPSKYVNFLYLASHYEKLKGSPEDNEQKQLFVEQHKHYLDEIIEQISEFSKRVILADANLDKVLSAYNKHRDKPIREQAENIIHLFTLTNLGAPAAFKYFDTTIDRKRYTSTKEVLDATLIHQSITGLYETRIDLSQLGGDGGGSSGGSPAPGGTLNIEDEYRLHETSKEPDVSLGSTWLSDFPQAWAETGGMGLAVRQAPLIIPLKATSTPVSIKQYPMSQEARLGIKPHIQRLLDQGILVPCQSPWNTPLLPVKKPGTNDYRPVQDLREVNKRVEDIHPTVPNPYNLLSGLPPSHQWYTVLDLKDAFFCLRLHPTSQPLFAFEWRDPEMGISGQLTWTRLPQGFKNSPTLFNEALHRDLAGFRIQHPDLILLQYVDDLLLAATSELDCQQGTRALLQTLGDLGYRASAKKAQICQKQVKYLGYLLKEGQRWLTEARKETVMGQPIPKTPRQLREFLGTAGFCRLWIPGFAEMAAPLYPLTKPGTLFNWGPDQQKAFQEIKQALLTAPALGLPDLTKPFELFVDEKQGYAKGVLTQKLGPWRRPVAYLSKKLDPVAAGWPPCLRMVAAIAVLTKDAGKLTMGQPLVILAPHAVEALVKQPPDRWLSNARMTHYQALLLDTDRVQFGPVVALNPATLLPLPEEGLQHDCLDILAEAHGTRSDLMDQPLPDADHTWYTDGSSFLQEGQRKAGAAVTTETEVIWARALPAGTSAQRAELIALTQALKMAEGKKLNVYTDSRYAFATAHIHGEIYRRRGWLTSEGKEIKNKDEILALLKALFLPKRLSIIHCPGHQKGNSAEARGNRMADQAAREVATRETPETSTLLAGKRTADGSEFEKRTADGSEFESPKKKAKVE

SEQ ID NO: 7148 - protein, 2092 aa, synthetic construct
MPAAKRVKLDGGDKKYSIGLDIGTNSVGWAVITDEYKVPSKKFKVLGNTDRHSIKKNLIGALLFDSGETAEATRLKRTARRRYTRRKNRICYLQEIFSNEMAKVDDSFFHRLEESFLVEEDKKHERHPIFGNIVDEVAYHEKYPTIYHLRKKLVDSTDKADLRLIYLALAHMIKFRGHFLIEGDLNPDNSDVDKLFIQLVQTYNQLFEENPINASGVDAKAILSARLSKSRRLENLIAQLPGEKKNGLFGNLIALSLGLTPNFKSNFDLAEDAKLQLSKDTYDDDLDNLLAQIGDQYADLFLAAKNLSDAILLSDILRVNTEITKAPLSASMIKRYDEHHQDLTLLKALVRQQLPEKYKEIFFDQSKNGYAGYIDGGASQEEFYKFIKPILEKMDGTEELLVKLNREDLLRKQRTFDNGSIPHQIHLGELHAILRRQEDFYPFLKDNREKIEKILTFRIPYYVGPLARGNSRFAWMTRKSEETITPWNFEEVVDKGASAQSFIERMTNFDKNLPNEKVLPKHSLLYEYFTVYNELTKVKYVTEGMRKPAFLSGEQKKAIVDLLFKTNRKVTVKQLKEDYFKKIECFDSVEISGVEDRFNASLGTYHDLLKIIKDKDFLDNEENEDILEDIVLTLTLFEDREMIEERLKTYAHLFDDKVMKQLKRRRYTGWGRLSRKLINGIRDKQSGKTILDFLKSDGFANRNFMQLIHDDSLTFKEDIQKAQVSGQGDSLHEHIANLAGSPAIKKGILQTVKVVDELVKVMGRHKPENIVIEMARENQTTQKGQKNSRERMKRIEEGIKELGSQILKEHPVENTQLQNEKLYLYYLQNGRDMYVDQELDINRLSDYDVDHIVPQSFLKDDSIDNKVLTRSDKARGKSDNVPSEEVVKKMKNYWRQLLNAKLITQRKFDNLTKAERGGLSELDKAGFIKRQLVETRQITKHVAQILDSRMNTKYDENDKLIREVKVITLKSKLVSDFRKDFQFYKVREINNYHHAHDAYLNAVVGTALIKKYPKLESEFVYGDYKVYDVRKMIAKSEQEIGKATAKYFFYSNIMNFFKTEITLANGEIRKRPLIETNGETGEIVWDKGRDFATVRKVLSMPQVNIVKKTEVQTGGFSKESILPKRNSDKLIARKKDWDPKKYGGFDSPTVAYSVLVVAKVEKGKSKKLKSVKELLGITIMERSSFEKNPIDFLEAKGYKEVKKDLIIKLPKYSLFELENGRKRMLASAGELQKGNELALPSKYVNFLYLASHYEKLKGSPEDNEQKQLFVEQHKHYLDEIIEQISEFSKRVILADANLDKVLSAYNKHRDKPIREQAENIIHLFTLTNLGAPAAFKYFDTTIDRKRYTSTKEVLDATLIHQSITGLYETRIDLSQLGGDGGGSSGGSPAPGGVLNLEEEYRLHEKPVPSSIDPSWLQLFPTVWAERAGMGLANQVPPVVVELRSGASPVAVRQYPMSKEAREGIRPHIQRFLDLGVLVPCQSPWNTPLLPVKKPGTNDYRPVQDLREINKRVQDIHPTVPNPYNLLSSLPPSHTWYSVLDLKDAFFCLKLHPNSQPLFAFEWRDPEKGNTGQLTWTRLPQGFKNSPTLFNEALHRDLAPFRALNPQVVLLQYVDDLLVAAPTYRDCKEGTQKLLQELSKLGYRVSAKKAQLCQKEVTYLGYLLKEGKRWLTPARKATVMKIPPPTTPRQVREFLGTAGFCRLWIPGFASLAAPLYPLTKPSIPFIWTEEHQKAFDRIKEALLSAPALALPDLTKPFTLYVDERAGVARGVLTQTLGPWRRPVAYLSKKLDPVASGWPTCLKAVAAVALLLKDADKLTLGQNVTVIASHSLESIVRQPPDRWMTNARMTHYQSLLLNERVSFAPPAVLNPATLLPVESEATPVHRCSEILAEETGTRRDLKDQPLPGVPAWYTDGSSFIAEGKRRAGAAIVDGKRTVWASSLPEGTSAQKAELVALTQALRLAEGKDINIYTDSRYAFATAHIHGAIYKQRGWLTSAGKDIKNKEEILALLEAIHLPKRVAIIHCPGHQKGNDPVATGNRRADEAAKQAALSTRVLAETTKPAGKRTADGSEFEKRTADGSEFESPKKKAKVE

SEQ ID NO: 7149 - protein, 2092 aa, synthetic construct
MPAAKRVKLDGGDKKYSIGLDIGTNSVGWAVITDEYKVPSKKFKVLGNTDRHSIKKNLIGALLFDSGETAEATRLKRTARRRYTRRKNRICYLQEIFSNEMAKVDDSFFHRLEESFLVEEDKKHERHPIFGNIVDEVAYHEKYPTIYHLRKKLVDSTDKADLRLIYLALAHMIKFRGHFLIEGDLNPDNSDVDKLFIQLVQTYNQLFEENPINASGVDAKAILSARLSKSRRLENLIAQLPGEKKNGLFGNLIALSLGLTPNFKSNFDLAEDAKLQLSKDTYDDDLDNLLAQIGDQYADLFLAAKNLSDAILLSDILRVNTEITKAPLSASMIKRYDEHHQDLTLLKALVRQQLPEKYKEIFFDQSKNGYAGYIDGGASQEEFYKFIKPILEKMDGTEELLVKLNREDLLRKQRTFDNGSIPHQIHLGELHAILRRQEDFYPFLKDNREKIEKILTFRIPYYVGPLARGNSRFAWMTRKSEETITPWNFEEVVDKGASAQSFIERMTNFDKNLPNEKVLPKHSLLYEYFTVYNELTKVKYVTEGMRKPAFLSGEQKKAIVDLLFKTNRKVTVKQLKEDYFKKIECFDSVEISGVEDRFNASLGTYHDLLKIIKDKDFLDNEENEDILEDIVLTLTLFEDREMIEERLKTYAHLFDDKVMKQLKRRRYTGWGRLSRKLINGIRDKQSGKTILDFLKSDGFANRNFMQLIHDDSLTFKEDIQKAQVSGQGDSLHEHIANLAGSPAIKKGILQTVKVVDELVKVMGRHKPENIVIEMARENQTTQKGQKNSRERMKRIEEGIKELGSQILKEHPVENTQLQNEKLYLYYLQNGRDMYVDQELDINRLSDYDVDHIVPQSFLKDDSIDNKVLTRSDKARGKSDNVPSEEVVKKMKNYWRQLLNAKLITQRKFDNLTKAERGGLSELDKAGFIKRQLVETRQITKHVAQILDSRMNTKYDENDKLIREVKVITLKSKLVSDFRKDFQFYKVREINNYHHAHDAYLNAVVGTALIKKYPKLESEFVYGDYKVYDVRKMIAKSEQEIGKATAKYFFYSNIMNFFKTEITLANGEIRKRPLIETNGETGEIVWDKGRDFATVRKVLSMPQVNIVKKTEVQTGGFSKESILPKRNSDKLIARKKDWDPKKYGGFDSPTVAYSVLVVAKVEKGKSKKLKSVKELLGITIMERSSFEKNPIDFLEAKGYKEVKKDLIIKLPKYSLFELENGRKRMLASAGELQKGNELALPSKYVNFLYLASHYEKLKGSPEDNEQKQLFVEQHKHYLDEIIEQISEFSKRVILADANLDKVLSAYNKHRDKPIREQAENIIHLFTLTNLGAPAAFKYFDTTIDRKRYTSTKEVLDATLIHQSITGLYETRIDLSQLGGDGGGSSGGSPAPGGVLNLEEEYRLHEKPVPSSIDPSWLQLFPTVWAERAGMGLANQVPPVVVELRSGASPVAVRQYPMSKEAREGIRPHIQRFLDLGVLVPCQSPWNTPLLPVKKPGTNDYRPVQDLREINKRVQDIHPTVPNPYNLLSSLPPSHTWYSVLDLKDAFFCLKLHPNSQPLFAFEWRDPEKGNTGQLTWTRLPQGFKNSPTLFNEALHRDLAPFRALNPQVVLLQYVDDLLVAAPTYRDCKEGTQKLLQELSKLGYRVSAKKAQLCQKEVTYLGYLLKEGKRWLTPARKATVMKIPPPTTPRQVREFLGKAGFCRLFIPGFASLAAPLYPLTKPSIPFIWTEEHQKAFDRIKEALLSAPALALPDLTKPFTLYVDERAGVARGVLTQTLGPWRRPVAYLSKKLDPVASGWPTCLKAVAAVALLLKDADKLTLGQNVTVIASHSLESIVRQPPDRWMTNARMTHYQSLLLNERVSFAPPAVLNPATLLPVESEATPVHRCSEILAEETGTRRDLKDQPLPGVPAWYTDGSSFIAEGKRRAGAAIVDGKRTVWASSLPEGTSAQKAELVALTQALRLAEGKDINIYTDSRYAFATAHIHGAIYKQRGWLTSAGKDIKNKEEILALLEAIHLPKRVAIIHCPGHQKGNDPVATGNRRADEAAKQAALSTRVLAETTKPAGKRTADGSEFEKRTADGSEFESPKKKAKVE

SEQ ID NO: 7150 - protein, 2094 aa, synthetic construct
MPAAKRVKLDGGDKKYSIGLDIGTNSVGWAVITDEYKVPSKKFKVLGNTDRHSIKKNLIGALLFDSGETAEATRLKRTARRRYTRRKNRICYLQEIFSNEMAKVDDSFFHRLEESFLVEEDKKHERHPIFGNIVDEVAYHEKYPTIYHLRKKLVDSTDKADLRLIYLALAHMIKFRGHFLIEGDLNPDNSDVDKLFIQLVQTYNQLFEENPINASGVDAKAILSARLSKSRRLENLIAQLPGEKKNGLFGNLIALSLGLTPNFKSNFDLAEDAKLQLSKDTYDDDLDNLLAQIGDQYADLFLAAKNLSDAILLSDILRVNTEITKAPLSASMIKRYDEHHQDLTLLKALVRQQLPEKYKEIFFDQSKNGYAGYIDGGASQEEFYKFIKPILEKMDGTEELLVKLNREDLLRKQRTFDNGSIPHQIHLGELHAILRRQEDFYPFLKDNREKIEKILTFRIPYYVGPLARGNSRFAWMTRKSEETITPWNFEEVVDKGASAQSFIERMTNFDKNLPNEKVLPKHSLLYEYFTVYNELTKVKYVTEGMRKPAFLSGEQKKAIVDLLFKTNRKVTVKQLKEDYFKKIECFDSVEISGVEDRFNASLGTYHDLLKIIKDKDFLDNEENEDILEDIVLTLTLFEDREMIEERLKTYAHLFDDKVMKQLKRRRYTGWGRLSRKLINGIRDKQSGKTILDFLKSDGFANRNFMQLIHDDSLTFKEDIQKAQVSGQGDSLHEHIANLAGSPAIKKGILQTVKVVDELVKVMGRHKPENIVIEMARENQTTQKGQKNSRERMKRIEEGIKELGSQILKEHPVENTQLQNEKLYLYYLQNGRDMYVDQELDINRLSDYDVDHIVPQSFLKDDSIDNKVLTRSDKARGKSDNVPSEEVVKKMKNYWRQLLNAKLITQRKFDNLTKAERGGLSELDKAGFIKRQLVETRQITKHVAQILDSRMNTKYDENDKLIREVKVITLKSKLVSDFRKDFQFYKVREINNYHHAHDAYLNAVVGTALIKKYPKLESEFVYGDYKVYDVRKMIAKSEQEIGKATAKYFFYSNIMNFFKTEITLANGEIRKRPLIETNGETGEIVWDKGRDFATVRKVLSMPQVNIVKKTEVQTGGFSKESILPKRNSDKLIARKKDWDPKKYGGFDSPTVAYSVLVVAKVEKGKSKKLKSVKELLGITIMERSSFEKNPIDFLEAKGYKEVKKDLIIKLPKYSLFELENGRKRMLASAGELQKGNELALPSKYVNFLYLASHYEKLKGSPEDNEQKQLFVEQHKHYLDEIIEQISEFSKRVILADANLDKVLSAYNKHRDKPIREQAENIIHLFTLTNLGAPAAFKYFDTTIDRKRYTSTKEVLDATLIHQSITGLYETRIDLSQLGGDGGGSSGGSPAPGGTLNIEDEYRLHETSKEPDVPLGSTWLSDFPQAWAETGGMGLAVRQAPLIIPLKATSTPVSIKQYPMSQEARLGIKPHIQRLLDQGILVPCQSPWNTPLLPVKKPGTNDYRPVQDLREVNKRVEDIHPTVPNPYNLLSGLPPSHQWYTVLDLKDAFFCLRLHPTSQPLFAFEWRDPEMGISGQLTWTRLPQGFKNSPTLFNEALHRDLADFRIQHPDLILLQYVDDLLLAATSEQDCQRGTRALLQTLGNLGYRASAKKAQICQKQVKYLGYLLKEGQRWLTEARKETVMGQPTPKTPRQLREFLGTAGFCRLWIPGFAEMAAPLYPLTKPGTLFNWGPDQQKAYQEIKQALLTAPALGLPDLTKPFELFVDEKQGYAKGVLTQKLGPWRRPVAYLSKKLDPVAAGWPPCLRMVAAIAVLTKDAGKLTMGQPLVILAPHAVEALVKQPPDRWLSNARMTHYQAMLLDTDRVQFGPVVALNPATLLPLPEKEAPHDCLEILAETHGTRPDLTDQPIPDADYTWYTDGSSFLQEGQRRAGAAVTTETEVIWARALPAGTSAQRAELIALTQALKMAEGKKLNVYTDSRYAFATAHVHGEIYRRRGWLTSEGREIKNKNEILALLKALFLPKRLSIIHCPGHQKGNSAEARGNRMADQAAREAAMKAVLETSTLLAGKRTADGSEFEKRTADGSEFESPKKKAKVE

SEQ ID NO: 7151 - protein, 2096 aa, synthetic construct
MPAAKRVKLDGGDKKYSIGLDIGTNSVGWAVITDEYKVPSKKFKVLGNTDRHSIKKNLIGALLFDSGETAEATRLKRTARRRYTRRKNRICYLQEIFSNEMAKVDDSFFHRLEESFLVEEDKKHERHPIFGNIVDEVAYHEKYPTIYHLRKKLVDSTDKADLRLIYLALAHMIKFRGHFLIEGDLNPDNSDVDKLFIQLVQTYNQLFEENPINASGVDAKAILSARLSKSRRLENLIAQLPGEKKNGLFGNLIALSLGLTPNFKSNFDLAEDAKLQLSKDTYDDDLDNLLAQIGDQYADLFLAAKNLSDAILLSDILRVNTEITKAPLSASMIKRYDEHHQDLTLLKALVRQQLPEKYKEIFFDQSKNGYAGYIDGGASQEEFYKFIKPILEKMDGTEELLVKLNREDLLRKQRTFDNGSIPHQIHLGELHAILRRQEDFYPFLKDNREKIEKILTFRIPYYVGPLARGNSRFAWMTRKSEETITPWNFEEVVDKGASAQSFIERMTNFDKNLPNEKVLPKHSLLYEYFTVYNELTKVKYVTEGMRKPAFLSGEQKKAIVDLLFKTNRKVTVKQLKEDYFKKIECFDSVEISGVEDRFNASLGTYHDLLKIIKDKDFLDNEENEDILEDIVLTLTLFEDREMIEERLKTYAHLFDDKVMKQLKRRRYTGWGRLSRKLINGIRDKQSGKTILDFLKSDGFANRNFMQLIHDDSLTFKEDIQKAQVSGQGDSLHEHIANLAGSPAIKKGILQTVKVVDELVKVMGRHKPENIVIEMARENQTTQKGQKNSRERMKRIEEGIKELGSQILKEHPVENTQLQNEKLYLYYLQNGRDMYVDQELDINRLSDYDVDHIVPQSFLKDDSIDNKVLTRSDKARGKSDNVPSEEVVKKMKNYWRQLLNAKLITQRKFDNLTKAERGGLSELDKAGFIKRQLVETRQITKHVAQILDSRMNTKYDENDKLIREVKVITLKSKLVSDFRKDFQFYKVREINNYHHAHDAYLNAVVGTALIKKYPKLESEFVYGDYKVYDVRKMIAKSEQEIGKATAKYFFYSNIMNFFKTEITLANGEIRKRPLIETNGETGEIVWDKGRDFATVRKVLSMPQVNIVKKTEVQTGGFSKESILPKRNSDKLIARKKDWDPKKYGGFDSPTVAYSVLVVAKVEKGKSKKLKSVKELLGITIMERSSFEKNPIDFLEAKGYKEVKKDLIIKLPKYSLFELENGRKRMLASAGELQKGNELALPSKYVNFLYLASHYEKLKGSPEDNEQKQLFVEQHKHYLDEIIEQISEFSKRVILADANLDKVLSAYNKHRDKPIREQAENIIHLFTLTNLGAPAAFKYFDTTIDRKRYTSTKEVLDATLIHQSITGLYETRIDLSQLGGDGGGSSPAPGGSGGTAPLEEEYRLFLEAPIQNVTLLEQWKREIPKVWAEINPPGLASTQAPIHVQLLSTALPVRVRQYPITLEAKRSLRETIRKFRAAGILRPVHSPWNTPLLPVRKSGTSEYRMVQDLREVNKRVETIHPTVPNPYTLLSLLPPDRIWYSVLDLKDAFFCIPLAPESQLIFAFEWADAEEGESGQLTWTRLPQGFKNSPTLFNEALNRDLQGFRLDHPSVSLLQYVDDLLIAADTQAACLSATRDLLMTLAELGYRVSGKKAQLCQEEVTYLGFKIHKGSRSLSNSRTQAILQIPVPKTKRQVREFLGTIGYCRLWIPGFAELAQPLYAATRPGNDPLVWGEKEEEAFQSLKLALTQPPALALPSLDKPFQLFVEETSGAAKGVLTQALGPWKRPVAYLSKRLDPVAAGWPRCLRAIAAAALLTREASKLTFGQDIEITSSHNLESLLRSPPDKWLTNARITQYQVLLLDPPRVRFKQTAALNPATLLPETDDTLPIHHCLDTLDSLTSTRPDLTDQPLAQAEATLFTDGSSYIRDGKRYAGAAVVTLDSVIWAEPLPIGTSAQKAELIALTKALEWSKDKSVNIYTDSRYAFATLHVHGMIYRERGWLTAGGKAIKNAPEILALLTAVWLPKRVAVMHCKGHQKDDAPTSTGNRRADEVAREVAIRPLSTQATISAGKRTADGSEFEKRTADGSEFESPKKKAKVE

SEQ ID NO: 7152 - protein, 2096 aa, synthetic construct
MPAAKRVKLDGGDKKYSIGLDIGTNSVGWAVITDEYKVPSKKFKVLGNTDRHSIKKNLIGALLFDSGETAEATRLKRTARRRYTRRKNRICYLQEIFSNEMAKVDDSFFHRLEESFLVEEDKKHERHPIFGNIVDEVAYHEKYPTIYHLRKKLVDSTDKADLRLIYLALAHMIKFRGHFLIEGDLNPDNSDVDKLFIQLVQTYNQLFEENPINASGVDAKAILSARLSKSRRLENLIAQLPGEKKNGLFGNLIALSLGLTPNFKSNFDLAEDAKLQLSKDTYDDDLDNLLAQIGDQYADLFLAAKNLSDAILLSDILRVNTEITKAPLSASMIKRYDEHHQDLTLLKALVRQQLPEKYKEIFFDQSKNGYAGYIDGGASQEEFYKFIKPILEKMDGTEELLVKLNREDLLRKQRTFDNGSIPHQIHLGELHAILRRQEDFYPFLKDNREKIEKILTFRIPYYVGPLARGNSRFAWMTRKSEETITPWNFEEVVDKGASAQSFIERMTNFDKNLPNEKVLPKHSLLYEYFTVYNELTKVKYVTEGMRKPAFLSGEQKKAIVDLLFKTNRKVTVKQLKEDYFKKIECFDSVEISGVEDRFNASLGTYHDLLKIIKDKDFLDNEENEDILEDIVLTLTLFEDREMIEERLKTYAHLFDDKVMKQLKRRRYTGWGRLSRKLINGIRDKQSGKTILDFLKSDGFANRNFMQLIHDDSLTFKEDIQKAQVSGQGDSLHEHIANLAGSPAIKKGILQTVKVVDELVKVMGRHKPENIVIEMARENQTTQKGQKNSRERMKRIEEGIKELGSQILKEHPVENTQLQNEKLYLYYLQNGRDMYVDQELDINRLSDYDVDHIVPQSFLKDDSIDNKVLTRSDKARGKSDNVPSEEVVKKMKNYWRQLLNAKLITQRKFDNLTKAERGGLSELDKAGFIKRQLVETRQITKHVAQILDSRMNTKYDENDKLIREVKVITLKSKLVSDFRKDFQFYKVREINNYHHAHDAYLNAVVGTALIKKYPKLESEFVYGDYKVYDVRKMIAKSEQEIGKATAKYFFYSNIMNFFKTEITLANGEIRKRPLIETNGETGEIVWDKGRDFATVRKVLSMPQVNIVKKTEVQTGGFSKESILPKRNSDKLIARKKDWDPKKYGGFDSPTVAYSVLVVAKVEKGKSKKLKSVKELLGITIMERSSFEKNPIDFLEAKGYKEVKKDLIIKLPKYSLFELENGRKRMLASAGELQKGNELALPSKYVNFLYLASHYEKLKGSPEDNEQKQLFVEQHKHYLDEIIEQISEFSKRVILADANLDKVLSAYNKHRDKPIREQAENIIHLFTLTNLGAPAAFKYFDTTIDRKRYTSTKEVLDATLIHQSITGLYETRIDLSQLGGDGGGSSPAPGGSGGTAPLEEEYRLFLEAPIQNVTLLEQWKREIPKVWAEINPPGLASTQAPIHVQLLSTALPVRVRQYPITLEAKRSLRETIRKFRAAGILRPVHSPWNTPLLPVRKSGTSEYRMVQDLREVNKRVETIHPTVPNPYTLLSLLPPDRIWYSVLDLKDAFFCIPLAPESQLIFAFEWADAEEGESGQLTWTRLPQGFKNSPTLFNEALNRDLQGFRLDHPSVSLLQYVDDLLIAADTQAACLSATRDLLMTLAELGYRVSGKKAQLCQEEVTYLGFKIHKGSRSLSNSRTQAILQIPVPKTKRQVREFLGKIGYCRLFIPGFAELAQPLYAATRPGNDPLVWGEKEEEAFQSLKLALTQPPALALPSLDKPFQLFVEETSGAAKGVLTQALGPWKRPVAYLSKRLDPVAAGWPRCLRAIAAAALLTREASKLTFGQDIEITSSHNLESLLRSPPDKWLTNARITQYQVLLLDPPRVRFKQTAALNPATLLPETDDTLPIHHCLDTLDSLTSTRPDLTDQPLAQAEATLFTDGSSYIRDGKRYAGAAVVTLDSVIWAEPLPIGTSAQKAELIALTKALEWSKDKSVNIYTDSRYAFATLHVHGMIYRERGWLTAGGKAIKNAPEILALLTAVWLPKRVAVMHCKGHQKDDAPTSTGNRRADEVAREVAIRPLSTQATISAGKRTADGSEFEKRTADGSEFESPKKKAKVE

SEQ ID NO: 7153 - protein, 2093 aa, synthetic construct
MPAAKRVKLDGGDKKYSIGLDIGTNSVGWAVITDEYKVPSKKFKVLGNTDRHSIKKNLIGALLFDSGETAEATRLKRTARRRYTRRKNRICYLQEIFSNEMAKVDDSFFHRLEESFLVEEDKKHERHPIFGNIVDEVAYHEKYPTIYHLRKKLVDSTDKADLRLIYLALAHMIKFRGHFLIEGDLNPDNSDVDKLFIQLVQTYNQLFEENPINASGVDAKAILSARLSKSRRLENLIAQLPGEKKNGLFGNLIALSLGLTPNFKSNFDLAEDAKLQLSKDTYDDDLDNLLAQIGDQYADLFLAAKNLSDAILLSDILRVNTEITKAPLSASMIKRYDEHHQDLTLLKALVRQQLPEKYKEIFFDQSKNGYAGYIDGGASQEEFYKFIKPILEKMDGTEELLVKLNREDLLRKQRTFDNGSIPHQIHLGELHAILRRQEDFYPFLKDNREKIEKILTFRIPYYVGPLARGNSRFAWMTRKSEETITPWNFEEVVDKGASAQSFIERMTNFDKNLPNEKVLPKHSLLYEYFTVYNELTKVKYVTEGMRKPAFLSGEQKKAIVDLLFKTNRKVTVKQLKEDYFKKIECFDSVEISGVEDRFNASLGTYHDLLKIIKDKDFLDNEENEDILEDIVLTLTLFEDREMIEERLKTYAHLFDDKVMKQLKRRRYTGWGRLSRKLINGIRDKQSGKTILDFLKSDGFANRNFMQLIHDDSLTFKEDIQKAQVSGQGDSLHEHIANLAGSPAIKKGILQTVKVVDELVKVMGRHKPENIVIEMARENQTTQKGQKNSRERMKRIEEGIKELGSQILKEHPVENTQLQNEKLYLYYLQNGRDMYVDQELDINRLSDYDVDHIVPQSFLKDDSIDNKVLTRSDKARGKSDNVPSEEVVKKMKNYWRQLLNAKLITQRKFDNLTKAERGGLSELDKAGFIKRQLVETRQITKHVAQILDSRMNTKYDENDKLIREVKVITLKSKLVSDFRKDFQFYKVREINNYHHAHDAYLNAVVGTALIKKYPKLESEFVYGDYKVYDVRKMIAKSEQEIGKATAKYFFYSNIMNFFKTEITLANGEIRKRPLIETNGETGEIVWDKGRDFATVRKVLSMPQVNIVKKTEVQTGGFSKESILPKRNSDKLIARKKDWDPKKYGGFDSPTVAYSVLVVAKVEKGKSKKLKSVKELLGITIMERSSFEKNPIDFLEAKGYKEVKKDLIIKLPKYSLFELENGRKRMLASAGELQKGNELALPSKYVNFLYLASHYEKLKGSPEDNEQKQLFVEQHKHYLDEIIEQISEFSKRVILADANLDKVLSAYNKHRDKPIREQAENIIHLFTLTNLGAPAAFKYFDTTIDRKRYTSTKEVLDATLIHQSITGLYETRIDLSQLGGDGGGSSPAPGGSGGTLQLEEEYRLFEPESTQKQEMDIWLKNFPQAWAETGGMGTAHCQAPVLIQLKATATPISIRQYPMPHEAYQGIKPHIRRMLDQGILKPCQSPWNTPLLPVKKPGTEDYRPVQDLREVNKRVEDIHPTVPNPYNLLSTLPPSHPWYTVLDLKDAFFCLRLHSESQLLFAFEWRDPEIGLSGQLTWTRLPQGFKNSPTLFNEALHSDLADFRVRYPALVLLQYVDDLLLAAATRTECLEGTKALLETLGNKGYRASAKKAQICLQEVTYLGYSLKDGQRWLTKARKEAILSIPVPKNSRQVREFLGKAGYCRLFIPGFAELAAPLYPLTRPGTLFQWGTEQQLAFEDIKKALLSSPALGLPDITKPFELFIDENSGFAKGVLVQKLGPWKRPVAYLSKKLDTVASGWPPCLRMVAAIAILVKDAGKLTLGQPLTILTSHPVEALVRQPPNKWLSNARMTHYQAMLLDAERVHFGPTVSLNPATLLPLPSGGNHHDCLQILAETHGTRPDLTDQPLPDADLTWYTDGSSFIRNGEREAGAAVTTESEVIWAAPLPPGTSAQRAELIALTQALKMAEGKKLTVYTDSRYAFATTHVHGEIYRRRGWLTSEGKEIKNKNEILALLEALFLPKRLSIIHCPGHQKGDSPQAKGNRLADDTAKKAATETHSSLTVLPAGKRTADGSEFEKRTADGSEFESPKKKAKVE

SEQ ID NO: 7154 - protein, 2125 aa, synthetic construct; identical to SEQ ID NO: 4526

SEQ ID NO: 7155 - protein, 2216 aa, synthetic construct
MPAAKRVKLDGGDKKYSIGLDIGTNSVGWAVITDEYKVPSKKFKVLGNTDRHSIKKNLIGALLFDSGETAEATRLKRTARRRYTRRKNRICYLQEIFSNEMAKVDDSFFHRLEESFLVEEDKKHERHPIFGNIVDEVAYHEKYPTIYHLRKKLVDSTDKADLRLIYLALAHMIKFRGHFLIEGDLNPDNSDVDKLFIQLVQTYNQLFEENPINASGVDAKAILSARLSKSRRLENLIAQLPGEKKNGLFGNLIALSLGLTPNFKSNFDLAEDAKLQLSKDTYDDDLDNLLAQIGDQYADLFLAAKNLSDAILLSDILRVNTEITKAPLSASMIKRYDEHHQDLTLLKALVRQQLPEKYKEIFFDQSKNGYAGYIDGGASQEEFYKFIKPILEKMDGTEELLVKLNREDLLRKQRTFDNGSIPHQIHLGELHAILRRQEDFYPFLKDNREKIEKILTFRIPYYVGPLARGNSRFAWMTRKSEETITPWNFEEVVDKGASAQSFIERMTNFDKNLPNEKVLPKHSLLYEYFTVYNELTKVKYVTEGMRKPAFLSGEQKKAIVDLLFKTNRKVTVKQLKEDYFKKIECFDSVEISGVEDRFNASLGTYHDLLKIIKDKDFLDNEENEDILEDIVLTLTLFEDREMIEERLKTYAHLFDDKVMKQLKRRRYTGWGRLSRKLINGIRDKQSGKTILDFLKSDGFANRNFMQLIHDDSLTFKEDIQKAQVSGQGDSLHEHIANLAGSPAIKKGILQTVKVVDELVKVMGRHKPENIVIEMARENQTTQKGQKNSRERMKRIEEGIKELGSQILKEHPVENTQLQNEKLYLYYLQNGRDMYVDQELDINRLSDYDVDHIVPQSFLKDDSIDNKVLTRSDKARGKSDNVPSEEVVKKMKNYWRQLLNAKLITQRKFDNLTKAERGGLSELDKAGFIKRQLVETRQITKHVAQILDSRMNTKYDENDKLIREVKVITLKSKLVSDFRKDFQFYKVREINNYHHAHDAYLNAVVGTALIKKYPKLESEFVYGDYKVYDVRKMIAKSEQEIGKATAKYFFYSNIMNFFKTEITLANGEIRKRPLIETNGETGEIVWDKGRDFATVRKVLSMPQVNIVKKTEVQTGGFSKESILPKRNSDKLIARKKDWDPKKYGGFDSPTVAYSVLVVAKVEKGKSKKLKSVKELLGITIMERSSFEKNPIDFLEAKGYKEVKKDLIIKLPKYSLFELENGRKRMLASAGELQKGNELALPSKYVNFLYLASHYEKLKGSPEDNEQKQLFVEQHKHYLDEIIEQISEFSKRVILADANLDKVLSAYNKHRDKPIREQAENIIHLFTLTNLGAPAAFKYFDTTIDRKRYTSTKEVLDATLIHQSITGLYETRIDLSQLGGDGGGSSPAPGGSGGTLGDQGSRGSDPLPEPRVTLTVEGIPTEFLVNTGAEHSVLTKPMGKMGSKRTVVAGATGSKVYPWTTKRLLKIGQKQVTHSFLVIPECPAPLLGRDLLTKLKAQIQFSTEGPQVTWEDRPAMCLVLNLEEEYRLHEKPVPPSIDPSWLQLFPMVWAEKAGMGLANQVPPVVVELKSDASPVAVRQYPMSKEAREGIRPHIQRFLDLGILVPCQSPWNTPLLPVKKPGTNDYRPVQDLREVNKRVQDIHPTVPNPYNLLSSLPPSHTWYSVLDLKDAFFCLKLHPNSQPLFAFEWRDPEKGNTGQLTWTRLPQGFKNSPTLFNEALHRDLASFRALNPQVVMLQYVDDLLVAAPTYRDCKEGTRRLLQELSKLGYRVSAKKAQLCREEVTYLGYLLKGGKRWLTPARKATVMKIPTPTTPRQVREFLGTAGFCRLWIPGFASLAAPLYPLTRPKVPFTWTEAHQEAFGRIKEALLSAPALALPDLTKPFALYVDEKEGVARGVLTQTLGPWRRPVAYLSKKLDPVASGWPTCLKAIAAVALLLKDADKLTLGQNVLVIAPHNLESIVRQPPDRWMTNARMTHYQSLLLNERVSFAPPAILNPATLLPVESDDTPIHICSEILAEETGTRPDLRDQPLPGVPAWYTDGSSFIMDGRRQAGAAIVDNKRTVWASNLPEGTSAQKAELIALTQALRLAEGKSINIYTDSRYAFATAHVHGAIYKQRGWLTSAGKDIKNKEEILALLEAIHLPKRVAIIHCPGHQRGTDPVATGNRKADEAAKQAAQSTRILTETTKNAGKRTADGSEFEKRTADGSEFESPKKKAKVE

SEQ ID NO: 7156 - protein, 2094 aa, synthetic construct
MPAAKRVKLDGGDKKYSIGLDIGTNSVGWAVITDEYKVPSKKFKVLGNTDRHSIKKNLIGALLFDSGETAEATRLKRTARRRYTRRKNRICYLQEIFSNEMAKVDDSFFHRLEESFLVEEDKKHERHPIFGNIVDEVAYHEKYPTIYHLRKKLVDSTDKADLRLIYLALAHMIKFRGHFLIEGDLNPDNSDVDKLFIQLVQTYNQLFEENPINASGVDAKAILSARLSKSRRLENLIAQLPGEKKNGLFGNLIALSLGLTPNFKSNFDLAEDAKLQLSKDTYDDDLDNLLAQIGDQYADLFLAAKNLSDAILLSDILRVNTEITKAPLSASMIKRYDEHHQDLTLLKALVRQQLPEKYKEIFFDQSKNGYAGYIDGGASQEEFYKFIKPILEKMDGTEELLVKLNREDLLRKQRTFDNGSIPHQIHLGELHAILRRQEDFYPFLKDNREKIEKILTFRIPYYVGPLARGNSRFAWMTRKSEETITPWNFEEVVDKGASAQSFIERMTNFDKNLPNEKVLPKHSLLYEYFTVYNELTKVKYVTEGMRKPAFLSGEQKKAIVDLLFKTNRKVTVKQLKEDYFKKIECFDSVEISGVEDRFNASLGTYHDLLKIIKDKDFLDNEENEDILEDIVLTLTLFEDREMIEERLKTYAHLFDDKVMKQLKRRRYTGWGRLSRKLINGIRDKQSGKTILDFLKSDGFANRNFMQLIHDDSLTFKEDIQKAQVSGQGDSLHEHIANLAGSPAIKKGILQTVKVVDELVKVMGRHKPENIVIEMARENQTTQKGQKNSRERMKRIEEGIKELGSQILKEHPVENTQLQNEKLYLYYLQNGRDMYVDQELDINRLSDYDVDHIVPQSFLKDDSIDNKVLTRSDKARGKSDNVPSEEVVKKMKNYWRQLLNAKLITQRKFDNLTKAERGGLSELDKAGFIKRQLVETRQITKHVAQILDSRMNTKYDENDKLIREVKVITLKSKLVSDFRKDFQFYKVREINNYHHAHDAYLNAVVGTALIKKYPKLESEFVYGDYKVYDVRKMIAKSEQEIGKATAKYFFYSNIMNFFKTEITLANGEIRKRPLIETNGETGEIVWDKGRDFATVRKVLSMPQVNIVKKTEVQTGGFSKESILPKRNSDKLIARKKDWDPKKYGGFDSPTVAYSVLVVAKVEKGKSKKLKSVKELLGITIMERSSFEKNPIDFLEAKGYKEVKKDLIIKLPKYSLFELENGRKRMLASAGELQKGNELALPSKYVNFLYLASHYEKLKGSPEDNEQKQLFVEQHKHYLDEIIEQISEFSKRVILADANLDKVLSAYNKHRDKPIREQAENIIHLFTLTNLGAPAAFKYFDTTIDRKRYTSTKEVLDATLIHQSITGLYETRIDLSQLGGDGGGSSPAPGGSGGTLNLEDEYRLYETSAEPEVSPGSTWLSDFPQAWAETGGMGLAVRQAPLIIPLKATSTPVSIKQYPMSQEAKLGIKPHIQRLLDQGILVPCQSPWNTPLLPVKKPGTNDYRPVQDLREVNKRVEDIHPTVPNPYNLLSGLPPSHRWYTVLDLKDAFFCLRLHPTSQPLFAFEWRDPGMGISGQLTWTRLPQGFKNSPTLFNEALHRDLADFRIQHPDLILLQYVDDILLAATSELDCQQGTRALLLTLGNLGYRASAKKAQLCQKQVKYLGYLLKEGQRWLTEARKETVMGQPTPKTPRQLREFLGKAGFCRLFIPGFAEMAAPLYPLTKPGTLFNWGPDQQKAYQEIKQALLTAPALGLPDLTKPFELFVDEKQGYAKGVLTQKLGPWRRPVAYLSKKLDPVAAGWPPCLRMVAAIAVLRKDAGKLTMGQPLVILAPHAVEALVKQPPDRWLSNARMTHYQAMLLDTDRVQFGPVVALNPATLLPLPEEGAPHDCLEILAETHGTRPDLTDQPIPDADHTWYTDGSSFLQEGQRKAGAAVTTETEVIWARALPAGTSAQRAELIALTQALKMAEGKRLNVYTDSRYAFATAHIHGEIYRRRGWLTSEGREIKNKSEILALLKALFLPKRLSIIHCLGHQKGDSAEARGNRLADQAAREAAIKTPPDTSTLLAGKRTADGSEFEKRTADGSEFESPKKKAKVE

SEQ ID NO: 7157 - protein, 2094 aa, synthetic construct
MPAAKRVKLDGGDKKYSIGLDIGTNSVGWAVITDEYKVPSKKFKVLGNTDRHSIKKNLIGALLFDSGETAEATRLKRTARRRYTRRKNRICYLQEIFSNEMAKVDDSFFHRLEESFLVEEDKKHERHPIFGNIVDEVAYHEKYPTIYHLRKKLVDSTDKADLRLIYLALAHMIKFRGHFLIEGDLNPDNSDVDKLFIQLVQTYNQLFEENPINASGVDAKAILSARLSKSRRLENLIAQLPGEKKNGLFGNLIALSLGLTPNFKSNFDLAEDAKLQLSKDTYDDDLDNLLAQIGDQYADLFLAAKNLSDAILLSDILRVNTEITKAPLSASMIKRYDEHHQDLTLLKALVRQQLPEKYKEIFFDQSKNGYAGYIDGGASQEEFYKFIKPILEKMDGTEELLVKLNREDLLRKQRTFDNGSIPHQIHLGELHAILRRQEDFYPFLKDNREKIEKILTFRIPYYVGPLARGNSRFAWMTRKSEETITPWNFEEVVDKGASAQSFIERMTNFDKNLPNEKVLPKHSLLYEYFTVYNELTKVKYVTEGMRKPAFLSGEQKKAIVDLLFKTNRKVTVKQLKEDYFKKIECFDSVEISGVEDRFNASLGTYHDLLKIIKDKDFLDNEENEDILEDIVLTLTLFEDREMIEERLKTYAHLFDDKVMKQLKRRRYTGWGRLSRKLINGIRDKQSGKTILDFLKSDGFANRNFMQLIHDDSLTFKEDIQKAQVSGQGDSLHEHIANLAGSPAIKKGILQTVKVVDELVKVMGRHKPENIVIEMARENQTTQKGQKNSRERMKRIEEGIKELGSQILKEHPVENTQLQNEKLYLYYLQNGRDMYVDQELDINRLSDYDVDHIVPQSFLKDDSIDNKVLTRSDKARGKSDNVPSEEVVKKMKNYWRQLLNAKLITQRKFDNLTKAERGGLSELDKAGFIKRQLVETRQITKHVAQILDSRMNTKYDENDKLIREVKVITLKSKLVSDFRKDFQFYKVREINNYHHAHDAYLNAVVGTALIKKYPKLESEFVYGDYKVYDVRKMIAKSEQEIGKATAKYFFYSNIMNFFKTEITLANGEIRKRPLIETNGETGEIVWDKGRDFATVRKVLSMPQVNIVKKTEVQTGGFSKESILPKRNSDKLIARKKDWDPKKYGGFDSPTVAYSVLVVAKVEKGKSKKLKSVKELLGITIMERSSFEKNPIDFLEAKGYKEVKKDLIIKLPKYSLFELENGRKRMLASAGELQKGNELALPSKYVNFLYLASHYEKLKGSPEDNEQKQLFVEQHKHYLDEIIEQISEFSKRVILADANLDKVLSAYNKHRDKPIREQAENIIHLFTLTNLGAPAAFKYFDTTIDRKRYTSTKEVLDATLIHQSITGLYETRIDLSQLGGDGGGSSPAPGGSGGTLNIEDEHRLHETSKEPDVSLGSTWLSDFPQAWAETGGMGLAVRQAPLIIPLKATSTPVSIKQYPMSQEARLGIKPHIQRLLDQGILVPCQSPWNTPLLPVKKPGTNDYRPVQDLREVNKRVEDIHPTVPNPYNLLSGLPPSHQWYTVLDLKDAFFCLRLHPTSQPLFAFEWRDPEMGISGQLTWTRLPQGFKNSPTLFNEALHRDLADFRIQHPDLILLQYVDDLLLAATSELDCQQGTRALLQTLGNLGYRASAKKAQICQKQVKYLGYLLKEGQRWLTEARKETVMGQPTPKTPRQLREFLGTAGFCRLWIPGFAEMAAPLYPLTKPGTLFNWGPDQQKAYQEIKQALLTAPALGLPDLTKPFELFVDEKQGYAKGVLTQKLGPWRRPVAYLSKKLDPVAAGWPPCLRMVAAIAVLTKDAGKLTMGQPLVILAPHAVEALVKQPPDRWLSNARMTHYQALLLDTDRVQFGPVVALNPATLLPLPEEGLQHNCLDILAEAHGTRPDLTDQPLPDADHTWYTDGSSLLQEGQRKAGAAVTTETEVIWAKALPAGTSAQRAELIALTQALKMAEGKKLNVYTDSRYAFATAHIHGEIYRRRGWLTSEGKEIKNKDEILALLKALFLPKRLSIIHCPGHQKGHSAEARGNRMADQAARKAAITETPDTSTLLAGKRTADGSEFEKRTADGSEFESPKKKAKVE

SEQ ID NO: 7158 - protein, 2094 aa, synthetic construct
MPAAKRVKLDGGDKKYSIGLDIGTNSVGWAVITDEYKVPSKKFKVLGNTDRHSIKKNLIGALLFDSGETAEATRLKRTARRRYTRRKNRICYLQEIFSNEMAKVDDSFFHRLEESFLVEEDKKHERHPIFGNIVDEVAYHEKYPTIYHLRKKLVDSTDKADLRLIYLALAHMIKFRGHFLIEGDLNPDNSDVDKLFIQLVQTYNQLFEENPINASGVDAKAILSARLSKSRRLENLIAQLPGEKKNGLFGNLIALSLGLTPNFKSNFDLAEDAKLQLSKDTYDDDLDNLLAQIGDQYADLFLAAKNLSDAILLSDILRVNTEITKAPLSASMIKRYDEHHQDLTLLKALVRQQLPEKYKEIFFDQSKNGYAGYIDGGASQEEFYKFIKPILEKMDGTEELLVKLNREDLLRKQRTFDNGSIPHQIHLGELHAILRRQEDFYPFLKDNREKIEKILTFRIPYYVGPLARGNSRFAWMTRKSEETITPWNFEEVVDKGASAQSFIERMTNFDKNLPNEKVLPKHSLLYEYFTVYNELTKVKYVTEGMRKPAFLSGEQKKAIVDLLFKTNRKVTVKQLKEDYFKKIECFDSVEISGVEDRFNASLGTYHDLLKIIKDKDFLDNEENEDILEDIVLTLTLFEDREMIEERLKTYAHLFDDKVMKQLKRRRYTGWGRLSRKLINGIRDKQSGKTILDFLKSDGFANRNFMQLIHDDSLTFKEDIQKAQVSGQGDSLHEHIANLAGSPAIKKGILQTVKVVDELVKVMGRHKPENIVIEMARENQTTQKGQKNSRERMKRIEEGIKELGSQILKEHPVENTQLQNEKLYLYYLQNGRDMYVDQELDINRLSDYDVDHIVPQSFLKDDSIDNKVLTRSDKARGKSDNVPSEEVVKKMKNYWRQLLNAKLITQRKFDNLTKAERGGLSELDKAGFIKRQLVETRQITKHVAQILDSRMNTKYDENDKLIREVKVITLKSKLVSDFRKDFQFYKVREINNYHHAHDAYLNAVVGTALIKKYPKLESEFVYGDYKVYDVRKMIAKSEQEIGKATAKYFFYSNIMNFFKTEITLANGEIRKRPLIETNGETGEIVWDKGRDFATVRKVLSMPQVNIVKKTEVQTGGFSKESILPKRNSDKLIARKKDWDPKKYGGFDSPTVAYSVLVVAKVEKGKSKKLKSVKELLGITIMERSSFEKNPIDFLEAKGYKEVKKDLIIKLPKYSLFELENGRKRMLASAGELQKGNELALPSKYVNFLYLASHYEKLKGSPEDNEQKQLFVEQHKHYLDEIIEQISEFSKRVILADANLDKVLSAYNKHRDKPIREQAENIIHLFTLTNLGAPAAFKYFDTTIDRKRYTSTKEVLDATLIHQSITGLYETRIDLSQLGGDGGGSSPAPGGSGGTLNIEDEHRLHETSKEPDVSLGSTWLSDFPQAWAETGGMGLAVRQAPLIIPLKATSTPVSIKQYPMSQEARLGIKPHIQRLLDQGILVPCQSPWNTPLLPVKKPGTNDYRPVQDLREVNKRVEDIHPTVPNPYNLLSGLPPSHQWYTVLDLKDAFFCLRLHPTSQPLFAFEWRDPEMGISGQLTWTRLPQGFKNSPTLFNEALHRDLADFRIQHPDLILLQYVDDLLLAATSELDCQQGTRALLQTLGNLGYRASAKKAQICQKQVKYLGYLLKEGQRWLTEARKETVMGQPTPKTPRQLREFLGKAGFCRLFIPGFAEMAAPLYPLTKPGTLFNWGPDQQKAYQEIKQALLTAPALGLPDLTKPFELFVDEKQGYAKGVLTQKLGPWRRPVAYLSKKLDPVAAGWPPCLRMVAAIAVLTKDAGKLTMGQPLVILAPHAVEALVKQPPDRWLSNARMTHYQALLLDTDRVQFGPVVALNPATLLPLPEEGLQHNCLDILAEAHGTRPDLTDQPLPDADHTWYTDGSSLLQEGQRKAGAAVTTETEVIWAKALPAGTSAQRAELIALTQALKMAEGKKLNVYTDSRYAFATAHIHGEIYRRRGWLTSEGKEIKNKDEILALLKALFLPKRLSIIHCPGHQKGHSAEARGNRMADQAARKAAITETPDTSTLLAGKRTADGSEFEKRTADGSEFESPKKKAKVE

SEQ ID NO: 7159 - protein, 2094 aa, synthetic construct; identical to SEQ ID NO: 7157

SEQ ID NO: 7160 - protein, 2094 aa, synthetic construct; identical to SEQ ID NO: 7158

SEQ ID NO: 7161 - protein, 2085 aa, synthetic construct
MPAAKRVKLDGGDKKYSIGLDIGTNSVGWAVITDEYKVPSKKFKVLGNTDRHSIKKNLIGALLFDSGETAEATRLKRTARRRYTRRKNRICYLQEIFSNEMAKVDDSFFHRLEESFLVEEDKKHERHPIFGNIVDEVAYHEKYPTIYHLRKKLVDSTDKADLRLIYLALAHMIKFRGHFLIEGDLNPDNSDVDKLFIQLVQTYNQLFEENPINASGVDAKAILSARLSKSRRLENLIAQLPGEKKNGLFGNLIALSLGLTPNFKSNFDLAEDAKLQLSKDTYDDDLDNLLAQIGDQYADLFLAAKNLSDAILLSDILRVNTEITKAPLSASMIKRYDEHHQDLTLLKALVRQQLPEKYKEIFFDQSKNGYAGYIDGGASQEEFYKFIKPILEKMDGTEELLVKLNREDLLRKQRTFDNGSIPHQIHLGELHAILRRQEDFYPFLKDNREKIEKILTFRIPYYVGPLARGNSRFAWMTRKSEETITPWNFEEVVDKGASAQSFIERMTNFDKNLPNEKVLPKHSLLYEYFTVYNELTKVKYVTEGMRKPAFLSGEQKKAIVDLLFKTNRKVTVKQLKEDYFKKIECFDSVEISGVEDRFNASLGTYHDLLKIIKDKDFLDNEENEDILEDIVLTLTLFEDREMIEERLKTYAHLFDDKVMKQLKRRRYTGWGRLSRKLINGIRDKQSGKTILDFLKSDGFANRNFMQLIHDDSLTFKEDIQKAQVSGQGDSLHEHIANLAGSPAIKKGILQTVKVVDELVKVMGRHKPENIVIEMARENQTTQKGQKNSRERMKRIEEGIKELGSQILKEHPVENTQLQNEKLYLYYLQNGRDMYVDQELDINRLSDYDVDHIVPQSFLKDDSIDNKVLTRSDKARGKSDNVPSEEVVKKMKNYWRQLLNAKLITQRKFDNLTKAERGGLSELDKAGFIKRQLVETRQITKHVAQILDSRMNTKYDENDKLIREVKVITLKSKLVSDFRKDFQFYKVREINNYHHAHDAYLNAVVGTALIKKYPKLESEFVYGDYKVYDVRKMIAKSEQEIGKATAKYFFYSNIMNFFKTEITLANGEIRKRPLIETNGETGEIVWDKGRDFATVRKVLSMPQVNIVKKTEVQTGGFSKESILPKRNSDKLIARKKDWDPKKYGGFDSPTVAYSVLVVAKVEKGKSKKLKSVKELLGITIMERSSFEKNPIDFLEAKGYKEVKKDLIIKLPKYSLFELENGRKRMLASAGELQKGNELALPSKYVNFLYLASHYEKLKGSPEDNEQKQLFVEQHKHYLDEIIEQISEFSKRVILADANLDKVLSAYNKHRDKPIREQAENIIHLFTLTNLGAPAAFKYFDTTIDRKRYTSTKEVLDATLIHQSITGLYETRIDLSQLGGDGGGSSPAPGGSGGIPWLMKKPLQLTTLVPLQEYEERLLKQTMLTGSYKEKLQSLFLKYDALWQHWENQVGHRRIKPHHIATGTVNPRPQKQYPINPKAKASIQTVINDLLKQGVLIQQNSIMNTPVYPVPKPDGKWRMVLDYREVNKTIPLIAAQNQHSAGILSSIFRGKYKTTLDLSNGFWAHSITPESYWLTAFTWLGQQYCWTRLPQGFLNSPALFNADVVDLLKEVPNVQVYVDDIYISHDDPREHLEQLEKVFSLLLNAGYVVSLKKSEIAQHEVEFLGFNITKEGRGLTETFKQKLLNITPPRDLKQLQSILGKLNFARNFIPNFSELVKPLYNIIATAPGKYITWTTDNSQQLQNIISMLNSAENLEERNPEVRLIMKVNTSPSAGYIRFYNEFAKRPIMYLNYVYTKAEVKFTNTEKLLTTIHKGLIKALDLGMGQEILVYSPIVSMTKIQKTPLPERKALPIRWITWMSYLEDPRIQFHYDKTLPELQQVPTVTDDIIAKIKHPSEFSMVFYTDGSAIKHPNVNKSHNAGMGIAQVQFKPEFTVINTWSIPLGDHTAQLAEVAAVEFACKKALKIDGPVLIVTDSFYVAESVNKELPYWQSNGFFNNKKKPLKHVSKWKSIADCIQLKPDIIIIHEKGHQPTASTFHTEGNNLADKLATQGSYVVNAGKRTADGSEFEKRTADGSEFESPKKKAKVE

SEQ ID NO: 7162 - protein, 2092 aa, synthetic construct
MPAAKRVKLDGGDKKYSIGLDIGTNSVGWAVITDEYKVPSKKFKVLGNTDRHSIKKNLIGALLFDSGETAEATRLKRTARRRYTRRKNRICYLQEIFSNEMAKVDDSFFHRLEESFLVEEDKKHERHPIFGNIVDEVAYHEKYPTIYHLRKKLVDSTDKADLRLIYLALAHMIKFRGHFLIEGDLNPDNSDVDKLFIQLVQTYNQLFEENPINASGVDAKAILSARLSKSRRLENLIAQLPGEKKNGLFGNLIALSLGLTPNFKSNFDLAEDAKLQLSKDTYDDDLDNLLAQIGDQYADLFLAAKNLSDAILLSDILRVNTEITKAPLSASMIKRYDEHHQDLTLLKALVRQQLPEKYKEIFFDQSKNGYAGYIDGGASQEEFYKFIKPILEKMDGTEELLVKLNREDLLRKQRTFDNGSIPHQIHLGELHAILRRQEDFYPFLKDNREKIEKILTFRIPYYVGPLARGNSRFAWMTRKSEETITPWNFEEVVDKGASAQSFIERMTNFDKNLPNEKVLPKHSLLYEYFTVYNELTKVKYVTEGMRKPAFLSGEQKKAIVDLLFKTNRKVTVKQLKEDYFKKIECFDSVEISGVEDRFNASLGTYHDLLKIIKDKDFLDNEENEDILEDIVLTLTLFEDREMIEERLKTYAHLFDDKVMKQLKRRRYTGWGRLSRKLINGIRDKQSGKTILDFLKSDGFANRNFMQLIHDDSLTFKEDIQKAQVSGQGDSLHEHIANLAGSPAIKKGILQTVKVVDELVKVMGRHKPENIVIEMARENQTTQKGQKNSRERMKRIEEGIKELGSQILKEHPVENTQLQNEKLYLYYLQNGRDMYVDQELDINRLSDYDVDHIVPQSFLKDDSIDNKVLTRSDKARGKSDNVPSEEVVKKMKNYWRQLLNAKLITQRKFDNLTKAERGGLSELDKAGFIKRQLVETRQITKHVAQILDSRMNTKYDENDKLIREVKVITLKSKLVSDFRKDFQFYKVREINNYHHAHDAYLNAVVGTALIKKYPKLESEFVYGDYKVYDVRKMIAKSEQEIGKATAKYFFYSNIMNFFKTEITLANGEIRKRPLIETNGETGEIVWDKGRDFATVRKVLSMPQVNIVKKTEVQTGGFSKESILPKRNSDKLIARKKDWDPKKYGGFDSPTVAYSVLVVAKVEKGKSKKLKSVKELLGITIMERSSFEKNPIDFLEAKGYKEVKKDLIIKLPKYSLFELENGRKRMLASAGELQKGNELALPSKYVNFLYLASHYEKLKGSPEDNEQKQLFVEQHKHYLDEIIEQISEFSKRVILADANLDKVLSAYNKHRDKPIREQAENIIHLFTLTNLGAPAAFKYFDTTIDRKRYTSTKEVLDATLIHQSITGLYETRIDLSQLGGDGGGSSPAPGGSGGVLNLEEEYRLHEKPVPSSIDPSWLQLFPTVWAERAGMGLANQVPPVVVELRSGASPVAVRQYPMSKEAREGIRPHIQRFLDLGVLVPCQSPWNTPLLPVKKPGTNDYRPVQDLREINKRVQDIHPTVPNPYNLLSSLPPSHTWYSVLDLKDAFFCLKLHPNSQPLFAFEWRDPEKGNTGQLTWTRLPQGFKNSPTLFNEALHRDLAPFRALNPQVVLLQYVDDLLVAAPTYRDCKEGTQKLLQELSKLGYRVSAKKAQLCQKEVTYLGYLLKEGKRWLTPARKATVMKIPPPTTPRQVREFLGKAGFCRLFIPGFASLAAPLYPLTKPSIPFIWTEEHQKAFDRIKEALLSAPALALPDLTKPFTLYVDERAGVARGVLTQTLGPWRRPVAYLSKKLDPVASGWPTCLKAVAAVALLLKDADKLTLGQNVTVIASHSLESIVRQPPDRWMTNARMTHYQSLLLNERVSFAPPAVLNPATLLPVESEATPVHRCSEILAEETGTRRDLKDQPLPGVPAWYTDGSSFIAEGKRRAGAAIVDGKRTVWASSLPEGTSAQKAELVALTQALRLAEGKDINIYTDSRYAFATAHIHGAIYKQRGWLTSAGKDIKNKEEILALLEAIHLPKRVAIIHCPGHQKGNDPVATGNRRADEAAKQAALSTRVLAETTKPAGKRTADGSEFEKRTADGSEFESPKKKAKVE

SEQ ID NO: 7163 - protein, 2096 aa, synthetic construct
MPAAKRVKLDGGDKKYSIGLDIGTNSVGWAVITDEYKVPSKKFKVLGNTDRHSIKKNLIGALLFDSGETAEATRLKRTARRRYTRRKNRICYLQEIFSNEMAKVDDSFFHRLEESFLVEEDKKHERHPIFGNIVDEVAYHEKYPTIYHLRKKLVDSTDKADLRLIYLALAHMIKFRGHFLIEGDLNPDNSDVDKLFIQLVQTYNQLFEENPINASGVDAKAILSARLSKSRRLENLIAQLPGEKKNGLFGNLIALSLGLTPNFKSNFDLAEDAKLQLSKDTYDDDLDNLLAQIGDQYADLFLAAKNLSDAILLSDILRVNTEITKAPLSASMIKRYDEHHQDLTLLKALVRQQLPEKYKEIFFDQSKNGYAGYIDGGASQEEFYKFIKPILEKMDGTEELLVKLNREDLLRKQRTFDNGSIPHQIHLGELHAILRRQEDFYPFLKDNREKIEKILTFRIPYYVGPLARGNSRFAWMTRKSEETITPWNFEEVVDKGASAQSFIERMTNFDKNLPNEKVLPKHSLLYEYFTVYNELTKVKYVTEGMRKPAFLSGEQKKAIVDLLFKTNRKVTVKQLKEDYFKKIECFDSVEISGVEDRFNASLGTYHDLLKIIKDKDFLDNEENEDILEDIVLTLTLFEDREMIEERLKTYAHLFDDKVMKQLKRRRYTGWGRLSRKLINGIRDKQSGKTILDFLKSDGFANRNFMQLIHDDSLTFKEDIQKAQVSGQGDSLHEHIANLAGSPAIKKGILQTVKVVDELVKVMGRHKPENIVIEMARENQTTQKGQKNSRERMKRIEEGIKELGSQILKEHPVENTQLQNEKLYLYYLQNGRDMYVDQELDINRLSDYDVDHIVPQSFLKDDSIDNKVLTRSDKARGKSDNVPSEEVVKKMKNYWRQLLNAKLITQRKFDNLTKAERGGLSELDKAGFIKRQLVETRQITKHVAQILDSRMNTKYDENDKLIREVKVITLKSKLVSDFRKDFQFYKVREINNYHHAHDAYLNAVVGTALIKKYPKLESEFVYGDYKVYDVRKMIAKSEQEIGKATAKYFFYSNIMNFFKTEITLANGEIRKRPLIETNGETGEIVWDKGRDFATVRKVLSMPQVNIVKKTEVQTGGFSKESILPKRNSDKLIARKKDWDPKKYGGFDSPTVAYSVLVVAKVEKGKSKKLKSVKELLGITIMERSSFEKNPIDFLEAKGYKEVKKDLIIKLPKYSLFELENGRKRMLASAGELQKGNELALPSKYVNFLYLASHYEKLKGSPEDNEQKQLFVEQHKHYLDEIIEQISEFSKRVILADANLDKVLSAYNKHRDKPIREQAENIIHLFTLTNLGAPAAFKYFDTTIDRKRYTSTKEVLDATLIHQSITGLYETRIDLSQLGGDGGPAPGGSGSSGGTAPLEEEYRLFLEAPIQNVTLLEQWKREIPKVWAEINPPGLASTQAPIHVQLLSTALPVRVRQYPITLEAKRSLRETIRKFRAAGILRPVHSPWNTPLLPVRKSGTSEYRMVQDLREVNKRVETIHPTVPNPYTLLSLLPPDRIWYSVLDLKDAFFCIPLAPESQLIFAFEWADAEEGESGQLTWTRLPQGFKNSPTLFNEALNRDLQGFRLDHPSVSLLQYVDDLLIAADTQAACLSATRDLLMTLAELGYRVSGKKAQLCQEEVTYLGFKIHKGSRSLSNSRTQAILQIPVPKTKRQVREFLGTIGYCRLWIPGFAELAQPLYAATRPGNDPLVWGEKEEEAFQSLKLALTQPPALALPSLDKPFQLFVEETSGAAKGVLTQALGPWKRPVAYLSKRLDPVAAGWPRCLRAIAAAALLTREASKLTFGQDIEITSSHNLESLLRSPPDKWLTNARITQYQVLLLDPPRVRFKQTAALNPATLLPETDDTLPIHHCLDTLDSLTSTRPDLTDQPLAQAEATLFTDGSSYIRDGKRYAGAAVVTLDSVIWAEPLPIGTSAQKAELIALTKALEWSKDKSVNIYTDSRYAFATLHVHGMIYRERGWLTAGGKAIKNAPEILALLTAVWLPKRVAVMHCKGHQKDDAPTSTGNRRADEVAREVAIRPLSTQATISAGKRTADGSEFEKRTADGSEFESPKKKAKVE

SEQ ID NO: 7164 - protein, 2093 aa, synthetic construct
MPAAKRVKLDGGDKKYSIGLDIGTNSVGWAVITDEYKVPSKKFKVLGNTDRHSIKKNLIGALLFDSGETAEATRLKRTARRRYTRRKNRICYLQEIFSNEMAKVDDSFFHRLEESFLVEEDKKHERHPIFGNIVDEVAYHEKYPTIYHLRKKLVDSTDKADLRLIYLALAHMIKFRGHFLIEGDLNPDNSDVDKLFIQLVQTYNQLFEENPINASGVDAKAILSARLSKSRRLENLIAQLPGEKKNGLFGNLIALSLGLTPNFKSNFDLAEDAKLQLSKDTYDDDLDNLLAQIGDQYADLFLAAKNLSDAILLSDILRVNTEITKAPLSASMIKRYDEHHQDLTLLKALVRQQLPEKYKEIFFDQSKNGYAGYIDGGASQEEFYKFIKPILEKMDGTEELLVKLNREDLLRKQRTFDNGSIPHQIHLGELHAILRRQEDFYPFLKDNREKIEKILTFRIPYYVGPLARGNSRFAWMTRKSEETITPWNFEEVVDKGASAQSFIERMTNFDKNLPNEKVLPKHSLLYEYFTVYNELTKVKYVTEGMRKPAFLSGEQKKAIVDLLFKTNRKVTVKQLKEDYFKKIECFDSVEISGVEDRFNASLGTYHDLLKIIKDKDFLDNEENEDILEDIVLTLTLFEDREMIEERLKTYAHLFDDKVMKQLKRRRYTGWGRLSRKLINGIRDKQSGKTILDFLKSDGFANRNFMQLIHDDSLTFKEDIQKAQVSGQGDSLHEHIANLAGSPAIKKGILQTVKVVDELVKVMGRHKPENIVIEMARENQTTQKGQKNSRERMKRIEEGIKELGSQILKEHPVENTQLQNEKLYLYYLQNGRDMYVDQELDINRLSDYDVDHIVPQSFLKDDSIDNKVLTRSDKARGKSDNVPSEEVVKKMKNYWRQLLNAKLITQRKFDNLTKAERGGLSELDKAGFIKRQLVETRQITKHVAQILDSRMNTKYDENDKLIREVKVITLKSKLVSDFRKDFQFYKVREINNYHHAHDAYLNAVVGTALIKKYPKLESEFVYGDYKVYDVRKMIAKSEQEIGKATAKYFFYSNIMNFFKTEITLANGEIRKRPLIETNGETGEIVWDKGRDFATVRKVLSMPQVNIVKKTEVQTGGFSKESILPKRNSDKLIARKKDWDPKKYGGFDSPTVAYSVLVVAKVEKGKSKKLKSVKELLGITIMERSSFEKNPIDFLEAKGYKEVKKDLIIKLPKYSLFELENGRKRMLASAGELQKGNELALPSKYVNFLYLASHYEKLKGSPEDNEQKQLFVEQHKHYLDEIIEQISEFSKRVILADANLDKVLSAYNKHRDKPIREQAENIIHLFTLTNLGAPAAFKYFDTTIDRKRYTSTKEVLDATLIHQSITGLYETRIDLSQLGGDGGPAPGGSGSSGGTLQLEEEYRLFEPESTQKQEMDIWLKNFPQAWAETGGMGTAHCQAPVLIQLKATATPISIRQYPMPHEAYQGIKPHIRRMLDQGILKPCQSPWNTPLLPVKKPGTEDYRPVQDLREVNKRVEDIHPTVPNPYNLLSTLPPSHPWYTVLDLKDAFFCLRLHSESQLLFAFEWRDPEIGLSGQLTWTRLPQGFKNSPTLFNEALHSDLADFRVRYPALVLLQYVDDLLLAAATRTECLEGTKALLETLGNKGYRASAKKAQICLQEVTYLGYSLKDGQRWLTKARKEAILSIPVPKNSRQVREFLGKAGYCRLFIPGFAELAAPLYPLTRPGTLFQWGTEQQLAFEDIKKALLSSPALGLPDITKPFELFIDENSGFAKGVLVQKLGPWKRPVAYLSKKLDTVASGWPPCLRMVAAIAILVKDAGKLTLGQPLTILTSHPVEALVRQPPNKWLSNARMTHYQAMLLDAERVHFGPTVSLNPATLLPLPSGGNHHDCLQILAETHGTRPDLTDQPLPDADLTWYTDGSSFIRNGEREAGAAVTTESEVIWAAPLPPGTSAQRAELIALTQALKMAEGKKLTVYTDSRYAFATTHVHGEIYRRRGWLTSEGKEIKNKNEILALLEALFLPKRLSIIHCPGHQKGDSPQAKGNRLADDTAKKAATETHSSLTVLPAGKRTADGSEFEKRTADGSEFESPKKKAKVE

SEQ ID NO: 7165 - protein, 2174 aa, synthetic construct
MPAAKRVKLDGGDKKYSIGLDIGTNSVGWAVITDEYKVPSKKFKVLGNTDRHSIKKNLIGALLFDSGETAEATRLKRTARRRYTRRKNRICYLQEIFSNEMAKVDDSFFHRLEESFLVEEDKKHERHPIFGNIVDEVAYHEKYPTIYHLRKKLVDSTDKADLRLIYLALAHMIKFRGHFLIEGDLNPDNSDVDKLFIQLVQTYNQLFEENPINASGVDAKAILSARLSKSRRLENLIAQLPGEKKNGLFGNLIALSLGLTPNFKSNFDLAEDAKLQLSKDTYDDDLDNLLAQIGDQYADLFLAAKNLSDAILLSDILRVNTEITKAPLSASMIKRYDEHHQDLTLLKALVRQQLPEKYKEIFFDQSKNGYAGYIDGGASQEEFYKFIKPILEKMDGTEELLVKLNREDLLRKQRTFDNGSIPHQIHLGELHAILRRQEDFYPFLKDNREKIEKILTFRIPYYVGPLARGNSRFAWMTRKSEETITPWNFEEVVDKGASAQSFIERMTNFDKNLPNEKVLPKHSLLYEYFTVYNELTKVKYVTEGMRKPAFLSGEQKKAIVDLLFKTNRKVTVKQLKEDYFKKIECFDSVEISGVEDRFNASLGTYHDLLKIIKDKDFLDNEENEDILEDIVLTLTLFEDREMIEERLKTYAHLFDDKVMKQLKRRRYTGWGRLSRKLINGIRDKQSGKTILDFLKSDGFANRNFMQLIHDDSLTFKEDIQKAQVSGQGDSLHEHIANLAGSPAIKKGILQTVKVVDELVKVMGRHKPENIVIEMARENQTTQKGQKNSRERMKRIEEGIKELGSQILKEHPVENTQLQNEKLYLYYLQNGRDMYVDQELDINRLSDYDVDHIVPQSFLKDDSIDNKVLTRSDKARGKSDNVPSEEVVKKMKNYWRQLLNAKLITQRKFDNLTKAERGGLSELDKAGFIKRQLVETRQITKHVAQILDSRMNTKYDENDKLIREVKVITLKSKLVSDFRKDFQFYKVREINNYHHAHDAYLNAVVGTALIKKYPKLESEFVYGDYKVYDVRKMIAKSEQEIGKATAKYFFYSNIMNFFKTEITLANGEIRKRPLIETNGETGEIVWDKGRDFATVRKVLSMPQVNIVKKTEVQTGGFSKESILPKRNSDKLIARKKDWDPKKYGGFDSPTVAYSVLVVAKVEKGKSKKLKSVKELLGITIMERSSFEKNPIDFLEAKGYKEVKKDLIIKLPKYSLFELENGRKRMLASAGELQKGNELALPSKYVNFLYLASHYEKLKGSPEDNEQKQLFVEQHKHYLDEIIEQISEFSKRVILADANLDKVLSAYNKHRDKPIREQAENIIHLFTLTNLGAPAAFKYFDTTIDRKRYTSTKEVLDATLIHQSITGLYETRIDLSQLGGDGGPAPGGSGSSGGMNPLQLLQPLPAEIKGTKLLAHWNSGATITCIPESFLEDEQPIKKTLIKTIHGEKQQNVYYVTFKVKGRKVEAEVIASPYEYILLSPTDVPWLTQQPLQLTILVPLQEYQEKILSKTALPEDQKQQLKTLFVKYDNLWQHWENQVGHRKIRPHNIATGDYPPRPQKQYPINPKAKPSIQIVIDDLLKQGVLTPQNSTMNTPVYPVPKPDGRWRMVLDYREVNKTIPLTAAQNQHSAGILATIVRQKYKTTLDLANGFWAHPITPESYWLTAFTWQGKQYCWTRLPQGFLNSPALFTADVVDLLKEIPNVQVYVDDIYLSHDDPKEHVQQLEKVFQILLQAGYVVSLKKSEIGQKTVEFLGFNITKEGRGLTDTFKTKLLNITPPKDLKQLQSILGLLNFARNFIPNFAELVQPLYNLIASAKGKYIEWSEENTKQLNMVIEALNTASNLEERLPEQRLVIKVNTSPSAGYVRYYNETGKKPIMYLNYVFSKAELKFSMLEKLLTTMHKALIKAMDLAMGQEILVYSPIVSMTKIQKTPLPERKALPIRWITWMTYLEDPRIQFHYDKTLPELKHIPDVYTSSQSPVKHPSQYEGVFYTDGSAIKSPDPTKSNNAGMGIVHATYKPEYQVLNQWSIPLGNHTAQMAEIAAVEFACKKALKIPGPVLVITDSFYVAESANKELPYWKSNGFVNNKKKPLKHISKWKSIAECLSMKPDITIQHEKGISLQIPVFILKGNALADKLATQGSYVVNAGKRTADGSEFEKRTADGSEFESPKKKAKVE

SEQ ID NO: 7166 - protein, 2085 aa, synthetic construct
MPAAKRVKLDGGDKKYSIGLDIGTNSVGWAVITDEYKVPSKKFKVLGNTDRHSIKKNLIGALLFDSGETAEATRLKRTARRRYTRRKNRICYLQEIFSNEMAKVDDSFFHRLEESFLVEEDKKHERHPIFGNIVDEVAYHEKYPTIYHLRKKLVDSTDKADLRLIYLALAHMIKFRGHFLIEGDLNPDNSDVDKLFIQLVQTYNQLFEENPINASGVDAKAILSARLSKSRRLENLIAQLPGEKKNGLFGNLIALSLGLTPNFKSNFDLAEDAKLQLSKDTYDDDLDNLLAQIGDQYADLFLAAKNLSDAILLSDILRVNTEITKAPLSASMIKRYDEHHQDLTLLKALVRQQLPEKYKEIFFDQSKNGYAGYIDGGASQEEFYKFIKPILEKMDGTEELLVKLNREDLLRKQRTFDNGSIPHQIHLGELHAILRRQEDFYPFLKDNREKIEKILTFRIPYYVGPLARGNSRFAWMTRKSEETITPWNFEEVVDKGASAQSFIERMTNFDKNLPNEKVLPKHSLLYEYFTVYNELTKVKYVTEGMRKPAFLSGEQKKAIVDLLFKTNRKVTVKQLKEDYFKKIECFDSVEISGVEDRFNASLGTYHDLLKIIKDKDFLDNEENEDILEDIVLTLTLFEDREMIEERLKTYAHLFDDKVMKQLKRRRYTGWGRLSRKLINGIRDKQSGKTILDFLKSDGFANRNFMQLIHDDSLTFKEDIQKAQVSGQGDSLHEHIANLAGSPAIKKGILQTVKVVDELVKVMGRHKPENIVIEMARENQTTQKGQKNSRERMKRIEEGIKELGSQILKEHPVENTQLQNEKLYLYYLQNGRDMYVDQELDINRLSDYDVDHIVPQSFLKDDSIDNKVLTRSDKARGKSDNVPSEEVVKKMKNYWRQLLNAKLITQRKFDNLTKAERGGLSELDKAGFIKRQLVETRQITKHVAQILDSRMNTKYDENDKLIREVKVITLKSKLVSDFRKDFQFYKVREINNYHHAHDAYLNAVVGTALIKKYPKLESEFVYGDYKVYDVRKMIAKSEQEIGKATAKYFFYSNIMNFFKTEITLANGEIRKRPLIETNGETGEIVWDKGRDFATVRKVLSMPQVNIVKKTEVQTGGFSKESILPKRNSDKLIARKKDWDPKKYGGFDSPTVAYSVLVVAKVEKGKSKKLKSVKELLGITIMERSSFEKNPIDFLEAKGYKEVKKDLIIKLPKYSLFELENGRKRMLASAGELQKGNELALPSKYVNFLYLASHYEKLKGSPEDNEQKQLFVEQHKHYLDEIIEQISEFSKRVILADANLDKVLSAYNKHRDKPIREQAENIIHLFTLTNLGAPAAFKYFDTTIDRKRYTSTKEVLDATLIHQSITGLYETRIDLSQLGGDGGPAPGGSGSSGGVPWLTQQPLQLTILVPLQEYQEKILSKTALPEDQKQQLKTLFVKYDNLWQHWENQVGHRKIRPHNIATGDYPPRPQKQYPINPKAKPSIQIVIDDLLKQGVLTPQNSTMNTPVYPVPKPDGRWRMVLDYREVNKTIPLTAAQNQHSAGILATIVRQKYKTTLDLANGFWAHPITPESYWLTAFTWQGKQYCWTRLPQGFLNSPALFNADVVDLLKEIPNVQVYVDDIYLSHDDPKEHVQQLEKVFQILLQAGYVVSLKKSEIGQKTVEFLGFNITKEGRGLTDTFKTKLLNITPPKDLKQLQSILGLLNFARNFIPNFAELVQPLYNLIAPAKGKYIEWSEENTKQLNMVIEALNTASNLEERLPEQRLVIKVNTSPSAGYVRYYNETGKKPIMYLNYVFSKAELKFSMLEKLLTTMHKALIKAMDLAMGQEILVYSPIVSMTKIQKTPLPERKALPIRWITWMTYLEDPRIQFHYDKTLPELKHIPDVYTSSQSPVKHPSQYEGVFYTDGSAIKSPDPTKSNNAGMGIVHATYKPEYQVLNQWSIPLGNHTAQMAEIAAVEFACKKALKIPGPVLVITDSFYVAESANKELPYWKSNGFVNNKKKPLKHISKWKSIAECLSMKPDITIQHEKGISLQIPVFILKGNALADKLATQGSYVVNAGKRTADGSEFEKRTADGSEFESPKKKAKVE

SEQ ID NO: 7167 - protein, 2092 aa, synthetic construct
MPAAKRVKLDGGDKKYSIGLDIGTNSVGWAVITDEYKVPSKKFKVLGNTDRHSIKKNLIGALLFDSGETAEATRLKRTARRRYTRRKNRICYLQEIFSNEMAKVDDSFFHRLEESFLVEEDKKHERHPIFGNIVDEVAYHEKYPTIYHLRKKLVDSTDKADLRLIYLALAHMIKFRGHFLIEGDLNPDNSDVDKLFIQLVQTYNQLFEENPINASGVDAKAILSARLSKSRRLENLIAQLPGEKKNGLFGNLIALSLGLTPNFKSNFDLAEDAKLQLSKDTYDDDLDNLLAQIGDQYADLFLAAKNLSDAILLSDILRVNTEITKAPLSASMIKRYDEHHQDLTLLKALVRQQLPEKYKEIFFDQSKNGYAGYIDGGASQEEFYKFIKPILEKMDGTEELLVKLNREDLLRKQRTFDNGSIPHQIHLGELHAILRRQEDFYPFLKDNREKIEKILTFRIPYYVGPLARGNSRFAWMTRKSEETITPWNFEEVVDKGASAQSFIERMTNFDKNLPNEKVLPKHSLLYEYFTVYNELTKVKYVTEGMRKPAFLSGEQKKAIVDLLFKTNRKVTVKQLKEDYFKKIECFDSVEISGVEDRFNASLGTYHDLLKIIKDKDFLDNEENEDILEDIVLTLTLFEDREMIEERLKTYAHLFDDKVMKQLKRRRYTGWGRLSRKLINGIRDKQSGKTILDFLKSDGFANRNFMQLIHDDSLTFKEDIQKAQVSGQGDSLHEHIANLAGSPAIKKGILQTVKVVDELVKVMGRHKPENIVIEMARENQTTQKGQKNSRERMKRIEEGIKELGSQILKEHPVENTQLQNEKLYLYYLQNGRDMYVDQELDINRLSDYDVDHIVPQSFLKDDSIDNKVLTRSDKARGKSDNVPSEEVVKKMKNYWRQLLNAKLITQRKFDNLTKAERGGLSELDKAGFIKRQLVETRQITKHVAQILDSRMNTKYDENDKLIREVKVITLKSKLVSDFRKDFQFYKVREINNYHHAHDAYLNAVVGTALIKKYPKLESEFVYGDYKVYDVRKMIAKSEQEIGKATAKYFFYSNIMNFFKTEITLANGEIRKRPLIETNGETGEIVWDKGRDFATVRKVLSMPQVNIVKKTEVQTGGFSKESILPKRNSDKLIARKKDWDPKKYGGFDSPTVAYSVLVVAKVEKGKSKKLKSVKELLGITIMERSSFEKNPIDFLEAKGYKEVKKDLIIKLPKYSLFELENGRKRMLASAGELQKGNELALPSKYVNFLYLASHYEKLKGSPEDNEQKQLFVEQHKHYLDEIIEQISEFSKRVILADANLDKVLSAYNKHRDKPIREQAENIIHLFTLTNLGAPAAFKYFDTTIDRKRYTSTKEVLDATLIHQSITGLYETRIDLSQLGGDGGPAPGGSGSSGGVLNLEEEYRLHEKPVPSSIDPSWLQLFPTVWAERAGMGLANQVPPVVVELRSGASPVAVRQYPMSKEAREGIRPHIQKFLDLGVLVPCRSPWNTPLLPVKKPGTNDYRPVQDLREINKRVQDIHPTVPNPYNLLSSLPPSYTWYSVLDLKDAFFCLRLHPNSQPLFAFEWKDPEKGNTGQLTWTRLPQGFKNSPTLFNEALHRDLAPFRALNPQVVLLQYVDDLLVAAPTYEDCKKGTQKLLQELSKLGYRVSAKKAQLCQREVTYLGYLLKEGKRWLTPARKATVMKIPVPTTPRQVREFLGTAGFCRLWIPGFASLAAPLYPLTKPSIPFIWTEEHQQAFDHIKKALLSAPALALPDLTKPFTLYIDERAGVARGVLTQTLGPWRRPVAYLSKKLDPVASGWPTCLKAVAAVALLLKDADKLTLGQNVTVIASHSLESIVRQPPDRWMTNARMTHYQSLLLNERVSFAPPAVLNPATLLPVESEATPVHRCSEILAEETGTRRDLEDQPLPGVPTWYTDGSSFITEGKRRAGAPIVDGKRTVWASSLPEGTSAQKAELVALTQALRLAEGKNINIYTDSRYAFATAHIHGAIYKQRGWLTSAGKDIKNKEEILALLEAIHLPRRVAIIHCPGHQRGSNPVATGNRRADEAAKQAALSTRVLAGTTKPAGKRTADGSEFEKRTADGSEFESPKKKAKVE

SEQ ID NO: 7168 - protein, 2216 aa, synthetic construct
MPAAKRVKLDGGDKKYSIGLDIGTNSVGWAVITDEYKVPSKKFKVLGNTDRHSIKKNLIGALLFDSGETAEATRLKRTARRRYTRRKNRICYLQEIFSNEMAKVDDSFFHRLEESFLVEEDKKHERHPIFGNIVDEVAYHEKYPTIYHLRKKLVDSTDKADLRLIYLALAHMIKFRGHFLIEGDLNPDNSDVDKLFIQLVQTYNQLFEENPINASGVDAKAILSARLSKSRRLENLIAQLPGEKKNGLFGNLIALSLGLTPNFKSNFDLAEDAKLQLSKDTYDDDLDNLLAQIGDQYADLFLAAKNLSDAILLSDILRVNTEITKAPLSASMIKRYDEHHQDLTLLKALVRQQLPEKYKEIFFDQSKNGYAGYIDGGASQEEFYKFIKPILEKMDGTEELLVKLNREDLLRKQRTFDNGSIPHQIHLGELHAILRRQEDFYPFLKDNREKIEKILTFRIPYYVGPLARGNSRFAWMTRKSEETITPWNFEEVVDKGASAQSFIERMTNFDKNLPNEKVLPKHSLLYEYFTVYNELTKVKYVTEGMRKPAFLSGEQKKAIVDLLFKTNRKVTVKQLKEDYFKKIECFDSVEISGVEDRFNASLGTYHDLLKIIKDKDFLDNEENEDILEDIVLTLTLFEDREMIEERLKTYAHLFDDKVMKQLKRRRYTGWGRLSRKLINGIRDKQSGKTILDFLKSDGFANRNFMQLIHDDSLTFKEDIQKAQVSGQGDSLHEHIANLAGSPAIKKGILQTVKVVDELVKVMGRHKPENIVIEMARENQTTQKGQKNSRERMKRIEEGIKELGSQILKEHPVENTQLQNEKLYLYYLQNGRDMYVDQELDINRLSDYDVDHIVPQSFLKDDSIDNKVLTRSDKARGKSDNVPSEEVVKKMKNYWRQLLNAKLITQRKFDNLTKAERGGLSELDKAGFIKRQLVETRQITKHVAQILDSRMNTKYDENDKLIREVKVITLKSKLVSDFRKDFQFYKVREINNYHHAHDAYLNAVVGTALIKKYPKLESEFVYGDYKVYDVRKMIAKSEQEIGKATAKYFFYSNIMNFFKTEITLANGEIRKRPLIETNGETGEIVWDKGRDFATVRKVLSMPQVNIVKKTEVQTGGFSKESILPKRNSDKLIARKKDWDPKKYGGFDSPTVAYSVLVVAKVEKGKSKKLKSVKELLGITIMERSSFEKNPIDFLEAKGYKEVKKDLIIKLPKYSLFELENGRKRMLASAGELQKGNELALPSKYVNFLYLASHYEKLKGSPEDNEQKQLFVEQHKHYLDEIIEQISEFSKRVILADANLDKVLSAYNKHRDKPIREQAENIIHLFTLTNLGAPAAFKYFDTTIDRKRYTSTKEVLDATLIHQSITGLYETRIDLSQLGGDGGPAPGGSGSSGGTLGDQGSRGSDPLPEPRVTLTVEGIPTEFLVNTGAEHSVLTKPMGKMGSKRTVVAGATGSKVYPWTTKRLLKIGQKQVTHSFLVIPECPAPLLGRDLLTKLKAQIQFSTEGPQVTWEDRPAMCLVLNLEEEYRLHEKPVPPSIDPSWLQLFPMVWAEKAGMGLANQVPPVVVELKSDASPVAVRQYPMSKEAREGIRPHIQRFLDLGILVPCQSPWNTPLLPVKKPGTNDYRPVQDLREVNKRVQDIHPTVPNPYNLLSSLPPSHTWYSVLDLKDAFFCLKLHPNSQPLFAFEWRDPEKGNTGQLTWTRLPQGFKNSPTLFDEALHRDLASFRALNPQVVMLQYVDDLLVAAPTYRDCKEGTRRLLQELSKLGYRVSAKKAQLCREEVTYLGYLLKGGKRWLTPARKATVMKIPTPTTPRQVREFLGTAGFCRLWIPGFASLAAPLYPLTREKVPFTWTEAHQEAFGRIKEALLSAPALALPDLTKPFALYVDEKEGVARGVLTQTLGPWRRPVAYLSKKLDPVASGWPTCLKAIAAVALLLKDADKLTLGQNVLVIAPHNLESIVRQPPDRWMTNARMTHYQSLLLNERVSFAPPAILNPATLLPVESDDTPIHICSEILAEETGTRPDLRDQPLPGVPAWYTDGSSFIMDGRRQAGAAIVDNKRTVWASNLPEGTSAQKAELIALTQALRLAEGKSINIYTDSRYAFATAHVHGAIYKQRGLLTSAGKDIKNKEEILALLEAIHLPKRVAIIHCPGHQRGTDPVATGNRKADEAAKQAAQSTRILTETTKNAGKRTADGSEFEKRTADGSEFESPKKKAKVE

SEQ ID NO: 7169 - protein, 2094 aa, synthetic construct
MPAAKRVKLDGGDKKYSIGLDIGTNSVGWAVITDEYKVPSKKFKVLGNTDRHSIKKNLIGALLFDSGETAEATRLKRTARRRYTRRKNRICYLQEIFSNEMAKVDDSFFHRLEESFLVEEDKKHERHPIFGNIVDEVAYHEKYPTIYHLRKKLVDSTDKADLRLIYLALAHMIKFRGHFLIEGDLNPDNSDVDKLFIQLVQTYNQLFEENPINASGVDAKAILSARLSKSRRLENLIAQLPGEKKNGLFGNLIALSLGLTPNFKSNFDLAEDAKLQLSKDTYDDDLDNLLAQIGDQYADLFLAAKNLSDAILLSDILRVNTEITKAPLSASMIKRYDEHHQDLTLLKALVRQQLPEKYKEIFFDQSKNGYAGYIDGGASQEEFYKFIKPILEKMDGTEELLVKLNREDLLRKQRTFDNGSIPHQIHLGELHAILRRQEDFYPFLKDNREKIEKILTFRIPYYVGPLARGNSRFAWMTRKSEETITPWNFEEVVDKGASAQSFIERMTNFDKNLPNEKVLPKHSLLYEYFTVYNELTKVKYVTEGMRKPAFLSGEQKKAIVDLLFKTNRKVTVKQLKEDYFKKIECFDSVEISGVEDRFNASLGTYHDLLKIIKDKDFLDNEENEDILEDIVLTLTLFEDREMIEERLKTYAHLFDDKVMKQLKRRRYTGWGRLSRKLINGIRDKQSGKTILDFLKSDGFANRNFMQLIHDDSLTFKEDIQKAQVSGQGDSLHEHIANLAGSPAIKKGILQTVKVVDELVKVMGRHKPENIVIEMARENQTTQKGQKNSRERMKRIEEGIKELGSQILKEHPVENTQLQNEKLYLYYLQNGRDMYVDQELDINRLSDYDVDHIVPQSFLKDDSIDNKVLTRSDKARGKSDNVPSEEVVKKMKNYWRQLLNAKLITQRKFDNLTKAERGGLSELDKAGFIKRQLVETRQITKHVAQILDSRMNTKYDENDKLIREVKVITLKSKLVSDFRKDFQFYKVREINNYHHAHDAYLNAVVGTALIKKYPKLESEFVYGDYKVYDVRKMIAKSEQEIGKATAKYFFYSNIMNFFKTEITLANGEIRKRPLIETNGETGEIVWDKGRDFATVRKVLSMPQVNIVKKTEVQTGGFSKESILPKRNSDKLIARKKDWDPKKYGGFDSPTVAYSVLVVAKVEKGKSKKLKSVKELLGITIMERSSFEKNPIDFLEAKGYKEVKKDLIIKLPKYSLFELENGRKRMLASAGELQKGNELALPSKYVNFLYLASHYEKLKGSPEDNEQKQLFVEQHKHYLDEIIEQISEFSKRVILADANLDKVLSAYNKHRDKPIREQAENIIHLFTLTNLGAPAAFKYFDTTIDRKRYTSTKEVLDATLIHQSITGLYETRIDLSQLGGDGGPAPGGSGSSGGLGIEDEYRLHETSTEPDVSLGSTWLSDFPQAWAETGGMGLAVRQAPLIIPLKATSTPVSIQQYPMSHEARLGIKPHIQRLLDQGILVPCQSPWNTPLLPVKKPGTNDYRPVQDLREVNKRVEDIHPTVPNPYNLLSGLPPSHQWYTVLDLKDAFFCLRLHPTSQPLFAFEWRDPGMGISGQLTWTRLPQGFKNSPTLFNEALHRDLADFRIQHPDLILLQYVDDILLAATSELDCQQGTRALLQTLGDLGYRASAKKAQICQKQVKYLGYLLREGQRWLTEARKETVMGQPVPKTPRQLREFLGKAGFCRLFIPGFAEMAAPLYPLTKPGTLFSWGPDQQKAYQEIKQALLTAPALGLPDLTKPFELFVDEKQGYAKGVLTQKLGPWRRPVAYLSKKLDPVAAGWPPCLRMVAAIAVLTKDAGKLTMGQPLVILAPHAVEALVKQPPDRWLSNARMTHYQAMLLDTDRVQFGPVVALNPATLLPLPEEGAPHDCLEILAETHGTRPDLTDQPIPDADHTWYTDGSSFLQEGQRKAGAAVTTETEVIWAGALPAGTSAQRAELIALTQALKMAEGKRLNVYTDSRYAFATAHIHGEIYRRRGWLTSEGREIKNKSEILALLKALFLPKRLSIIHCLGHQKGDSAEARGNRLADQAAREAAIKTPPDTSTLLIAGKRTADGSEFEKRTADGSEFESPKKKAKVE

SEQ ID NO: 7170 - protein, 2094 aa, synthetic construct
MPAAKRVKLDGGDKKYSIGLDIGTNSVGWAVITDEYKVPSKKFKVLGNTDRHSIKKNLIGALLFDSGETAEATRLKRTARRRYTRRKNRICYLQEIFSNEMAKVDDSFFHRLEESFLVEEDKKHERHPIFGNIVDEVAYHEKYPTIYHLRKKLVDSTDKADLRLIYLALAHMIKFRGHFLIEGDLNPDNSDVDKLFIQLVQTYNQLFEENPINASGVDAKAILSARLSKSRRLENLIAQLPGEKKNGLFGNLIALSLGLTPNFKSNFDLAEDAKLQLSKDTYDDDLDNLLAQIGDQYADLFLAAKNLSDAILLSDILRVNTEITKAPLSASMIKRYDEHHQDLTLLKALVRQQLPEKYKEIFFDQSKNGYAGYIDGGASQEEFYKFIKPILEKMDGTEELLVKLNREDLLRKQRTFDNGSIPHQIHLGELHAILRRQEDFYPFLKDNREKIEKILTFRIPYYVGPLARGNSRFAWMTRKSEETITPWNFEEVVDKGASAQSFIERMTNFDKNLPNEKVLPKHSLLYEYFTVYNELTKVKYVTEGMRKPAFLSGEQKKAIVDLLFKTNRKVTVKQLKEDYFKKIECFDSVEISGVEDRFNASLGTYHDLLKIIKDKDFLDNEENEDILEDIVLTLTLFEDREMIEERLKTYAHLFDDKVMKQLKRRRYTGWGRLSRKLINGIRDKQSGKTILDFLKSDGFANRNFMQLIHDDSLTFKEDIQKAQVSGQGDSLHEHIANLAGSPAIKKGILQTVKVVDELVKVMGRHKPENIVIEMARENQTTQKGQKNSRERMKRIEEGIKELGSQILKEHPVENTQLQNEKLYLYYLQNGRDMYVDQELDINRLSDYDVDHIVPQSFLKDDSIDNKVLTRSDKARGKSDNVPSEEVVKKMKNYWRQLLNAKLITQRKFDNLTKAERGGLSELDKAGFIKRQLVETRQITKHVAQILDSRMNTKYDENDKLIREVKVITLKSKLVSDFRKDFQFYKVREINNYHHAHDAYLNAVVGTALIKKYPKLESEFVYGDYKVYDVRKMIAKSEQEIGKATAKYFFYSNIMNFFKTEITLANGEIRKRPLIETNGETGEIVWDKGRDFATVRKVLSMPQVNIVKKTEVQTGGFSKESILPKRNSDKLIARKKDWDPKKYGGFDSPTVAYSVLVVAKVEKGKSKKLKSVKELLGITIMERSSFEKNPIDFLEAKGYKEVKKDLIIKLPKYSLFELENGRKRMLASAGELQKGNELALPSKYVNFLYLASHYEKLKGSPEDNEQKQLFVEQHKHYLDEIIEQISEFSKRVILADANLDKVLSAYNKHRDKPIREQAENIIHLFTLTNLGAPAAFKYFDTTIDRKRYTSTKEVLDATLIHQSITGLYETRIDLSQLGGDGGPAPGGSGSSGGTLGIEDEYRLHETSTEPDVSLGSTWLSDFPQAWAETGGMGLAVRQAPLIIPLKATSTPVSIQQYPMSHEARLGIKPHIQRLLDQGILVPCQSPWNTPLLPVKKPGTNDYRPVQDLREVNKRVEDIHPTVPNPYNLLSGLPPSHQWYTVLDLKDAFFCLRLHPTSQPLFAFEWRDPGMGISGQLTWTRLPQGFKNSPTLFNEALHRDLADFRIQHPDLILLQYVDDILLAATSELDCQQGTRALLQTLGDLGYRASAKKAQICQKQVKYLGYLLREGQRWLTEARKETVMGQPVPKTPRQLREFLGTAGFCRLWIPGFAEMAAPLYPLTKPGTLFSWGPDQQKAYQEIKQALLTAPALGLPDLTKPFELFVDEKQGYAKGVLTQKLGPWRRPVAYLSKKLDPVAAGWPPCLRMVAAIAVLTKDAGKLTMGQPLVILAPHAVEALVKQPPDRWLSNARMTHYQAMLLDTDRVQFGPVVALNPATLLPLPEEGAPHDCLEILAETHGTRPDLTDQPIPDADHTWYTDGSSFLQEGQRKAGAAVTTETEVIWAGALPAGTSAQRAELIALTQALKMAEGKRLNVYTDSRYAFATAHIHGEIYRRRGWLTSEGREIKNKSEILALLKALFLPKRLSIIHCLGHQKGDSAEARGNRLADQAAREAAIKTPPDTSTLLAGKRTADGSEFEKRTADGSEFESPKKKAKVE

SEQ ID NO: 7171 - protein, 2094 aa, synthetic construct
MPAAKRVKLDGGDKKYSIGLDIGTNSVGWAVITDEYKVPSKKFKVLGNTDRHSIKKNLIGALLFDSGETAEATRLKRTARRRYTRRKNRICYLQEIFSNEMAKVDDSFFHRLEESFLVEEDKKHERHPIFGNIVDEVAYHEKYPTIYHLRKKLVDSTDKADLRLIYLALAHMIKFRGHFLIEGDLNPDNSDVDKLFIQLVQTYNQLFEENPINASGVDAKAILSARLSKSRRLENLIAQLPGEKKNGLFGNLIALSLGLTPNFKSNFDLAEDAKLQLSKDTYDDDLDNLLAQIGDQYADLFLAAKNLSDAILLSDILRVNTEITKAPLSASMIKRYDEHHQDLTLLKALVRQQLPEKYKEIFFDQSKNGYAGYIDGGASQEEFYKFIKPILEKMDGTEELLVKLNREDLLRKQRTFDNGSIPHQIHLGELHAILRRQEDFYPFLKDNREKIEKILTFRIPYYVGPLARGNSRFAWMTRKSEETITPWNFEEVVDKGASAQSFIERMTNFDKNLPNEKVLPKHSLLYEYFTVYNELTKVKYVTEGMRKPAFLSGEQKKAIVDLLFKTNRKVTVKQLKEDYFKKIECFDSVEISGVEDRFNASLGTYHDLLKIIKDKDFLDNEENEDILEDIVLTLTLFEDREMIEERLKTYAHLFDDKVMKQLKRRRYTGWGRLSRKLINGIRDKQSGKTILDFLKSDGFANRNFMQLIHDDSLTFKEDIQKAQVSGQGDSLHEHIANLAGSPAIKKGILQTVKVVDELVKVMGRHKPENIVIEMARENQTTQKGQKNSRERMKRIEEGIKELGSQILKEHPVENTQLQNEKLYLYYLQNGRDMYVDQELDINRLSDYDVDHIVPQSFLKDDSIDNKVLTRSDKARGKSDNVPSEEVVKKMKNYWRQLLNAKLITQRKFDNLTKAERGGLSELDKAGFIKRQLVETRQITKHVAQILDSRMNTKYDENDKLIREVKVITLKSKLVSDFRKDFQFYKVREINNYHHAHDAYLNAVVGTALIKKYPKLESEFVYGDYKVYDVRKMIAKSEQEIGKATAKYFFYSNIMNFFKTEITLANGEIRKRPLIETNGETGEIVWDKGRDFATVRKVLSMPQVNIVKKTEVQTGGFSKESILPKRNSDKLIARKKDWDPKKYGGFDSPTVAYSVLVVAKVEKGKSKKLKSVKELLGITIMERSSFEKNPIDFLEAKGYKEVKKDLIIKLPKYSLFELENGRKRMLASAGELQKGNELALPSKYVNFLYLASHYEKLKGSPEDNEQKQLFVEQHKHYLDEIIEQISEFSKRVILADANLDKVLSAYNKHRDKPIREQAENIIHLFTLTNLGAPAAFKYFDTTIDRKRYTSTKEVLDATLIHQSITGLYETRIDLSQLGGDGGPAPGGSGSSGGTLNIEDEYRLHETSKEPDVSLGSTWLSDFPQAWAETGGMGLAVRQAPLIIPLKATSTPVSIKQYPMSQEARLGIKPHIQRLLDQGILVPCQSPWNTPLLPVKKPGTNDYRPVQDLREVNKRVEDIHPTVPNPYNLLSGLPPSHQWYTVLDLKDAFFCLRLHPTSQPLFAFEWRDPEMGISGQLTWTRLPQGFKNSPTLFNEALHRDLAGFRIQHPDLILLQYVDDLLLAATSELDCQQGTRALLQTLGDLGYRASAKKAQICQKQVKYLGYLLKEGQRWLTEARKETVMGQPIPKTPRQLREFLGTAGFCRLWIPGFAEMAAPLYPLTKPGTLFNWGPDQQKAFQEIKQALLTAPALGLPDLTKPFELFVDEKQGYAKGVLTQKLGPWRRPVAYLSKKLDPVAAGWPPCLRMVAAIAVLTKDAGKLTMGQPLVILAPHAVEALVKQPPDRWLSNARMTHYQALLLDTDRVQFGPVVALNPATLLPLPEEGLQHDCLDILAEAHGTRSDLMDQPLPDADHTWYTDGSSFLQEGQRKAGAAVTTETEVIWARALPAGTSAQRAELIALTQALKMAEGKKLNVYTDSRYAFATAHIHGEIYRRRGWLTSEGKEIKNKDEILALLKALFLPKRLSIIHCPGHQKGNSAEARGNRMADQAAREVATRETPETSTLLAGKRTADGSEFEKRTADGSEFESPKKKAKVE

SEQ ID NO: 7172 - protein, 2114 aa, synthetic construct
MPAAKRVKLDGGDKKYSIGLDIGTNSVGWAVITDEYKVPSKKFKVLGNTDRHSIKKNLIGALLFDSGETAEATRLKRTARRRYTRRKNRICYLQEIFSNEMAKVDDSFFHRLEESFLVEEDKKHERHPIFGNIVDEVAYHEKYPTIYHLRKKLVDSTDKADLRLIYLALAHMIKFRGHFLIEGDLNPDNSDVDKLFIQLVQTYNQLFEENPINASGVDAKAILSARLSKSRRLENLIAQLPGEKKNGLFGNLIALSLGLTPNFKSNFDLAEDAKLQLSKDTYDDDLDNLLAQIGDQYADLFLAAKNLSDAILLSDILRVNTEITKAPLSASMIKRYDEHHQDLTLLKALVRQQLPEKYKEIFFDQSKNGYAGYIDGGASQEEFYKFIKPILEKMDGTEELLVKLNREDLLRKQRTFDNGSIPHQIHLGELHAILRRQEDFYPFLKDNREKIEKILTFRIPYYVGPLARGNSRFAWMTRKSEETITPWNFEEVVDKGASAQSFIERMTNFDKNLPNEKVLPKHSLLYEYFTVYNELTKVKYVTEGMRKPAFLSGEQKKAIVDLLFKTNRKVTVKQLKEDYFKKIECFDSVEISGVEDRFNASLGTYHDLLKIIKDKDFLDNEENEDILEDIVLTLTLFEDREMIEERLKTYAHLFDDKVMKQLKRRRYTGWGRLSRKLINGIRDKQSGKTILDFLKSDGFANRNFMQLIHDDSLTFKEDIQKAQVSGQGDSLHEHIANLAGSPAIKKGILQTVKVVDELVKVMGRHKPENIVIEMARENQTTQKGQKNSRERMKRIEEGIKELGSQILKEHPVENTQLQNEKLYLYYLQNGRDMYVDQELDINRLSDYDVDHIVPQSFLKDDSIDNKVLTRSDKARGKSDNVPSEEVVKKMKNYWRQLLNAKLITQRKFDNLTKAERGGLSELDKAGFIKRQLVETRQITKHVAQILDSRMNTKYDENDKLIREVKVITLKSKLVSDFRKDFQFYKVREINNYHHAHDAYLNAVVGTALIKKYPKLESEFVYGDYKVYDVRKMIAKSEQEIGKATAKYFFYSNIMNFFKTEITLANGEIRKRPLIETNGETGEIVWDKGRDFATVRKVLSMPQVNIVKKTEVQTGGFSKESILPKRNSDKLIARKKDWDPKKYGGFDSPTVAYSVLVVAKVEKGKSKKLKSVKELLGITIMERSSFEKNPIDFLEAKGYKEVKKDLIIKLPKYSLFELENGRKRMLASAGELQKGNELALPSKYVNFLYLASHYEKLKGSPEDNEQKQLFVEQHKHYLDEIIEQISEFSKRVILADANLDKVLSAYNKHRDKPIREQAENIIHLFTLTNLGAPAAFKYFDTTIDRKRYTSTKEVLDATLIHQSITGLYETRIDLSQLGGDGGPAPGGSGSSGGTLNIEDEYRLHETSKEPDVSLGSTWLSDFPQAWAETGGMGLAVRQAPLIIPLKATSTPVSIKQYPMSQEARLGIKPHIQRLLDQGILVPCQSPWNTPLLPVKKPGTNDYRPVQDLREVNKRVEDIHPTVPNPYNLLSGLPPSHQWYTVLDLKDAFFCLRLHPTSQPLFAFEWRDPEMGISGQLTWTRLPQGFKNSPTLFNEALHRDLADFRIQHPDLILLQYVDDLLLAATSELDCQQGTRALLQTLGNLGYRASAKKAQICQKQVKYLGYLLKEGQRWLTEARKETVMGQPTPKTPRQLREFLGKAGFCRLFIPGFAEMAAPLYPLTKPGTLFNWGPDQQKAYQEIKQALLTAPALGLPDLTKPFELFVDEKQGYAKGVLTQKLGPWRRPVAYLSKKLDPVAAGWPPCLRMVAAIAVLTKDAGKLTMGQPLVILAPHAVEALVKQPPDRWLSNARMTHYQALLLDTDRVQFGPVVALNPATLLPLPEEGLQHNCLDILAEAHGTRPDLTDQPLPDADHTWYTDGSSLLQEGQRKAGAAVTTETEVIWAKALPAGTSAQRAELIALTQALKMAEGKKLNVYTDSRYAFATAHIHGEIYRRRGWLTSEGKEIKNKDEILALLKALFLPKRLSIIHCPGHQKGHSAEARGNRMADQAARKAAITETPDTSTLLIENSSPSGGSKRTADGSEFEAGKRTADGSEFEKRTADGSEFESPKKKAKVE

SEQ ID NO: 7173 - protein, 2094 aa, synthetic construct
MPAAKRVKLDGGDKKYSIGLDIGTNSVGWAVITDEYKVPSKKFKVLGNTDRHSIKKNLIGALLFDSGETAEATRLKRTARRRYTRRKNRICYLQEIFSNEMAKVDDSFFHRLEESFLVEEDKKHERHPIFGNIVDEVAYHEKYPTIYHLRKKLVDSTDKADLRLIYLALAHMIKFRGHFLIEGDLNPDNSDVDKLFIQLVQTYNQLFEENPINASGVDAKAILSARLSKSRRLENLIAQLPGEKKNGLFGNLIALSLGLTPNFKSNFDLAEDAKLQLSKDTYDDDLDNLLAQIGDQYADLFLAAKNLSDAILLSDILRVNTEITKAPLSASMIKRYDEHHQDLTLLKALVRQQLPEKYKEIFFDQSKNGYAGYIDGGASQEEFYKFIKPILEKMDGTEELLVKLNREDLLRKQRTFDNGSIPHQIHLGELHAILRRQEDFYPFLKDNREKIEKILTFRIPYYVGPLARGNSRFAWMTRKSEETITPWNFEEVVDKGASAQSFIERMTNFDKNLPNEKVLPKHSLLYEYFTVYNELTKVKYVTEGMRKPAFLSGEQKKAIVDLLFKTNRKVTVKQLKEDYFKKIECFDSVEISGVEDRFNASLGTYHDLLKIIKDKDFLDNEENEDILEDIVLTLTLFEDREMIEERLKTYAHLFDDKVMKQLKRRRYTGWGRLSRKLINGIRDKQSGKTILDFLKSDGFANRNFMQLIHDDSLTFKEDIQKAQVSGQGDSLHEHIANLAGSPAIKKGILQTVKVVDELVKVMGRHKPENIVIEMARENQTTQKGQKNSRERMKRIEEGIKELGSQILKEHPVENTQLQNEKLYLYYLQNGRDMYVDQELDINRLSDYDVDHIVPQSFLKDDSIDNKVLTRSDKARGKSDNVPSEEVVKKMKNYWRQLLNAKLITQRKFDNLTKAERGGLSELDKAGFIKRQLVETRQITKHVAQILDSRMNTKYDENDKLIREVKVITLKSKLVSDFRKDFQFYKVREINNYHHAHDAYLNAVVGTALIKKYPKLESEFVYGDYKVYDVRKMIAKSEQEIGKATAKYFFYSNIMNFFKTEITLANGEIRKRPLIETNGETGEIVWDKGRDFATVRKVLSMPQVNIVKKTEVQTGGFSKESILPKRNSDKLIARKKDWDPKKYGGFDSPTVAYSVLVVAKVEKGKSKKLKSVKELLGITIMERSSFEKNPIDFLEAKGYKEVKKDLIIKLPKYSLFELENGRKRMLASAGELQKGNELALPSKYVNFLYLASHYEKLKGSPEDNEQKQLFVEQHKHYLDEIIEQISEFSKRVILADANLDKVLSAYNKHRDKPIREQAENIIHLFTLTNLGAPAAFKYFDTTIDRKRYTSTKEVLDATLIHQSITGLYETRIDLSQLGGDGGPAPGGSGSSGGTLNIEDEHRLHETSKEPDVSLGSTWLSDFPQAWAETGGMGLAVRQAPLIIPLKATSTPVSIKQYPMSQEARLGIKPHIQRLLDQGILVPCQSPWNTPLLPVKKPGTNDYRPVQDLREVNKRVEDIHPTVPNPYNLLSGLPPSHQWYTVLDLKDAFFCLRLHPTSQPLFAFEWRDPEMGISGQLTWTRLPQGFKNSPTLFNEALHRDLADFRIQHPDLILLQYVDDLLLAATSELDCQQGTRALLQTLGNLGYRASAKKAQICQKQVKYLGYLLKEGQRWLTEARKETVMGQPTPKTPRQLREFLGTAGFCRLWIPGFAEMAAPLYPLTKPGTLFNWGPDQQKAYQEIKQALLTAPALGLPDLTKPFELFVDEKQGYAKGVLTQKLGPWRRPVAYLSKKLDPVAAGWPPCLRMVAAIAVLTKDAGKLTMGQPLVILAPHAVEALVKQPPDRWLSNARMTHYQALLLDTDRVQFGPVVALNPATLLPLPEEGLQHNCLDILAEAHGTRPDLTDQPLPDADHTWYTDGSSLLQEGQRKAGAAVTTETEVIWAKALPAGTSAQRAELIALTQALKMAEGKKLNVYTDSRYAFATAHIHGEIYRRRGWLTSEGKEIKNKDEILALLKALFLPKRLSIIHCPGHQKGHSAEARGNRMADQAARKAAITETPDTSTLLAGKRTADGSEFEKRTADGSEFESPKKKAKVE

SEQ ID NO: 7174 - protein, 2114 aa, synthetic construct; identical to SEQ ID NO: 7172

SEQ ID NO: 7175 - protein, 2094 aa, synthetic construct
MPAAKRVKLDGGDKKYSIGLDIGTNSVGWAVITDEYKVPSKKFKVLGNTDRHSIKKNLIGALLFDSGETAEATRLKRTARRRYTRRKNRICYLQEIFSNEMAKVDDSFFHRLEESFLVEEDKKHERHPIFGNIVDEVAYHEKYPTIYHLRKKLVDSTDKADLRLIYLALAHMIKFRGHFLIEGDLNPDNSDVDKLFIQLVQTYNQLFEENPINASGVDAKAILSARLSKSRRLENLIAQLPGEKKNGLFGNLIALSLGLTPNFKSNFDLAEDAKLQLSKDTYDDDLDNLLAQIGDQYADLFLAAKNLSDAILLSDILRVNTEITKAPLSASMIKRYDEHHQDLTLLKALVRQQLPEKYKEIFFDQSKNGYAGYIDGGASQEEFYKFIKPILEKMDGTEELLVKLNREDLLRKQRTFDNGSIPHQIHLGELHAILRRQEDFYPFLKDNREKIEKILTFRIPYYVGPLARGNSRFAWMTRKSEETITPWNFEEVVDKGASAQSFIERMTNFDKNLPNEKVLPKHSLLYEYFTVYNELTKVKYVTEGMRKPAFLSGEQKKAIVDLLFKTNRKVTVKQLKEDYFKKIECFDSVEISGVEDRFNASLGTYHDLLKIIKDKDFLDNEENEDILEDIVLTLTLFEDREMIEERLKTYAHLFDDKVMKQLKRRRYTGWGRLSRKLINGIRDKQSGKTILDFLKSDGFANRNFMQLIHDDSLTFKEDIQKAQVSGQGDSLHEHIANLAGSPAIKKGILQTVKVVDELVKVMGRHKPENIVIEMARENQTTQKGQKNSRERMKRIEEGIKELGSQILKEHPVENTQLQNEKLYLYYLQNGRDMYVDQELDINRLSDYDVDHIVPQSFLKDDSIDNKVLTRSDKARGKSDNVPSEEVVKKMKNYWRQLLNAKLITQRKFDNLTKAERGGLSELDKAGFIKRQLVETRQITKHVAQILDSRMNTKYDENDKLIREVKVITLKSKLVSDFRKDFQFYKVREINNYHHAHDAYLNAVVGTALIKKYPKLESEFVYGDYKVYDVRKMIAKSEQEIGKATAKYFFYSNIMNFFKTEITLANGEIRKRPLIETNGETGEIVWDKGRDFATVRKVLSMPQVNIVKKTEVQTGGFSKESILPKRNSDKLIARKKDWDPKKYGGFDSPTVAYSVLVVAKVEKGKSKKLKSVKELLGITIMERSSFEKNPIDFLEAKGYKEVKKDLIIKLPKYSLFELENGRKRMLASAGELQKGNELALPSKYVNFLYLASHYEKLKGSPEDNEQKQLFVEQHKHYLDEIIEQISEFSKRVILADANLDKVLSAYNKHRDKPIREQAENIIHLFTLTNLGAPAAFKYFDTTIDRKRYTSTKEVLDATLIHQSITGLYETRIDLSQLGGDGGPAPGGSGSSGGTLNIEDEHRLHETSKEPDVSLGSTWLSDFPQAWAETGGMGLAVRQAPLIIPLKATSTPVSIKQYPMSQEARLGIKPHIQRLLDQGILVPCQSPWNTPLLPVKKPGTNDYRPVQDLREVNKRVEDIHPTVPNPYNLLSGLPPSHQWYTVLDLKDAFFCLRLHPTSQPLFAFEWRDPEMGISGQLTWTRLPQGFKNSPTLFDEALHRDLADFRIQHPDLILLQYVDDLLLAATSELDCQQGTRALLQTLGNLGYRASAKKAQICQKQVKYLGYLLKEGQRWLTEARKETVMGQPTPKTPRQLREFLGTAGFCRLWIPGFAEMAAPLYPLTKTGTLFNWGPDQQKAYQEIKQALLTAPALGLPDLTKPFELFVDEKQGYAKGVLTQKLGPWRRPVAYLSKKLDPVAAGWPPCLRMVAAIAVLTKDAGKLTMGQPLVILAPHAVEALVKQPPDRWLSNARMTHYQALLLDTDRVQFGPVVALNPATLLPLPEEGLQHNCLDILAEAHGTRPDLTDQPLPDADHTWYTDGSSLLQEGQRKAGAAVTTETEVIWAKALPAGTSAQRAELIALTQALKMAEGKKLNVYTDSRYAFATAHIHGEIYRRRGLLTSEGKEIKNKDEILALLKALFLPKRLSIIHCPGHQKGHSAEARGNRMADQAARKAAITETPDTSTLLAGKRTADGSEFEKRTADGSEFESPKKKAKVE

SEQ ID NO: 7176 - protein, 2094 aa, synthetic construct; identical to SEQ ID NO: 7173

SEQ ID NO: 7177 - protein, 2085 aa, synthetic construct
MPAAKRVKLDGGDKKYSIGLDIGTNSVGWAVITDEYKVPSKKFKVLGNTDRHSIKKNLIGALLFDSGETAEATRLKRTARRRYTRRKNRICYLQEIFSNEMAKVDDSFFHRLEESFLVEEDKKHERHPIFGNIVDEVAYHEKYPTIYHLRKKLVDSTDKADLRLIYLALAHMIKFRGHFLIEGDLNPDNSDVDKLFIQLVQTYNQLFEENPINASGVDAKAILSARLSKSRRLENLIAQLPGEKKNGLFGNLIALSLGLTPNFKSNFDLAEDAKLQLSKDTYDDDLDNLLAQIGDQYADLFLAAKNLSDAILLSDILRVNTEITKAPLSASMIKRYDEHHQDLTLLKALVRQQLPEKYKEIFFDQSKNGYAGYIDGGASQEEFYKFIKPILEKMDGTEELLVKLNREDLLRKQRTFDNGSIPHQIHLGELHAILRRQEDFYPFLKDNREKIEKILTFRIPYYVGPLARGNSRFAWMTRKSEETITPWNFEEVVDKGASAQSFIERMTNFDKNLPNEKVLPKHSLLYEYFTVYNELTKVKYVTEGMRKPAFLSGEQKKAIVDLLFKTNRKVTVKQLKEDYFKKIECFDSVEISGVEDRFNASLGTYHDLLKIIKDKDFLDNEENEDILEDIVLTLTLFEDREMIEERLKTYAHLFDDKVMKQLKRRRYTGWGRLSRKLINGIRDKQSGKTILDFLKSDGFANRNFMQLIHDDSLTFKEDIQKAQVSGQGDSLHEHIANLAGSPAIKKGILQTVKVVDELVKVMGRHKPENIVIEMARENQTTQKGQKNSRERMKRIEEGIKELGSQILKEHPVENTQLQNEKLYLYYLQNGRDMYVDQELDINRLSDYDVDHIVPQSFLKDDSIDNKVLTRSDKARGKSDNVPSEEVVKKMKNYWRQLLNAKLITQRKFDNLTKAERGGLSELDKAGFIKRQLVETRQITKHVAQILDSRMNTKYDENDKLIREVKVITLKSKLVSDFRKDFQFYKVREINNYHHAHDAYLNAVVGTALIKKYPKLESEFVYGDYKVYDVRKMIAKSEQEIGKATAKYFFYSNIMNFFKTEITLANGEIRKRPLIETNGETGEIVWDKGRDFATVRKVLSMPQVNIVKKTEVQTGGFSKESILPKRNSDKLIARKKDWDPKKYGGFDSPTVAYSVLVVAKVEKGKSKKLKSVKELLGITIMERSSFEKNPIDFLEAKGYKEVKKDLIIKLPKYSLFELENGRKRMLASAGELQKGNELALPSKYVNFLYLASHYEKLKGSPEDNEQKQLFVEQHKHYLDEIIEQISEFSKRVILADANLDKVLSAYNKHRDKPIREQAENIIHLFTLTNLGAPAAFKYFDTTIDRKRYTSTKEVLDATLIHQSITGLYETRIDLSQLGGDGGPAPGGSGSSGGIPWLMKKPLQLTTLVPLQEYEERLLKQTMLTGSYKEKLQSLFLKYDALWQHWENQVGHRRIKPHHIATGTVNPRPQKQYPINPKAKASIQTVINDLLKQGVLIQQNSIMNTPVYPVPKPDGKWRMVLDYREVNKTIPLIAAQNQHSAGILSSIFRGKYKTTLDLSNGFWAHSITPESYWLTAFTWLGQQYCWTRLPQGFLNSPALFNADVVDLLKEVPNVQVYVDDIYISHDDPREHLEQLEKVFSLLLNAGYVVSLKKSEIAQHEVEFLGFNITKEGRGLTETFKQKLLNITPPRDLKQLQSILGKLNFARNFIPNFSELVKPLYNIIATAPGKYITWTTDNSQQLQNIISMLNSAENLEERNPEVRLIMKVNTSPSAGYIRFYNEFAKRPIMYLNYVYTKAEVKFTNTEKLLTTIHKGLIKALDLGMGQEILVYSPIVSMTKIQKTPLPERKALPIRWITWMSYLEDPRIQFHYDKTLPELQQVPTVTDDIIAKIKHPSEFSMVFYTDGSAIKHPNVNKSHNAGMGIAQVQFKPEFTVINTWSIPLGDHTAQLAEVAAVEFACKKALKIDGPVLIVTDSFYVAESVNKELPYWQSNGFFNNKKKPLKHVSKWKSIADCIQLKPDIIIIHEKGHQPTASTFHTEGNNLADKLATQGSYVVNAGKRTADGSEFEKRTADGSEFESPKKKAKVE

SEQ ID NO: 7178 - protein, 2092 aa, synthetic construct
MPAAKRVKLDGGDKKYSIGLDIGTNSVGWAVITDEYKVPSKKFKVLGNTDRHSIKKNLIGALLFDSGETAEATRLKRTARRRYTRRKNRICYLQEIFSNEMAKVDDSFFHRLEESFLVEEDKKHERHPIFGNIVDEVAYHEKYPTIYHLRKKLVDSTDKADLRLIYLALAHMIKFRGHFLIEGDLNPDNSDVDKLFIQLVQTYNQLFEENPINASGVDAKAILSARLSKSRRLENLIAQLPGEKKNGLFGNLIALSLGLTPNFKSNFDLAEDAKLQLSKDTYDDDLDNLLAQIGDQYADLFLAAKNLSDAILLSDILRVNTEITKAPLSASMIKRYDEHHQDLTLLKALVRQQLPEKYKEIFFDQSKNGYAGYIDGGASQEEFYKFIKPILEKMDGTEELLVKLNREDLLRKQRTFDNGSIPHQIHLGELHAILRRQEDFYPFLKDNREKIEKILTFRIPYYVGPLARGNSRFAWMTRKSEETITPWNFEEVVDKGASAQSFIERMTNFDKNLPNEKVLPKHSLLYEYFTVYNELTKVKYVTEGMRKPAFLSGEQKKAIVDLLFKTNRKVTVKQLKEDYFKKIECFDSVEISGVEDRFNASLGTYHDLLKIIKDKDFLDNEENEDILEDIVLTLTLFEDREMIEERLKTYAHLFDDKVMKQLKRRRYTGWGRLSRKLINGIRDKQSGKTILDFLKSDGFANRNFMQLIHDDSLTFKEDIQKAQVSGQGDSLHEHIANLAGSPAIKKGILQTVKVVDELVKVMGRHKPENIVIEMARENQTTQKGQKNSRERMKRIEEGIKELGSQILKEHPVENTQLQNEKLYLYYLQNGRDMYVDQELDINRLSDYDVDHIVPQSFLKDDSIDNKVLTRSDKARGKSDNVPSEEVVKKMKNYWRQLLNAKLITQRKFDNLTKAERGGLSELDKAGFIKRQLVETRQITKHVAQILDSRMNTKYDENDKLIREVKVITLKSKLVSDFRKDFQFYKVREINNYHHAHDAYLNAVVGTALIKKYPKLESEFVYGDYKVYDVRKMIAKSEQEIGKATAKYFFYSNIMNFFKTEITLANGEIRKRPLIETNGETGEIVWDKGRDFATVRKVLSMPQVNIVKKTEVQTGGFSKESILPKRNSDKLIARKKDWDPKKYGGFDSPTVAYSVLVVAKVEKGKSKKLKSVKELLGITIMERSSFEKNPIDFLEAKGYKEVKKDLIIKLPKYSLFELENGRKRMLASAGELQKGNELALPSKYVNFLYLASHYEKLKGSPEDNEQKQLFVEQHKHYLDEIIEQISEFSKRVILADANLDKVLSAYNKHRDKPIREQAENIIHLFTLTNLGAPAAFKYFDTTIDRKRYTSTKEVLDATLIHQSITGLYETRIDLSQLGGDGGPAPGGSGSSGGVLNLEEEYRLHEKPVPSSIDPSWLQLFPTVWAERAGMGLANQVPPVVVELRSGASPVAVRQYPMSKEAREGIRPHIQRFLDLGVLVPCQSPWNTPLLPVKKPGTNDYRPVQDLREINKRVQDIHPTVPNPYNLLSSLPPSHTWYSVLDLKDAFFCLKLHPNSQPLFAFEWRDPEKGNTGQLTWTRLPQGFKNSPTLFNEALHRDLAPFRALNPQVVLLQYVDDLLVAAPTYRDCKEGTQKLLQELSKLGYRVSAKKAQLCQKEVTYLGYLLKEGKRWLTPARKATVMKIPPPTTPRQVREFLGTAGFCRLWIPGFASLAAPLYPLTKPSIPFIWTEEHQKAFDRIKEALLSAPALALPDLTKPFTLYVDERAGVARGVLTQTLGPWRRPVAYLSKKLDPVASGWPTCLKAVAAVALLLKDADKLTLGQNVTVIASHSLESIVRQPPDRWMTNARMTHYQSLLLNERVSFAPPAVLNPATLLPVESEATPVHRCSEILAEETGTRRDLKDQPLPGVPAWYTDGSSFIAEGKRRAGAAIVDGKRTVWASSLPEGTSAQKAELVALTQALRLAEGKDINIYTDSRYAFATAHIHGAIYKQRGWLTSAGKDIKNKEEILALLEAIHLPKRVAIIHCPGHQKGNDPVATGNRRADEAAKQAALSTRVLAETTKPAGKRTADGSEFEKRTADGSEFESPKKKAKVE

SEQ ID NO: 7179 - protein, 2094 aa, synthetic construct
MPAAKRVKLDGGDKKYSIGLDIGTNSVGWAVITDEYKVPSKKFKVLGNTDRHSIKKNLIGALLFDSGETAEATRLKRTARRRYTRRKNRICYLQEIFSNEMAKVDDSFFHRLEESFLVEEDKKHERHPIFGNIVDEVAYHEKYPTIYHLRKKLVDSTDKADLRLIYLALAHMIKFRGHFLIEGDLNPDNSDVDKLFIQLVQTYNQLFEENPINASGVDAKAILSARLSKSRRLENLIAQLPGEKKNGLFGNLIALSLGLTPNFKSNFDLAEDAKLQLSKDTYDDDLDNLLAQIGDQYADLFLAAKNLSDAILLSDILRVNTEITKAPLSASMIKRYDEHHQDLTLLKALVRQQLPEKYKEIFFDQSKNGYAGYIDGGASQEEFYKFIKPILEKMDGTEELLVKLNREDLLRKQRTFDNGSIPHQIHLGELHAILRRQEDFYPFLKDNREKIEKILTFRIPYYVGPLARGNSRFAWMTRKSEETITPWNFEEVVDKGASAQSFIERMTNFDKNLPNEKVLPKHSLLYEYFTVYNELTKVKYVTEGMRKPAFLSGEQKKAIVDLLFKTNRKVTVKQLKEDYFKKIECFDSVEISGVEDRFNASLGTYHDLLKIIKDKDFLDNEENEDILEDIVLTLTLFEDREMIEERLKTYAHLFDDKVMKQLKRRRYTGWGRLSRKLINGIRDKQSGKTILDFLKSDGFANRNFMQLIHDDSLTFKEDIQKAQVSGQGDSLHEHIANLAGSPAIKKGILQTVKVVDELVKVMGRHKPENIVIEMARENQTTQKGQKNSRERMKRIEEGIKELGSQILKEHPVENTQLQNEKLYLYYLQNGRDMYVDQELDINRLSDYDVDHIVPQSFLKDDSIDNKVLTRSDKARGKSDNVPSEEVVKKMKNYWRQLLNAKLITQRKFDNLTKAERGGLSELDKAGFIKRQLVETRQITKHVAQILDSRMNTKYDENDKLIREVKVITLKSKLVSDFRKDFQFYKVREINNYHHAHDAYLNAVVGTALIKKYPKLESEFVYGDYKVYDVRKMIAKSEQEIGKATAKYFFYSNIMNFFKTEITLANGEIRKRPLIETNGETGEIVWDKGRDFATVRKVLSMPQVNIVKKTEVQTGGFSKESILPKRNSDKLIARKKDWDPKKYGGFDSPTVAYSVLVVAKVEKGKSKKLKSVKELLGITIMERSSFEKNPIDFLEAKGYKEVKKDLIIKLPKYSLFELENGRKRMLASAGELQKGNELALPSKYVNFLYLASHYEKLKGSPEDNEQKQLFVEQHKHYLDEIIEQISEFSKRVILADANLDKVLSAYNKHRDKPIREQAENIIHLFTLTNLGAPAAFKYFDTTIDRKRYTSTKEVLDATLIHQSITGLYETRIDLSQLGGDGGPAPGGSGSSGGTLNIEDEYRLHETSKEPDVPLGSTWLSDFPQAWAETGGMGLAVRQAPLIIPLKATSTPVSIKQYPMSQEARLGIKPHIQRLLDQGILVPCQSPWNTPLLPVKKPGTNDYRPVQDLREVNKRVEDIHPTVPNPYNLLSGLPPSHQWYTVLDLKDAFFCLRLHPTSQPLFAFEWRDPEMGISGQLTWTRLPQGFKNSPTLFNEALHRDLADFRIQHPDLILLQYVDDLLLAATSEQDCQRGTRALLQTLGNLGYRASAKKAQICQKQVKYLGYLLKEGQRWLTEARKETVMGQPTPKTPRQLREFLGTAGFCRLWIPGFAEMAAPLYPLTKPGTLFNWGPDQQKAYQEIKQALLTAPALGLPDLTKPFELFVDEKQGYAKGVLTQKLGPWRRPVAYLSKKLDPVAAGWPPCLRMVAAIAVLTKDAGKLTMGQPLVILAPHAVEALVKQPPDRWLSNARMTHYQAMLLDTDRVQFGPVVALNPATLLPLPEKEAPHDCLEILAETHGTRPDLTDQPIPDADYTWYTDGSSFLQEGQRRAGAAVTTETEVIWARALPAGTSAQRAELIALTQALKMAEGKKLNVYTDSRYAFATAHVHGEIYRRRGWLTSEGREIKNKNEILALLKALFLPKRLSIIHCPGHQKGNSAEARGNRMADQAAREAAMKAVLETSTLLAGKRTADGSEFEKRTADGSEFESPKKKAKVE

SEQ ID NO: 7180 - protein, 2094 aa, synthetic construct
MPAAKRVKLDGGDKKYSIGLDIGTNSVGWAVITDEYKVPSKKFKVLGNTDRHSIKKNLIGALLFDSGETAEATRLKRTARRRYTRRKNRICYLQEIFSNEMAKVDDSFFHRLEESFLVEEDKKHERHPIFGNIVDEVAYHEKYPTIYHLRKKLVDSTDKADLRLIYLALAHMIKFRGHFLIEGDLNPDNSDVDKLFIQLVQTYNQLFEENPINASGVDAKAILSARLSKSRRLENLIAQLPGEKKNGLFGNLIALSLGLTPNFKSNFDLAEDAKLQLSKDTYDDDLDNLLAQIGDQYADLFLAAKNLSDAILLSDILRVNTEITKAPLSASMIKRYDEHHQDLTLLKALVRQQLPEKYKEIFFDQSKNGYAGYIDGGASQEEFYKFIKPILEKMDGTEELLVKLNREDLLRKQRTFDNGSIPHQIHLGELHAILRRQEDFYPFLKDNREKIEKILTFRIPYYVGPLARGNSRFAWMTRKSEETITPWNFEEVVDKGASAQSFIERMTNFDKNLPNEKVLPKHSLLYEYFTVYNELTKVKYVTEGMRKPAFLSGEQKKAIVDLLFKTNRKVTVKQLKEDYFKKIECFDSVEISGVEDRFNASLGTYHDLLKIIKDKDFLDNEENEDILEDIVLTLTLFEDREMIEERLKTYAHLFDDKVMKQLKRRRYTGWGRLSRKLINGIRDKQSGKTILDFLKSDGFANRNFMQLIHDDSLTFKEDIQKAQVSGQGDSLHEHIANLAGSPAIKKGILQTVKVVDELVKVMGRHKPENIVIEMARENQTTQKGQKNSRERMKRIEEGIKELGSQILKEHPVENTQLQNEKLYLYYLQNGRDMYVDQELDINRLSDYDVDHIVPQSFLKDDSIDNKVLTRSDKARGKSDNVPSEEVVKKMKNYWRQLLNAKLITQRKFDNLTKAERGGLSELDKAGFIKRQLVETRQITKHVAQILDSRMNTKYDENDKLIREVKVITLKSKLVSDFRKDFQFYKVREINNYHHAHDAYLNAVVGTALIKKYPKLESEFVYGDYKVYDVRKMIAKSEQEIGKATAKYFFYSNIMNFFKTEITLANGEIRKRPLIETNGETGEIVWDKGRDFATVRKVLSMPQVNIVKKTEVQTGGFSKESILPKRNSDKLIARKKDWDPKKYGGFDSPTVAYSVLVVAKVEKGKSKKLKSVKELLGITIMERSSFEKNPIDFLEAKGYKEVKKDLIIKLPKYSLFELENGRKRMLASAGELQKGNELALPSKYVNFLYLASHYEKLKGSPEDNEQKQLFVEQHKHYLDEIIEQISEFSKRVILADANLDKVLSAYNKHRDKPIREQAENIIHLFTLTNLGAPAAFKYFDTTIDRKRYTSTKEVLDATLIHQSITGLYETRIDLSQLGGDGGPAPGGSGSSGGTLNIEDEYRLHETSKEPDVPLGSTWLSDFPQAWAETGGMGLAVRQAPLIIPLKATSTPVSIKQYPMSQEARLGIKPHIQRLLDQGILVPCQSPWNTPLLPVKKPGTNDYRPVQDLREVNKRVEDIHPTVPNPYNLLSGLPPSHQWYTVLDLKDAFFCLRLHPTSQPLFAFEWRDPEMGISGQLTWTRLPQGFKNSPTLFNEALHRDLADFRIQHPDLILLQYVDDLLLAATSEQDCQRGTRALLQTLGNLGYRASAKKAQICQKQVKYLGYLLKEGQRWLTEARKETVMGQPTPKTPRQLREFLGKAGFCRLFIPGFAEMAAPLYPLTKPGTLFNWGPDQQKAYQEIKQALLTAPALGLPDLTKPFELFVDEKQGYAKGVLTQKLGPWRRPVAYLSKKLDPVAAGWPPCLRMVAAIAVLTKDAGKLTMGQPLVILAPHAVEALVKQPPDRWLSNARMTHYQAMLLDTDRVQFGPVVALNPATLLPLPEKEAPHDCLEILAETHGTRPDLTDQPIPDADYTWYTDGSSFLQEGQRRAGAAVTTETEVIWARALPAGTSAQRAELIALTQALKMAEGKKLNVYTDSRYAFATAHVHGEIYRRRGWLTSEGREIKNKNEILALLKALFLPKRLSIIHCPGHQKGNSAEARGNRMADQAAREAAMKAVLETSTLLAGKRTADGSEFEKRTADGSEFESPKKKAKVE

SEQ ID NO: 7181 - protein, 2096 aa, synthetic construct
MPAAKRVKLDGGDKKYSIGLDIGTNSVGWAVITDEYKVPSKKFKVLGNTDRHSIKKNLIGALLFDSGETAEATRLKRTARRRYTRRKNRICYLQEIFSNEMAKVDDSFFHRLEESFLVEEDKKHERHPIFGNIVDEVAYHEKYPTIYHLRKKLVDSTDKADLRLIYLALAHMIKFRGHFLIEGDLNPDNSDVDKLFIQLVQTYNQLFEENPINASGVDAKAILSARLSKSRRLENLIAQLPGEKKNGLFGNLIALSLGLTPNFKSNFDLAEDAKLQLSKDTYDDDLDNLLAQIGDQYADLFLAAKNLSDAILLSDILRVNTEITKAPLSASMIKRYDEHHQDLTLLKALVRQQLPEKYKEIFFDQSKNGYAGYIDGGASQEEFYKFIKPILEKMDGTEELLVKLNREDLLRKQRTFDNGSIPHQIHLGELHAILRRQEDFYPFLKDNREKIEKILTFRIPYYVGPLARGNSRFAWMTRKSEETITPWNFEEVVDKGASAQSFIERMTNFDKNLPNEKVLPKHSLLYEYFTVYNELTKVKYVTEGMRKPAFLSGEQKKAIVDLLFKTNRKVTVKQLKEDYFKKIECFDSVEISGVEDRFNASLGTYHDLLKIIKDKDFLDNEENEDILEDIVLTLTLFEDREMIEERLKTYAHLFDDKVMKQLKRRRYTGWGRLSRKLINGIRDKQSGKTILDFLKSDGFANRNFMQLIHDDSLTFKEDIQKAQVSGQGDSLHEHIANLAGSPAIKKGILQTVKVVDELVKVMGRHKPENIVIEMARENQTTQKGQKNSRERMKRIEEGIKELGSQILKEHPVENTQLQNEKLYLYYLQNGRDMYVDQELDINRLSDYDVDHIVPQSFLKDDSIDNKVLTRSDKARGKSDNVPSEEVVKKMKNYWRQLLNAKLITQRKFDNLTKAERGGLSELDKAGFIKRQLVETRQITKHVAQILDSRMNTKYDENDKLIREVKVITLKSKLVSDFRKDFQFYKVREINNYHHAHDAYLNAVVGTALIKKYPKLESEFVYGDYKVYDVRKMIAKSEQEIGKATAKYFFYSNIMNFFKTEITLANGEIRKRPLIETNGETGEIVWDKGRDFATVRKVLSMPQVNIVKKTEVQTGGFSKESILPKRNSDKLIARKKDWDPKKYGGFDSPTVAYSVLVVAKVEKGKSKKLKSVKELLGITIMERSSFEKNPIDFLEAKGYKEVKKDLIIKLPKYSLFELENGRKRMLASAGELQKGNELALPSKYVNFLYLASHYEKLKGSPEDNEQKQLFVEQHKHYLDEIIEQISEFSKRVILADANLDKVLSAYNKHRDKPIREQAENIIHLFTLTNLGAPAAFKYFDTTIDRKRYTSTKEVLDATLIHQSITGLYETRIDLSQLGGDGGPAPGSSGGSGGTAPLEEEYRLFLEAPIQNVTLLEQWKREIPKVWAEINPPGLASTQAPIHVQLLSTALPVRVRQYPITLEAKRSLRETIRKFRAAGILRPVHSPWNTPLLPVRKSGTSEYRMVQDLREVNKRVETIHPTVPNPYTLLSLLPPDRIWYSVLDLKDAFFCIPLAPESQLIFAFEWADAEEGESGQLTWTRLPQGFKNSPTLFNEALNRDLQGFRLDHPSVSLLQYVDDLLIAADTQAACLSATRDLLMTLAELGYRVSGKKAQLCQEEVTYLGFKIHKGSRSLSNSRTQAILQIPVPKTKRQVREFLGTIGYCRLWIPGFAELAQPLYAATRPGNDPLVWGEKEEEAFQSLKLALTQPPALALPSLDKPFQLFVEETSGAAKGVLTQALGPWKRPVAYLSKRLDPVAAGWPRCLRAIAAAALLTREASKLTFGQDIEITSSHNLESLLRSPPDKWLTNARITQYQVLLLDPPRVRFKQTAALNPATLLPETDDTLPIHHCLDTLDSLTSTRPDLTDQPLAQAEATLFTDGSSYIRDGKRYAGAAVVTLDSVIWAEPLPIGTSAQKAELIALTKALEWSKDKSVNIYTDSRYAFATLHVHGMIYRERGWLTAGGKAIKNAPEILALLTAVWLPKRVAVMHCKGHQKDDAPTSTGNRRADEVAREVAIRPLSTQATISAGKRTADGSEFEKRTADGSEFESPKKKAKVE

SEQ ID NO: 7182 - protein, 2093 aa, synthetic construct
MPAAKRVKLDGGDKKYSIGLDIGTNSVGWAVITDEYKVPSKKFKVLGNTDRHSIKKNLIGALLFDSGETAEATRLKRTARRRYTRRKNRICYLQEIFSNEMAKVDDSFFHRLEESFLVEEDKKHERHPIFGNIVDEVAYHEKYPTIYHLRKKLVDSTDKADLRLIYLALAHMIKFRGHFLIEGDLNPDNSDVDKLFIQLVQTYNQLFEENPINASGVDAKAILSARLSKSRRLENLIAQLPGEKKNGLFGNLIALSLGLTPNFKSNFDLAEDAKLQLSKDTYDDDLDNLLAQIGDQYADLFLAAKNLSDAILLSDILRVNTEITKAPLSASMIKRYDEHHQDLTLLKALVRQQLPEKYKEIFFDQSKNGYAGYIDGGASQEEFYKFIKPILEKMDGTEELLVKLNREDLLRKQRTFDNGSIPHQIHLGELHAILRRQEDFYPFLKDNREKIEKILTFRIPYYVGPLARGNSRFAWMTRKSEETITPWNFEEVVDKGASAQSFIERMTNFDKNLPNEKVLPKHSLLYEYFTVYNELTKVKYVTEGMRKPAFLSGEQKKAIVDLLFKTNRKVTVKQLKEDYFKKIECFDSVEISGVEDRFNASLGTYHDLLKIIKDKDFLDNEENEDILEDIVLTLTLFEDREMIEERLKTYAHLFDDKVMKQLKRRRYTGWGRLSRKLINGIRDKQSGKTILDFLKSDGFANRNFMQLIHDDSLTFKEDIQKAQVSGQGDSLHEHIANLAGSPAIKKGILQTVKVVDELVKVMGRHKPENIVIEMARENQTTQKGQKNSRERMKRIEEGIKELGSQILKEHPVENTQLQNEKLYLYYLQNGRDMYVDQELDINRLSDYDVDHIVPQSFLKDDSIDNKVLTRSDKARGKSDNVPSEEVVKKMKNYWRQLLNAKLITQRKFDNLTKAERGGLSELDKAGFIKRQLVETRQITKHVAQILDSRMNTKYDENDKLIREVKVITLKSKLVSDFRKDFQFYKVREINNYHHAHDAYLNAVVGTALIKKYPKLESEFVYGDYKVYDVRKMIAKSEQEIGKATAKYFFYSNIMNFFKTEITLANGEIRKRPLIETNGETGEIVWDKGRDFATVRKVLSMPQVNIVKKTEVQTGGFSKESILPKRNSDKLIARKKDWDPKKYGGFDSPTVAYSVLVVAKVEKGKSKKLKSVKELLGITIMERSSFEKNPIDFLEAKGYKEVKKDLIIKLPKYSLFELENGRKRMLASAGELQKGNELALPSKYVNFLYLASHYEKLKGSPEDNEQKQLFVEQHKHYLDEIIEQISEFSKRVILADANLDKVLSAYNKHRDKPIREQAENIIHLFTLTNLGAPAAFKYFDTTIDRKRYTSTKEVLDATLIHQSITGLYETRIDLSQLGGDGGPAPGSSGGSGGTLQLEEEYRLFEPESTQKQEMDIWLKNFPQAWAETGGMGTAHCQAPVLIQLKATATPISIRQYPMPHEAYQGIKPHIRRMLDQGILKPCQSPWNTPLLPVKKPGTEDYRPVQDLREVNKRVEDIHPTVPNPYNLLSTLPPSHPWYTVLDLKDAFFCLRLHSESQLLFAFEWRDPEIGLSGQLTWTRLPQGFKNSPTLFNEALHSDLADFRVRYPALVLLQYVDDLLLAAATRTECLEGTKALLETLGNKGYRASAKKAQICLQEVTYLGYSLKDGQRWLTKARKEAILSIPVPKNSRQVREFLGTAGYCRLWIPGFAELAAPLYPLTRPGTLFQWGTEQQLAFEDIKKALLSSPALGLPDITKPFELFIDENSGFAKGVLVQKLGPWKRPVAYLSKKLDTVASGWPPCLRMVAAIAILVKDAGKLTLGQPLTILTSHPVEALVRQPPNKWLSNARMTHYQAMLLDAERVHFGPTVSLNPATLLPLPSGGNHHDCLQILAETHGTRPDLTDQPLPDADLTWYTDGSSFIRNGEREAGAAVTTESEVIWAAPLPPGTSAQRAELIALTQALKMAEGKKLTVYTDSRYAFATTHVHGEIYRRRGWLTSEGKEIKNKNEILALLEALFLPKRLSIIHCPGHQKGDSPQAKGNRLADDTAKKAATETHSSLTVLPAGKRTADGSEFEKRTADGSEFESPKKKAKVE

SEQ ID NO: 7183 - protein, 2216 aa, synthetic construct
MPAAKRVKLDGGDKKYSIGLDIGTNSVGWAVITDEYKVPSKKFKVLGNTDRHSIKKNLIGALLFDSGETAEATRLKRTARRRYTRRKNRICYLQEIFSNEMAKVDDSFFHRLEESFLVEEDKKHERHPIFGNIVDEVAYHEKYPTIYHLRKKLVDSTDKADLRLIYLALAHMIKFRGHFLIEGDLNPDNSDVDKLFIQLVQTYNQLFEENPINASGVDAKAILSARLSKSRRLENLIAQLPGEKKNGLFGNLIALSLGLTPNFKSNFDLAEDAKLQLSKDTYDDDLDNLLAQIGDQYADLFLAAKNLSDAILLSDILRVNTEITKAPLSASMIKRYDEHHQDLTLLKALVRQQLPEKYKEIFFDQSKNGYAGYIDGGASQEEFYKFIKPILEKMDGTEELLVKLNREDLLRKQRTFDNGSIPHQIHLGELHAILRRQEDFYPFLKDNREKIEKILTFRIPYYVGPLARGNSRFAWMTRKSEETITPWNFEEVVDKGASAQSFIERMTNFDKNLPNEKVLPKHSLLYEYFTVYNELTKVKYVTEGMRKPAFLSGEQKKAIVDLLFKTNRKVTVKQLKEDYFKKIECFDSVEISGVEDRFNASLGTYHDLLKIIKDKDFLDNEENEDILEDIVLTLTLFEDREMIEERLKTYAHLFDDKVMKQLKRRRYTGWGRLSRKLINGIRDKQSGKTILDFLKSDGFANRNFMQLIHDDSLTFKEDIQKAQVSGQGDSLHEHIANLAGSPAIKKGILQTVKVVDELVKVMGRHKPENIVIEMARENQTTQKGQKNSRERMKRIEEGIKELGSQILKEHPVENTQLQNEKLYLYYLQNGRDMYVDQELDINRLSDYDVDHIVPQSFLKDDSIDNKVLTRSDKARGKSDNVPSEEVVKKMKNYWRQLLNAKLITQRKFDNLTKAERGGLSELDKAGFIKRQLVETRQITKHVAQILDSRMNTKYDENDKLIREVKVITLKSKLVSDFRKDFQFYKVREINNYHHAHDAYLNAVVGTALIKKYPKLESEFVYGDYKVYDVRKMIAKSEQEIGKATAKYFFYSNIMNFFKTEITLANGEIRKRPLIETNGETGEIVWDKGRDFATVRKVLSMPQVNIVKKTEVQTGGFSKESILPKRNSDKLIARKKDWDPKKYGGFDSPTVAYSVLVVAKVEKGKSKKLKSVKELLGITIMERSSFEKNPIDFLEAKGYKEVKKDLIIKLPKYSLFELENGRKRMLASAGELQKGNELALPSKYVNFLYLASHYEKLKGSPEDNEQKQLFVEQHKHYLDEIIEQISEFSKRVILADANLDKVLSAYNKHRDKPIREQAENIIHLFTLTNLGAPAAFKYFDTTIDRKRYTSTKEVLDATLIHQSITGLYETRIDLSQLGGDGGPAPGSSGGSGGTLGDQGSRGSDPLPEPRVTLTVEGIPTEFLVNTGAEHSVLTKPMGKMGSKRTVVAGATGSKVYPWTTKRLLKIGQKQVTHSFLVIPECPAPLLGRDLLTKLKAQIQFSTEGPQVTWEDRPAMCLVLNLEEEYRLHEKPVPPSIDPSWLQLFPMVWAEKAGMGLANQVPPVVVELKSDASPVAVRQYPMSKEAREGIRPHIQRFLDLGILVPCQSPWNTPLLPVKKPGTNDYRPVQDLREVNKRVQDIHPTVPNPYNLLSSLPPSHTWYSVLDLKDAFFCLKLHPNSQPLFAFEWRDPEKGNTGQLTWTRLPQGFKNSPTLFDEALHRDLASFRALNPQVVMLQYVDDLLVAAPTYRDCKEGTRRLLQELSKLGYRVSAKKAQLCREEVTYLGYLLKGGKRWLTPARKATVMKIPTPTTPRQVREFLGTAGFCRLWIPGFASLAAPLYPLTREKVPFTWTEAHQEAFGRIKEALLSAPALALPDLTKPFALYVDEKEGVARGVLTQTLGPWRRPVAYLSKKLDPVASGWPTCLKAIAAVALLLKDADKLTLGQNVLVIAPHNLESIVRQPPDRWMTNARMTHYQSLLLNERVSFAPPAILNPATLLPVESDDTPIHICSEILAEETGTRPDLRDQPLPGVPAWYTDGSSFIMDGRRQAGAAIVDNKRTVWASNLPEGTSAQKAELIALTQALRLAEGKSINIYTDSRYAFATAHVHGAIYKQRGLLTSAGKDIKNKEEILALLEAIHLPKRVAIIHCPGHQRGTDPVATGNRKADEAAKQAAQSTRILTETTKNAGKRTADGSEFEKRTADGSEFESPKKKAKVE

SEQ ID NO: 7184 - protein, 2216 aa, synthetic construct
MPAAKRVKLDGGDKKYSIGLDIGTNSVGWAVITDEYKVPSKKFKVLGNTDRHSIKKNLIGALLFDSGETAEATRLKRTARRRYTRRKNRICYLQEIFSNEMAKVDDSFFHRLEESFLVEEDKKHERHPIFGNIVDEVAYHEKYPTIYHLRKKLVDSTDKADLRLIYLALAHMIKFRGHFLIEGDLNPDNSDVDKLFIQLVQTYNQLFEENPINASGVDAKAILSARLSKSRRLENLIAQLPGEKKNGLFGNLIALSLGLTPNFKSNFDLAEDAKLQLSKDTYDDDLDNLLAQIGDQYADLFLAAKNLSDAILLSDILRVNTEITKAPLSASMIKRYDEHHQDLTLLKALVRQQLPEKYKEIFFDQSKNGYAGYIDGGASQEEFYKFIKPILEKMDGTEELLVKLNREDLLRKQRTFDNGSIPHQIHLGELHAILRRQEDFYPFLKDNREKIEKILTFRIPYYVGPLARGNSRFAWMTRKSEETITPWNFEEVVDKGASAQSFIERMTNFDKNLPNEKVLPKHSLLYEYFTVYNELTKVKYVTEGMRKPAFLSGEQKKAIVDLLFKTNRKVTVKQLKEDYFKKIECFDSVEISGVEDRFNASLGTYHDLLKIIKDKDFLDNEENEDILEDIVLTLTLFEDREMIEERLKTYAHLFDDKVMKQLKRRRYTGWGRLSRKLINGIRDKQSGKTILDFLKSDGFANRNFMQLIHDDSLTFKEDIQKAQVSGQGDSLHEHIANLAGSPAIKKGILQTVKVVDELVKVMGRHKPENIVIEMARENQTTQKGQKNSRERMKRIEEGIKELGSQILKEHPVENTQLQNEKLYLYYLQNGRDMYVDQELDINRLSDYDVDHIVPQSFLKDDSIDNKVLTRSDKARGKSDNVPSEEVVKKMKNYWRQLLNAKLITQRKFDNLTKAERGGLSELDKAGFIKRQLVETRQITKHVAQILDSRMNTKYDENDKLIREVKVITLKSKLVSDFRKDFQFYKVREINNYHHAHDAYLNAVVGTALIKKYPKLESEFVYGDYKVYDVRKMIAKSEQEIGKATAKYFFYSNIMNFFKTEITLANGEIRKRPLIETNGETGEIVWDKGRDFATVRKVLSMPQVNIVKKTEVQTGGFSKESILPKRNSDKLIARKKDWDPKKYGGFDSPTVAYSVLVVAKVEKGKSKKLKSVKELLGITIMERSSFEKNPIDFLEAKGYKEVKKDLIIKLPKYSLFELENGRKRMLASAGELQKGNELALPSKYVNFLYLASHYEKLKGSPEDNEQKQLFVEQHKHYLDEIIEQISEFSKRVILADANLDKVLSAYNKHRDKPIREQAENIIHLFTLTNLGAPAAFKYFDTTIDRKRYTSTKEVLDATLIHQSITGLYETRIDLSQLGGDGGPAPGSSGGSGGTLGDQGSRGSDPLPEPRVTLTVEGIPTEFLVNTGAEHSVLTKPMGKMGSKRTVVAGATGSKVYPWTTKRLLKIGQKQVTHSFLVIPECPAPLLGRDLLTKLKAQIQFSTEGPQVTWEDRPAMCLVLNLEEEYRLHEKPVPPSIDPSWLQLFPMVWAEKAGMGLANQVPPVVVELKSDASPVAVRQYPMSKEAREGIRPHIQRFLDLGILVPCQSPWNTPLLPVKKPGTNDYRPVQDLREVNKRVQDIHPTVPNPYNLLSSLPPSHTWYSVLDLKDAFFCLKLHPNSQPLFAFEWRDPEKGNTGQLTWTRLPQGFKNSPTLFNEALHRDLASFRALNPQVVMLQYVDDLLVAAPTYRDCKEGTRRLLQELSKLGYRVSAKKAQLCREEVTYLGYLLKGGKRWLTPARKATVMKIPTPTTPRQVREFLGKAGFCRLFIPGFASLAAPLYPLTRPKVPFTWTEAHQEAFGRIKEALLSAPALALPDLTKPFALYVDEKEGVARGVLTQTLGPWRRPVAYLSKKLDPVASGWPTCLKAIAAVALLLKDADKLTLGQNVLVIAPHNLESIVRQPPDRWMTNARMTHYQSLLLNERVSFAPPAILNPATLLPVESDDTPIHICSEILAEETGTRPDLRDQPLPGVPAWYTDGSSFIMDGRRQAGAAIVDNKRTVWASNLPEGTSAQKAELIALTQALRLAEGKSINIYTDSRYAFATAHVHGAIYKQRGWLTSAGKDIKNKEEILALLEAIHLPKRVAIIHCPGHQRGTDPVATGNRKADEAAKQAAQSTRILTETTKNAGKRTADGSEFEKRTADGSEFESPKKKAKVE

SEQ ID NO: 7185 - protein, 2094 aa, synthetic construct
MPAAKRVKLDGGDKKYSIGLDIGTNSVGWAVITDEYKVPSKKFKVLGNTDRHSIKKNLIGALLFDSGETAEATRLKRTARRRYTRRKNRICYLQEIFSNEMAKVDDSFFHRLEESFLVEEDKKHERHPIFGNIVDEVAYHEKYPTIYHLRKKLVDSTDKADLRLIYLALAHMIKFRGHFLIEGDLNPDNSDVDKLFIQLVQTYNQLFEENPINASGVDAKAILSARLSKSRRLENLIAQLPGEKKNGLFGNLIALSLGLTPNFKSNFDLAEDAKLQLSKDTYDDDLDNLLAQIGDQYADLFLAAKNLSDAILLSDILRVNTEITKAPLSASMIKRYDEHHQDLTLLKALVRQQLPEKYKEIFFDQSKNGYAGYIDGGASQEEFYKFIKPILEKMDGTEELLVKLNREDLLRKQRTFDNGSIPHQIHLGELHAILRRQEDFYPFLKDNREKIEKILTFRIPYYVGPLARGNSRFAWMTRKSEETITPWNFEEVVDKGASAQSFIERMTNFDKNLPNEKVLPKHSLLYEYFTVYNELTKVKYVTEGMRKPAFLSGEQKKAIVDLLFKTNRKVTVKQLKEDYFKKIECFDSVEISGVEDRFNASLGTYHDLLKIIKDKDFLDNEENEDILEDIVLTLTLFEDREMIEERLKTYAHLFDDKVMKQLKRRRYTGWGRLSRKLINGIRDKQSGKTILDFLKSDGFANRNFMQLIHDDSLTFKEDIQKAQVSGQGDSLHEHIANLAGSPAIKKGILQTVKVVDELVKVMGRHKPENIVIEMARENQTTQKGQKNSRERMKRIEEGIKELGSQILKEHPVENTQLQNEKLYLYYLQNGRDMYVDQELDINRLSDYDVDHIVPQSFLKDDSIDNKVLTRSDKARGKSDNVPSEEVVKKMKNYWRQLLNAKLITQRKFDNLTKAERGGLSELDKAGFIKRQLVETRQITKHVAQILDSRMNTKYDENDKLIREVKVITLKSKLVSDFRKDFQFYKVREINNYHHAHDAYLNAVVGTALIKKYPKLESEFVYGDYKVYDVRKMIAKSEQEIGKATAKYFFYSNIMNFFKTEITLANGEIRKRPLIETNGETGEIVWDKGRDFATVRKVLSMPQVNIVKKTEVQTGGFSKESILPKRNSDKLIARKKDWDPKKYGGFDSPTVAYSVLVVAKVEKGKSKKLKSVKELLGITIMERSSFEKNPIDFLEAKGYKEVKKDLIIKLPKYSLFELENGRKRMLASAGELQKGNELALPSKYVNFLYLASHYEKLKGSPEDNEQKQLFVEQHKHYLDEIIEQISEFSKRVILADANLDKVLSAYNKHRDKPIREQAENIIHLFTLTNLGAPAAFKYFDTTIDRKRYTSTKEVLDATLIHQSITGLYETRIDLSQLGGDGGPAPGSSGGSGGLGIEDEYRLHETSTEPDVSLGSTWLSDFPQAWAETGGMGLAVRQAPLIIPLKATSTPVSIQQYPMSHEARLGIKPHIQRLLDQGILVPCQSPWNTPLLPVKKPGTNDYRPVQDLREVNKRVEDIHPTVPNPYNLLSGLPPSHQWYTVLDLKDAFFCLRLHPTSQPLFAFEWRDPGMGISGQLTWTRLPQGFKNSPTLFNEALHRDLADFRIQHPDLILLQYVDDILLAATSELDCQQGTRALLQTLGDLGYRASAKKAQICQKQVKYLGYLLREGQRWLTEARKETVMGQPVPKTPRQLREFLGKAGFCRLFIPGFAEMAAPLYPLTKPGTLFSWGPDQQKAYQEIKQALLTAPALGLPDLTKPFELFVDEKQGYAKGVLTQKLGPWRRPVAYLSKKLDPVAAGWPPCLRMVAAIAVLTKDAGKLTMGQPLVILAPHAVEALVKQPPDRWLSNARMTHYQAMLLDTDRVQFGPVVALNPATLLPLPEEGAPHDCLEILAETHGTRPDLTDQPIPDADHTWYTDGSSFLQEGQRKAGAAVTTETEVIWAGALPAGTSAQRAELIALTQALKMAEGKRLNVYTDSRYAFATAHIHGEIYRRRGWLTSEGREIKNKSEILALLKALFLPKRLSIIHCLGHQKGDSAEARGNRLADQAAREAAIKTPPDTSTLLIAGKRTADGSEFEKRTADGSEFESPKKKAKVE

SEQ ID NO: 7186 - protein, 2094 aa, synthetic construct; identical to SEQ ID NO: 7185

SEQ ID NO: 7187 - protein, 2088 aa, synthetic construct
MPAAKRVKLDGGDKKYSIGLDIGTNSVGWAVITDEYKVPSKKFKVLGNTDRHSIKKNLIGALLFDSGETAEATRLKRTARRRYTRRKNRICYLQEIFSNEMAKVDDSFFHRLEESFLVEEDKKHERHPIFGNIVDEVAYHEKYPTIYHLRKKLVDSTDKADLRLIYLALAHMIKFRGHFLIEGDLNPDNSDVDKLFIQLVQTYNQLFEENPINASGVDAKAILSARLSKSRRLENLIAQLPGEKKNGLFGNLIALSLGLTPNFKSNFDLAEDAKLQLSKDTYDDDLDNLLAQIGDQYADLFLAAKNLSDAILLSDILRVNTEITKAPLSASMIKRYDEHHQDLTLLKALVRQQLPEKYKEIFFDQSKNGYAGYIDGGASQEEFYKFIKPILEKMDGTEELLVKLNREDLLRKQRTFDNGSIPHQIHLGELHAILRRQEDFYPFLKDNREKIEKILTFRIPYYVGPLARGNSRFAWMTRKSEETITPWNFEEVVDKGASAQSFIERMTNFDKNLPNEKVLPKHSLLYEYFTVYNELTKVKYVTEGMRKPAFLSGEQKKAIVDLLFKTNRKVTVKQLKEDYFKKIECFDSVEISGVEDRFNASLGTYHDLLKIIKDKDFLDNEENEDILEDIVLTLTLFEDREMIEERLKTYAHLFDDKVMKQLKRRRYTGWGRLSRKLINGIRDKQSGKTILDFLKSDGFANRNFMQLIHDDSLTFKEDIQKAQVSGQGDSLHEHIANLAGSPAIKKGILQTVKVVDELVKVMGRHKPENIVIEMARENQTTQKGQKNSRERMKRIEEGIKELGSQILKEHPVENTQLQNEKLYLYYLQNGRDMYVDQELDINRLSDYDVDHIVPQSFLKDDSIDNKVLTRSDKARGKSDNVPSEEVVKKMKNYWRQLLNAKLITQRKFDNLTKAERGGLSELDKAGFIKRQLVETRQITKHVAQILDSRMNTKYDENDKLIREVKVITLKSKLVSDFRKDFQFYKVREINNYHHAHDAYLNAVVGTALIKKYPKLESEFVYGDYKVYDVRKMIAKSEQEIGKATAKYFFYSNIMNFFKTEITLANGEIRKRPLIETNGETGEIVWDKGRDFATVRKVLSMPQVNIVKKTEVQTGGFSKESILPKRNSDKLIARKKDWDPKKYGGFDSPTVAYSVLVVAKVEKGKSKKLKSVKELLGITIMERSSFEKNPIDFLEAKGYKEVKKDLIIKLPKYSLFELENGRKRMLASAGELQKGNELALPSKYVNFLYLASHYEKLKGSPEDNEQKQLFVEQHKHYLDEIIEQISEFSKRVILADANLDKVLSAYNKHRDKPIREQAENIIHLFTLTNLGAPAAFKYFDTTIDRKRYTSTKEVLDATLIHQSITGLYETRIDLSQLGGDGGPAPGSSGGSGGTLQLDDEYRLYSPLVKPDQNIQFWLEQFPQAWAETAGMGLAKQVPPQVIQLKASATPVSVRQYPLSKEAQEGIRPHVQRLIQQGILVPVQSPWNTPLLPVRKPGTNDYRPVQDLREVNKRVQDIHPTVPNPYNLLCALPPQRSWYTVLDLKDAFFCLRLHPTSQPLFAFEWRDPGTGRTGQLTWTRLPQGFKNSPTIFDEALHRDLANFRIQHPQVTLLQYVDDLLLAGATKQDCLEGTKALLLELSDLGYRASAKKAQICRREVTYLGYSLRDGQRWLTEARKKTVVQIPAPTTAKQVREFLGTAGFCRLWIPGFATLAAPLYPLTKEKGEFSWAPEHQKAFDAIKKALLSAPALALPDVTKPFTLYVDERKGVARGVLTQTLGPWRRPVAYLSKKLDPVASGWPVCLKAIAAVAILVKDADKLTLGQNITVIAPHALENIVRQPPDRWMTNARMTHYQSLLLTERVTFAPPAALNPATLLPEETDEPVTHDCHQLLIEETGVRKDLTDIPLTGEVLTWFTDGSSYVVEGKRMAGAAVVDGTRTIWASSLPEGTSAQKAELMALTQALRLAEGKSINIYTDSRYAFATAHVHGAIYKQRGLLTSAGREIKNKEEILSLLEALHLPKRLAIIHCPGHQKAKDPISRGNQMADRVAKQAAQGVNLLAGKRTADGSEFEKRTADGSEFESPKKKAKVE

SEQ ID NO: 7188 - protein, 2085 aa, synthetic construct
MPAAKRVKLDGGDKKYSIGLDIGTNSVGWAVITDEYKVPSKKFKVLGNTDRHSIKKNLIGALLFDSGETAEATRLKRTARRRYTRRKNRICYLQEIFSNEMAKVDDSFFHRLEESFLVEEDKKHERHPIFGNIVDEVAYHEKYPTIYHLRKKLVDSTDKADLRLIYLALAHMIKFRGHFLIEGDLNPDNSDVDKLFIQLVQTYNQLFEENPINASGVDAKAILSARLSKSRRLENLIAQLPGEKKNGLFGNLIALSLGLTPNFKSNFDLAEDAKLQLSKDTYDDDLDNLLAQIGDQYADLFLAAKNLSDAILLSDILRVNTEITKAPLSASMIKRYDEHHQDLTLLKALVRQQLPEKYKEIFFDQSKNGYAGYIDGGASQEEFYKFIKPILEKMDGTEELLVKLNREDLLRKQRTFDNGSIPHQIHLGELHAILRRQEDFYPFLKDNREKIEKILTFRIPYYVGPLARGNSRFAWMTRKSEETITPWNFEEVVDKGASAQSFIERMTNFDKNLPNEKVLPKHSLLYEYFTVYNELTKVKYVTEGMRKPAFLSGEQKKAIVDLLFKTNRKVTVKQLKEDYFKKIECFDSVEISGVEDRFNASLGTYHDLLKIIKDKDFLDNEENEDILEDIVLTLTLFEDREMIEERLKTYAHLFDDKVMKQLKRRRYTGWGRLSRKLINGIRDKQSGKTILDFLKSDGFANRNFMQLIHDDSLTFKEDIQKAQVSGQGDSLHEHIANLAGSPAIKKGILQTVKVVDELVKVMGRHKPENIVIEMARENQTTQKGQKNSRERMKRIEEGIKELGSQILKEHPVENTQLQNEKLYLYYLQNGRDMYVDQELDINRLSDYDVDHIVPQSFLKDDSIDNKVLTRSDKARGKSDNVPSEEVVKKMKNYWRQLLNAKLITQRKFDNLTKAERGGLSELDKAGFIKRQLVETRQITKHVAQILDSRMNTKYDENDKLIREVKVITLKSKLVSDFRKDFQFYKVREINNYHHAHDAYLNAVVGTALIKKYPKLESEFVYGDYKVYDVRKMIAKSEQEIGKATAKYFFYSNIMNFFKTEITLANGEIRKRPLIETNGETGEIVWDKGRDFATVRKVLSMPQVNIVKKTEVQTGGFSKESILPKRNSDKLIARKKDWDPKKYGGFDSPTVAYSVLVVAKVEKGKSKKLKSVKELLGITIMERSSFEKNPIDFLEAKGYKEVKKDLIIKLPKYSLFELENGRKRMLASAGELQKGNELALPSKYVNFLYLASHYEKLKGSPEDNEQKQLFVEQHKHYLDEIIEQISEFSKRVILADANLDKVLSAYNKHRDKPIREQAENIIHLFTLTNLGAPAAFKYFDTTIDRKRYTSTKEVLDATLIHQSITGLYETRIDLSQLGGDGGPAPGSSGGSGGIPWLMKKPLQLTTLVPLQEYEERLLKQTMLTGSYKEKLQSLFLKYDALWQHWENQVGHRRIKPHHIATGTVNPRPQKQYPINPKAKASIQTVINDLLKQGVLIQQNSIMNTPVYPVPKPDGKWRMVLDYREVNKTIPLIAAQNQHSAGILSSIFRGKYKTTLDLSNGFWAHSITPESYWLTAFTWLGQQYCWTRLPQGFLNSPALFNADVVDLLKEVPNVQVYVDDIYISHDDPREHLEQLEKVFSLLLNAGYVVSLKKSEIAQHEVEFLGFNITKEGRGLTETFKQKLLNITPPRDLKQLQSILGKLNFARNFIPNFSELVKPLYNIIATAPGKYITWTTDNSQQLQNIISMLNSAENLEERNPEVRLIMKVNTSPSAGYIRFYNEFAKRPIMYLNYVYTKAEVKFTNTEKLLTTIHKGLIKALDLGMGQEILVYSPIVSMTKIQKTPLPERKALPIRWITWMSYLEDPRIQFHYDKTLPELQQVPTVTDDIIAKIKHPSEFSMVFYTDGSAIKHPNVNKSHNAGMGIAQVQFKPEFTVINTWSIPLGDHTAQLAEVAAVEFACKKALKIDGPVLIVTDSFYVAESVNKELPYWQSNGFFNNKKKPLKHVSKWKSIADCIQLKPDIIIIHEKGHQPTASTFHTEGNNLADKLATQGSYVVNAGKRTADGSEFEKRTADGSEFESPKKKAKVE

SEQ ID NO: 7189 - protein, 2174 aa, synthetic construct
MPAAKRVKLDGGDKKYSIGLDIGTNSVGWAVITDEYKVPSKKFKVLGNTDRHSIKKNLIGALLFDSGETAEATRLKRTARRRYTRRKNRICYLQEIFSNEMAKVDDSFFHRLEESFLVEEDKKHERHPIFGNIVDEVAYHEKYPTIYHLRKKLVDSTDKADLRLIYLALAHMIKFRGHFLIEGDLNPDNSDVDKLFIQLVQTYNQLFEENPINASGVDAKAILSARLSKSRRLENLIAQLPGEKKNGLFGNLIALSLGLTPNFKSNFDLAEDAKLQLSKDTYDDDLDNLLAQIGDQYADLFLAAKNLSDAILLSDILRVNTEITKAPLSASMIKRYDEHHQDLTLLKALVRQQLPEKYKEIFFDQSKNGYAGYIDGGASQEEFYKFIKPILEKMDGTEELLVKLNREDLLRKQRTFDNGSIPHQIHLGELHAILRRQEDFYPFLKDNREKIEKILTFRIPYYVGPLARGNSRFAWMTRKSEETITPWNFEEVVDKGASAQSFIERMTNFDKNLPNEKVLPKHSLLYEYFTVYNELTKVKYVTEGMRKPAFLSGEQKKAIVDLLFKTNRKVTVKQLKEDYFKKIECFDSVEISGVEDRFNASLGTYHDLLKIIKDKDFLDNEENEDILEDIVLTLTLFEDREMIEERLKTYAHLFDDKVMKQLKRRRYTGWGRLSRKLINGIRDKQSGKTILDFLKSDGFANRNFMQLIHDDSLTFKEDIQKAQVSGQGDSLHEHIANLAGSPAIKKGILQTVKVVDELVKVMGRHKPENIVIEMARENQTTQKGQKNSRERMKRIEEGIKELGSQILKEHPVENTQLQNEKLYLYYLQNGRDMYVDQELDINRLSDYDVDHIVPQSFLKDDSIDNKVLTRSDKARGKSDNVPSEEVVKKMKNYWRQLLNAKLITQRKFDNLTKAERGGLSELDKAGFIKRQLVETRQITKHVAQILDSRMNTKYDENDKLIREVKVITLKSKLVSDFRKDFQFYKVREINNYHHAHDAYLNAVVGTALIKKYPKLESEFVYGDYKVYDVRKMIAKSEQEIGKATAKYFFYSNIMNFFKTEITLANGEIRKRPLIETNGETGEIVWDKGRDFATVRKVLSMPQVNIVKKTEVQTGGFSKESILPKRNSDKLIARKKDWDPKKYGGFDSPTVAYSVLVVAKVEKGKSKKLKSVKELLGITIMERSSFEKNPIDFLEAKGYKEVKKDLIIKLPKYSLFELENGRKRMLASAGELQKGNELALPSKYVNFLYLASHYEKLKGSPEDNEQKQLFVEQHKHYLDEIIEQISEFSKRVILADANLDKVLSAYNKHRDKPIREQAENIIHLFTLTNLGAPAAFKYFDTTIDRKRYTSTKEVLDATLIHQSITGLYETRIDLSQLGGDGGPAPGSSGGSGGMDPLQLLQPLEAEIKGTKLKAHWNSGATITCVPQAFLEEEVPIKNIWIKTIHGEKEQPVYYLTFKIQGRKVEAEVISSPYDYILVSPSDIPWLMKKPLQLTTLVPLQEYEERLLKQTMLTGSYKEKLQSLFLKYDALWQHWENQVGHRRIKPHHIATGTVNPRPQKQYPINPKAKASIQTVINDLLKQGVLIQQNSIMNTPVYPVPKPDGKWRMVLDYREVNKTIPLIAAQNQHSAGILSSIFRGKYKTTLDLSNGFWAHSITPESYWLTAFTWLGQQYCWTRLPQGFLNSPALFNADVVDLLKEVPNVQVYVDDIYISHDDPREHLEQLEKVFSLLLNAGYVVSLKKSEIAQHEVEFLGFNITKEGRGLTETFKQKLLNITPPRDLKQLQSILGLLNFARNFIPNFSELVKPLYNIIATAPGKYITWTTDNSQQLQNIISMLNSAENLEERNPEVRLIMKVNTSPSAGYIRFYNEFAKRPIMYLNYVYTKAEVKFTNTEKLLTTIHKGLIKALDLGMGQEILVYSPIVSMTKIQKTPLPERKALPIRWITWMSYLEDPRIQFHYDKTLPELQQVPTVTDDIIAKIKHPSEFSMVFYTDGSAIKHPNVNKSHNAGMGIAQVQFKPEFTVINTWSIPLGDHTAQLAEVAAVEFACKKALKIDGPVLIVTDSFYVAESVNKELPYWQSNGFFNNKKKPLKHVSKWKSIADCIQLKPDIIIIHEKGHQPTASTFHTEGNNLADKLATQGSYVVNAGKRTADGSEFEKRTADGSEFESPKKKAKVE

SEQ ID NO: 7190 - protein, 2174 aa, synthetic construct
MPAAKRVKLDGGDKKYSIGLDIGTNSVGWAVITDEYKVPSKKFKVLGNTDRHSIKKNLIGALLFDSGETAEATRLKRTARRRYTRRKNRICYLQEIFSNEMAKVDDSFFHRLEESFLVEEDKKHERHPIFGNIVDEVAYHEKYPTIYHLRKKLVDSTDKADLRLIYLALAHMIKFRGHFLIEGDLNPDNSDVDKLFIQLVQTYNQLFEENPINASGVDAKAILSARLSKSRRLENLIAQLPGEKKNGLFGNLIALSLGLTPNFKSNFDLAEDAKLQLSKDTYDDDLDNLLAQIGDQYADLFLAAKNLSDAILLSDILRVNTEITKAPLSASMIKRYDEHHQDLTLLKALVRQQLPEKYKEIFFDQSKNGYAGYIDGGASQEEFYKFIKPILEKMDGTEELLVKLNREDLLRKQRTFDNGSIPHQIHLGELHAILRRQEDFYPFLKDNREKIEKILTFRIPYYVGPLARGNSRFAWMTRKSEETITPWNFEEVVDKGASAQSFIERMTNFDKNLPNEKVLPKHSLLYEYFTVYNELTKVKYVTEGMRKPAFLSGEQKKAIVDLLFKTNRKVTVKQLKEDYFKKIECFDSVEISGVEDRFNASLGTYHDLLKIIKDKDFLDNEENEDILEDIVLTLTLFEDREMIEERLKTYAHLFDDKVMKQLKRRRYTGWGRLSRKLINGIRDKQSGKTILDFLKSDGFANRNFMQLIHDDSLTFKEDIQKAQVSGQGDSLHEHIANLAGSPAIKKGILQTVKVVDELVKVMGRHKPENIVIEMARENQTTQKGQKNSRERMKRIEEGIKELGSQILKEHPVENTQLQNEKLYLYYLQNGRDMYVDQELDINRLSDYDVDHIVPQSFLKDDSIDNKVLTRSDKARGKSDNVPSEEVVKKMKNYWRQLLNAKLITQRKFDNLTKAERGGLSELDKAGFIKRQLVETRQITKHVAQILDSRMNTKYDENDKLIREVKVITLKSKLVSDFRKDFQFYKVREINNYHHAHDAYLNAVVGTALIKKYPKLESEFVYGDYKVYDVRKMIAKSEQEIGKATAKYFFYSNIMNFFKTEITLANGEIRKRPLIETNGETGEIVWDKGRDFATVRKVLSMPQVNIVKKTEVQTGGFSKESILPKRNSDKLIARKKDWDPKKYGGFDSPTVAYSVLVVAKVEKGKSKKLKSVKELLGITIMERSSFEKNPIDFLEAKGYKEVKKDLIIKLPKYSLFELENGRKRMLASAGELQKGNELALPSKYVNFLYLASHYEKLKGSPEDNEQKQLFVEQHKHYLDEIIEQISEFSKRVILADANLDKVLSAYNKHRDKPIREQAENIIHLFTLTNLGAPAAFKYFDTTIDRKRYTSTKEVLDATLIHQSITGLYETRIDLSQLGGDGGPAPGSSGGSGGMNPLQLLQPLPAEVKGTKLLAHWNSGATITCIPESFLEDEQPIKQTLIKTIHGEKQQNVYYLTFKVKGRKVEAEVIASPYEYILLSPTDVPWLTQQPLQLTILVPLQEYQDRILNKTALPEEQKQQLKALFTKYDNLWQHWENQVGHRKIRPHNIATGDYPPRPQKQYPINPKAKPSIQIVIDDLLKQGVLTPQNSTMNTPVYPVPKPDGRWRMVLDYREVNKTIPLTAAQNQHSAGILATIVRQKYKTTLDLANGFWAHPITPDSYWLTAFTWQGKQYCWTRLPQGFLNSPALFTADAVDLLKEVPNVQVYVDDIYLSHDNPHEHIQQLEKVFQILLQAGYVVSLKKSEIGQRTVEFLGFNITKEGRGLTDTFKTKLLNVTPPKDLKQLQSILGLLNFARNFIPNFAELVQTLYNLIASSKGKYIEWTEDNTKQLNKVIEALNTASNLEERLPDQRLVIKVNTSPSAGYVRYYNESGKKPIMYLNYVFSKAELKFSMLEKLLTTMHKALIKAMDLAMGQEILVYSPIVSMTKIQKTPLPERKALPIRWITWMTYLEDPRIQFHYDKTLPELKHIPDVYTSSIPPLKHPSQYEGVFCTDGSAIKSPDPTKSNNAGMGIVHAIYNPEYKILNQWSIPLGHHTAQMAEIAAVEFACKKALKVPGPVLVITDSFYVAESANKELPYWKSNGFVNNKKEPLKHISKWKSIAECLSIKPDITIQHEKGHQPINTSIHTEGNALADKLATQGSYVVNAGKRTADGSEFEKRTADGSEFESPKKKAKVE

SEQ ID NO: 7191 - protein, 2092 aa, synthetic construct
MPAAKRVKLDGGDKKYSIGLDIGTNSVGWAVITDEYKVPSKKFKVLGNTDRHSIKKNLIGALLFDSGETAEATRLKRTARRRYTRRKNRICYLQEIFSNEMAKVDDSFFHRLEESFLVEEDKKHERHPIFGNIVDEVAYHEKYPTIYHLRKKLVDSTDKADLRLIYLALAHMIKFRGHFLIEGDLNPDNSDVDKLFIQLVQTYNQLFEENPINASGVDAKAILSARLSKSRRLENLIAQLPGEKKNGLFGNLIALSLGLTPNFKSNFDLAEDAKLQLSKDTYDDDLDNLLAQIGDQYADLFLAAKNLSDAILLSDILRVNTEITKAPLSASMIKRYDEHHQDLTLLKALVRQQLPEKYKEIFFDQSKNGYAGYIDGGASQEEFYKFIKPILEKMDGTEELLVKLNREDLLRKQRTFDNGSIPHQIHLGELHAILRRQEDFYPFLKDNREKIEKILTFRIPYYVGPLARGNSRFAWMTRKSEETITPWNFEEVVDKGASAQSFIERMTNFDKNLPNEKVLPKHSLLYEYFTVYNELTKVKYVTEGMRKPAFLSGEQKKAIVDLLFKTNRKVTVKQLKEDYFKKIECFDSVEISGVEDRFNASLGTYHDLLKIIKDKDFLDNEENEDILEDIVLTLTLFEDREMIEERLKTYAHLFDDKVMKQLKRRRYTGWGRLSRKLINGIRDKQSGKTILDFLKSDGFANRNFMQLIHDDSLTFKEDIQKAQVSGQGDSLHEHIANLAGSPAIKKGILQTVKVVDELVKVMGRHKPENIVIEMARENQTTQKGQKNSRERMKRIEEGIKELGSQILKEHPVENTQLQNEKLYLYYLQNGRDMYVDQELDINRLSDYDVDHIVPQSFLKDDSIDNKVLTRSDKARGKSDNVPSEEVVKKMKNYWRQLLNAKLITQRKFDNLTKAERGGLSELDKAGFIKRQLVETRQITKHVAQILDSRMNTKYDENDKLIREVKVITLKSKLVSDFRKDFQFYKVREINNYHHAHDAYLNAVVGTALIKKYPKLESEFVYGDYKVYDVRKMIAKSEQEIGKATAKYFFYSNIMNFFKTEITLANGEIRKRPLIETNGETGEIVWDKGRDFATVRKVLSMPQVNIVKKTEVQTGGFSKESILPKRNSDKLIARKKDWDPKKYGGFDSPTVAYSVLVVAKVEKGKSKKLKSVKELLGITIMERSSFEKNPIDFLEAKGYKEVKKDLIIKLPKYSLFELENGRKRMLASAGELQKGNELALPSKYVNFLYLASHYEKLKGSPEDNEQKQLFVEQHKHYLDEIIEQISEFSKRVILADANLDKVLSAYNKHRDKPIREQAENIIHLFTLTNLGAPAAFKYFDTTIDRKRYTSTKEVLDATLIHQSITGLYETRIDLSQLGGDGGPAPGSSGGSGGVLNLEEEYRLHEKPVPSSIDPSWLQLFPTVWAERAGMGLANQVPPVVVELRSGASPVAVRQYPMSKEAREGIRPHIQRFLDLGVLVPCQSPWNTPLLPVKKPGTNDYRPVQDLREINKRVQDIHPTVPNPYNLLSSLPPSHTWYSVLDLKDAFFCLKLHPNSQPLFAFEWRDPEKGNTGQLTWTRLPQGFKNSPTLFNEALHRDLAPFRALNPQVVLLQYVDDLLVAAPTYRDCKEGTQKLLQELSKLGYRVSAKKAQLCQKEVTYLGYLLKEGKRWLTPARKATVMKIPPPTTPRQVREFLGTAGFCRLWIPGFASLAAPLYPLTKPSIPFIWTEEHQKAFDRIKEALLSAPALALPDLTKPFTLYVDERAGVARGVLTQTLGPWRRPVAYLSKKLDPVASGWPTCLKAVAAVALLLKDADKLTLGQNVTVIASHSLESIVRQPPDRWMTNARMTHYQSLLLNERVSFAPPAVLNPATLLPVESEATPVHRCSEILAEETGTRRDLKDQPLPGVPAWYTDGSSFIAEGKRRAGAAIVDGKRTVWASSLPEGTSAQKAELVALTQALRLAEGKDINIYTDSRYAFATAHIHGAIYKQRGWLTSAGKDIKNKEEILALLEAIHLPKRVAIIHCPGHQKGNDPVATGNRRADEAAKQAALSTRVLAETTKPAGKRTADGSEFEKRTADGSEFESPKKKAKVE

SEQ ID NO: 7192 - protein, 2092 aa, synthetic construct
MPAAKRVKLDGGDKKYSIGLDIGTNSVGWAVITDEYKVPSKKFKVLGNTDRHSIKKNLIGALLFDSGETAEATRLKRTARRRYTRRKNRICYLQEIFSNEMAKVDDSFFHRLEESFLVEEDKKHERHPIFGNIVDEVAYHEKYPTIYHLRKKLVDSTDKADLRLIYLALAHMIKFRGHFLIEGDLNPDNSDVDKLFIQLVQTYNQLFEENPINASGVDAKAILSARLSKSRRLENLIAQLPGEKKNGLFGNLIALSLGLTPNFKSNFDLAEDAKLQLSKDTYDDDLDNLLAQIGDQYADLFLAAKNLSDAILLSDILRVNTEITKAPLSASMIKRYDEHHQDLTLLKALVRQQLPEKYKEIFFDQSKNGYAGYIDGGASQEEFYKFIKPILEKMDGTEELLVKLNREDLLRKQRTFDNGSIPHQIHLGELHAILRRQEDFYPFLKDNREKIEKILTFRIPYYVGPLARGNSRFAWMTRKSEETITPWNFEEVVDKGASAQSFIERMTNFDKNLPNEKVLPKHSLLYEYFTVYNELTKVKYVTEGMRKPAFLSGEQKKAIVDLLFKTNRKVTVKQLKEDYFKKIECFDSVEISGVEDRFNASLGTYHDLLKIIKDKDFLDNEENEDILEDIVLTLTLFEDREMIEERLKTYAHLFDDKVMKQLKRRRYTGWGRLSRKLINGIRDKQSGKTILDFLKSDGFANRNFMQLIHDDSLTFKEDIQKAQVSGQGDSLHEHIANLAGSPAIKKGILQTVKVVDELVKVMGRHKPENIVIEMARENQTTQKGQKNSRERMKRIEEGIKELGSQILKEHPVENTQLQNEKLYLYYLQNGRDMYVDQELDINRLSDYDVDHIVPQSFLKDDSIDNKVLTRSDKARGKSDNVPSEEVVKKMKNYWRQLLNAKLITQRKFDNLTKAERGGLSELDKAGFIKRQLVETRQITKHVAQILDSRMNTKYDENDKLIREVKVITLKSKLVSDFRKDFQFYKVREINNYHHAHDAYLNAVVGTALIKKYPKLESEFVYGDYKVYDVRKMIAKSEQEIGKATAKYFFYSNIMNFFKTEITLANGEIRKRPLIETNGETGEIVWDKGRDFATVRKVLSMPQVNIVKKTEVQTGGFSKESILPKRNSDKLIARKKDWDPKKYGGFDSPTVAYSVLVVAKVEKGKSKKLKSVKELLGITIMERSSFEKNPIDFLEAKGYKEVKKDLIIKLPKYSLFELENGRKRMLASAGELQKGNELALPSKYVNFLYLASHYEKLKGSPEDNEQKQLFVEQHKHYLDEIIEQISEFSKRVILADANLDKVLSAYNKHRDKPIREQAENIIHLFTLTNLGAPAAFKYFDTTIDRKRYTSTKEVLDATLIHQSITGLYETRIDLSQLGGDGGPAPGSSGGSGGVLNLEEEYRLHEKPVPSSIDPSWLQLFPTVWAERAGMGLANQVPPVVVELRSGASPVAVRQYPMSKEAREGIRPHIQRFLDLGVLVPCQSPWNTPLLPVKKPGTNDYRPVQDLREINKRVQDIHPTVPNPYNLLSSLPPSHTWYSVLDLKDAFFCLKLHPNSQPLFAFEWRDPEKGNTGQLTWTRLPQGFKNSPTLFNEALHRDLAPFRALNPQVVLLQYVDDLLVAAPTYRDCKEGTQKLLQELSKLGYRVSAKKAQLCQKEVTYLGYLLKEGKRWLTPARKATVMKIPPPTTPRQVREFLGKAGFCRLFIPGFASLAAPLYPLTKPSIPFIWTEEHQKAFDRIKEALLSAPALALPDLTKPFTLYVDERAGVARGVLTQTLGPWRRPVAYLSKKLDPVASGWPTCLKAVAAVALLLKDADKLTLGQNVTVIASHSLESIVRQPPDRWMTNARMTHYQSLLLNERVSFAPPAVLNPATLLPVESEATPVHRCSEILAEETGTRRDLKDQPLPGVPAWYTDGSSFIAEGKRRAGAAIVDGKRTVWASSLPEGTSAQKAELVALTQALRLAEGKDINIYTDSRYAFATAHIHGAIYKQRGWLTSAGKDIKNKEEILALLEAIHLPKRVAIIHCPGHQKGNDPVATGNRRADEAAKQAALSTRVLAETTKPAGKRTADGSEFEKRTADGSEFESPKKKAKVE

SEQ ID NO: 7193 - protein, 2095 aa, synthetic construct
MPAAKRVKLDGGDKKYSIGLDIGTNSVGWAVITDEYKVPSKKFKVLGNTDRHSIKKNLIGALLFDSGETAEATRLKRTARRRYTRRKNRICYLQEIFSNEMAKVDDSFFHRLEESFLVEEDKKHERHPIFGNIVDEVAYHEKYPTIYHLRKKLVDSTDKADLRLIYLALAHMIKFRGHFLIEGDLNPDNSDVDKLFIQLVQTYNQLFEENPINASGVDAKAILSARLSKSRRLENLIAQLPGEKKNGLFGNLIALSLGLTPNFKSNFDLAEDAKLQLSKDTYDDDLDNLLAQIGDQYADLFLAAKNLSDAILLSDILRVNTEITKAPLSASMIKRYDEHHQDLTLLKALVRQQLPEKYKEIFFDQSKNGYAGYIDGGASQEEFYKFIKPILEKMDGTEELLVKLNREDLLRKQRTFDNGSIPHQIHLGELHAILRRQEDFYPFLKDNREKIEKILTFRIPYYVGPLARGNSRFAWMTRKSEETITPWNFEEVVDKGASAQSFIERMTNFDKNLPNEKVLPKHSLLYEYFTVYNELTKVKYVTEGMRKPAFLSGEQKKAIVDLLFKTNRKVTVKQLKEDYFKKIECFDSVEISGVEDRFNASLGTYHDLLKIIKDKDFLDNEENEDILEDIVLTLTLFEDREMIEERLKTYAHLFDDKVMKQLKRRRYTGWGRLSRKLINGIRDKQSGKTILDFLKSDGFANRNFMQLIHDDSLTFKEDIQKAQVSGQGDSLHEHIANLAGSPAIKKGILQTVKVVDELVKVMGRHKPENIVIEMARENQTTQKGQKNSRERMKRIEEGIKELGSQILKEHPVENTQLQNEKLYLYYLQNGRDMYVDQELDINRLSDYDVDHIVPQSFLKDDSIDNKVLTRSDKARGKSDNVPSEEVVKKMKNYWRQLLNAKLITQRKFDNLTKAERGGLSELDKAGFIKRQLVETRQITKHVAQILDSRMNTKYDENDKLIREVKVITLKSKLVSDFRKDFQFYKVREINNYHHAHDAYLNAVVGTALIKKYPKLESEFVYGDYKVYDVRKMIAKSEQEIGKATAKYFFYSNIMNFFKTEITLANGEIRKRPLIETNGETGEIVWDKGRDFATVRKVLSMPQVNIVKKTEVQTGGFSKESILPKRNSDKLIARKKDWDPKKYGGFDSPTVAYSVLVVAKVEKGKSKKLKSVKELLGITIMERSSFEKNPIDFLEAKGYKEVKKDLIIKLPKYSLFELENGRKRMLASAGELQKGNELALPSKYVNFLYLASHYEKLKGSPEDNEQKQLFVEQHKHYLDEIIEQISEFSKRVILADANLDKVLSAYNKHRDKPIREQAENIIHLFTLTNLGAPAAFKYFDTTIDRKRYTSTKEVLDATLIHQSITGLYETRIDLSQLGGDGGGGSEAAAKPAPGGTLQLEEEYRLFEPESTQKQEMDIWLKNFPQAWAETGGMGTAHCQAPVLIQLKATATPISIRQYPMPHEAYQGIKPHIRRMLDQGILKPCQSPWNTPLLPVKKPGTEDYRPVQDLREVNKRVEDIHPTVPNPYNLLSTLPPSHPWYTVLDLKDAFFCLRLHSESQLLFAFEWRDPEIGLSGQLTWTRLPQGFKNSPTLFNEALHSDLADFRVRYPALVLLQYVDDLLLAAATRTECLEGTKALLETLGNKGYRASAKKAQICLQEVTYLGYSLKDGQRWLTKARKEAILSIPVPKNSRQVREFLGTAGYCRLWIPGFAELAAPLYPLTRPGTLFQWGTEQQLAFEDIKKALLSSPALGLPDITKPFELFIDENSGFAKGVLVQKLGPWKRPVAYLSKKLDTVASGWPPCLRMVAAIAILVKDAGKLTLGQPLTILTSHPVEALVRQPPNKWLSNARMTHYQAMLLDAERVHFGPTVSLNPATLLPLPSGGNHHDCLQILAETHGTRPDLTDQPLPDADLTWYTDGSSFIRNGEREAGAAVTTESEVIWAAPLPPGTSAQRAELIALTQALKMAEGKKLTVYTDSRYAFATTHVHGEIYRRRGWLTSEGKEIKNKNEILALLEALFLPKRLSIIHCPGHQKGDSPQAKGNRLADDTAKKAATETHSSLTVLPAGKRTADGSEFEKRTADGSEFESPKKKAKVE

SEQ ID NO: 7194 - protein, 2095 aa, synthetic construct
MPAAKRVKLDGGDKKYSIGLDIGTNSVGWAVITDEYKVPSKKFKVLGNTDRHSIKKNLIGALLFDSGETAEATRLKRTARRRYTRRKNRICYLQEIFSNEMAKVDDSFFHRLEESFLVEEDKKHERHPIFGNIVDEVAYHEKYPTIYHLRKKLVDSTDKADLRLIYLALAHMIKFRGHFLIEGDLNPDNSDVDKLFIQLVQTYNQLFEENPINASGVDAKAILSARLSKSRRLENLIAQLPGEKKNGLFGNLIALSLGLTPNFKSNFDLAEDAKLQLSKDTYDDDLDNLLAQIGDQYADLFLAAKNLSDAILLSDILRVNTEITKAPLSASMIKRYDEHHQDLTLLKALVRQQLPEKYKEIFFDQSKNGYAGYIDGGASQEEFYKFIKPILEKMDGTEELLVKLNREDLLRKQRTFDNGSIPHQIHLGELHAILRRQEDFYPFLKDNREKIEKILTFRIPYYVGPLARGNSRFAWMTRKSEETITPWNFEEVVDKGASAQSFIERMTNFDKNLPNEKVLPKHSLLYEYFTVYNELTKVKYVTEGMRKPAFLSGEQKKAIVDLLFKTNRKVTVKQLKEDYFKKIECFDSVEISGVEDRFNASLGTYHDLLKIIKDKDFLDNEENEDILEDIVLTLTLFEDREMIEERLKTYAHLFDDKVMKQLKRRRYTGWGRLSRKLINGIRDKQSGKTILDFLKSDGFANRNFMQLIHDDSLTFKEDIQKAQVSGQGDSLHEHIANLAGSPAIKKGILQTVKVVDELVKVMGRHKPENIVIEMARENQTTQKGQKNSRERMKRIEEGIKELGSQILKEHPVENTQLQNEKLYLYYLQNGRDMYVDQELDINRLSDYDVDHIVPQSFLKDDSIDNKVLTRSDKARGKSDNVPSEEVVKKMKNYWRQLLNAKLITQRKFDNLTKAERGGLSELDKAGFIKRQLVETRQITKHVAQILDSRMNTKYDENDKLIREVKVITLKSKLVSDFRKDFQFYKVREINNYHHAHDAYLNAVVGTALIKKYPKLESEFVYGDYKVYDVRKMIAKSEQEIGKATAKYFFYSNIMNFFKTEITLANGEIRKRPLIETNGETGEIVWDKGRDFATVRKVLSMPQVNIVKKTEVQTGGFSKESILPKRNSDKLIARKKDWDPKKYGGFDSPTVAYSVLVVAKVEKGKSKKLKSVKELLGITIMERSSFEKNPIDFLEAKGYKEVKKDLIIKLPKYSLFELENGRKRMLASAGELQKGNELALPSKYVNFLYLASHYEKLKGSPEDNEQKQLFVEQHKHYLDEIIEQISEFSKRVILADANLDKVLSAYNKHRDKPIREQAENIIHLFTLTNLGAPAAFKYFDTTIDRKRYTSTKEVLDATLIHQSITGLYETRIDLSQLGGDGGGGSEAAAKPAPGGTLQLEEEYRLFEPESTQKQEMDIWLKNFPQAWAETGGMGTAHCQAPVLIQLKATATPISIRQYPMPHEAYQGIKPHIRRMLDQGILKPCQSPWNTPLLPVKKPGTEDYRPVQDLREVNKRVEDIHPTVPNPYNLLSTLPPSHPWYTVLDLKDAFFCLRLHSESQLLFAFEWRDPEIGLSGQLTWTRLPQGFKNSPTLFNEALHSDLADFRVRYPALVLLQYVDDLLLAAATRTECLEGTKALLETLGNKGYRASAKKAQICLQEVTYLGYSLKDGQRWLTKARKEAILSIPVPKNSRQVREFLGKAGYCRLFIPGFAELAAPLYPLTRPGTLFQWGTEQQLAFEDIKKALLSSPALGLPDITKPFELFIDENSGFAKGVLVQKLGPWKRPVAYLSKKLDTVASGWPPCLRMVAAIAILVKDAGKLTLGQPLTILTSHPVEALVRQPPNKWLSNARMTHYQAMLLDAERVHFGPTVSLNPATLLPLPSGGNHHDCLQILAETHGTRPDLTDQPLPDADLTWYTDGSSFIRNGEREAGAAVTTESEVIWAAPLPPGTSAQRAELIALTQALKMAEGKKLTVYTDSRYAFATTHVHGEIYRRRGWLTSEGKEIKNKNEILALLEALFLPKRLSIIHCPGHQKGDSPQAKGNRLADDTAKKAATETHSSLTVLPAGKRTADGSEFEKRTADGSEFESPKKKAKVE

SEQ ID NO: 7195 - protein, 2176 aa, synthetic construct
MPAAKRVKLDGGDKKYSIGLDIGTNSVGWAVITDEYKVPSKKFKVLGNTDRHSIKKNLIGALLFDSGETAEATRLKRTARRRYTRRKNRICYLQEIFSNEMAKVDDSFFHRLEESFLVEEDKKHERHPIFGNIVDEVAYHEKYPTIYHLRKKLVDSTDKADLRLIYLALAHMIKFRGHFLIEGDLNPDNSDVDKLFIQLVQTYNQLFEENPINASGVDAKAILSARLSKSRRLENLIAQLPGEKKNGLFGNLIALSLGLTPNFKSNFDLAEDAKLQLSKDTYDDDLDNLLAQIGDQYADLFLAAKNLSDAILLSDILRVNTEITKAPLSASMIKRYDEHHQDLTLLKALVRQQLPEKYKEIFFDQSKNGYAGYIDGGASQEEFYKFIKPILEKMDGTEELLVKLNREDLLRKQRTFDNGSIPHQIHLGELHAILRRQEDFYPFLKDNREKIEKILTFRIPYYVGPLARGNSRFAWMTRKSEETITPWNFEEVVDKGASAQSFIERMTNFDKNLPNEKVLPKHSLLYEYFTVYNELTKVKYVTEGMRKPAFLSGEQKKAIVDLLFKTNRKVTVKQLKEDYFKKIECFDSVEISGVEDRFNASLGTYHDLLKIIKDKDFLDNEENEDILEDIVLTLTLFEDREMIEERLKTYAHLFDDKVMKQLKRRRYTGWGRLSRKLINGIRDKQSGKTILDFLKSDGFANRNFMQLIHDDSLTFKEDIQKAQVSGQGDSLHEHIANLAGSPAIKKGILQTVKVVDELVKVMGRHKPENIVIEMARENQTTQKGQKNSRERMKRIEEGIKELGSQILKEHPVENTQLQNEKLYLYYLQNGRDMYVDQELDINRLSDYDVDHIVPQSFLKDDSIDNKVLTRSDKARGKSDNVPSEEVVKKMKNYWRQLLNAKLITQRKFDNLTKAERGGLSELDKAGFIKRQLVETRQITKHVAQILDSRMNTKYDENDKLIREVKVITLKSKLVSDFRKDFQFYKVREINNYHHAHDAYLNAVVGTALIKKYPKLESEFVYGDYKVYDVRKMIAKSEQEIGKATAKYFFYSNIMNFFKTEITLANGEIRKRPLIETNGETGEIVWDKGRDFATVRKVLSMPQVNIVKKTEVQTGGFSKESILPKRNSDKLIARKKDWDPKKYGGFDSPTVAYSVLVVAKVEKGKSKKLKSVKELLGITIMERSSFEKNPIDFLEAKGYKEVKKDLIIKLPKYSLFELENGRKRMLASAGELQKGNELALPSKYVNFLYLASHYEKLKGSPEDNEQKQLFVEQHKHYLDEIIEQISEFSKRVILADANLDKVLSAYNKHRDKPIREQAENIIHLFTLTNLGAPAAFKYFDTTIDRKRYTSTKEVLDATLIHQSITGLYETRIDLSQLGGDGGGGSEAAAKPAPGGMNPLQLLQPLPAEIKGTKLLAHWNSGATITCIPESFLEDEQPIKKTLIKTIHGEKQQNVYYVTFKVKGRKVEAEVIASPYEYILLSPTDVPWLTQQPLQLTILVPLQEYQEKILSKTALPEDQKQQLKTLFVKYDNLWQHWENQVGHRKIRPHNIATGDYPPRPQKQYPINPKAKPSIQIVIDDLLKQGVLTPQNSTMNTPVYPVPKPDGRWRMVLDYREVNKTIPLTAAQNQHSAGILATIVRQKYKTTLDLANGFWAHPITPESYWLTAFTWQGKQYCWTRLPQGFLNSPALFNADVVDLLKEIPNVQVYVDDIYLSHDDPKEHVQQLEKVFQILLQAGYVVSLKKSEIGQKTVEFLGFNITKEGRGLTDTFKTKLLNITPPKDLKQLQSILGKLNFARNFIPNFAELVQPLYNLIAPAKGKYIEWSEENTKQLNMVIEALNTASNLEERLPEQRLVIKVNTSPSAGYVRYYNETGKKPIMYLNYVFSKAELKFSMLEKLLTTMHKALIKAMDLAMGQEILVYSPIVSMTKIQKTPLPERKALPIRWITWMTYLEDPRIQFHYDKTLPELKHIPDVYTSSQSPVKHPSQYEGVFYTDGSAIKSPDPTKSNNAGMGIVHATYKPEYQVLNQWSIPLGNHTAQMAEIAAVEFACKKALKIPGPVLVITDSFYVAESANKELPYWKSNGFVNNKKKPLKHISKWKSIAECLSMKPDITIQHEKGISLQIPVFILKGNALADKLATQGSYVVNAGKRTADGSEFEKRTADGSEFESPKKKAKVE

SEQ ID NO: 7196 - protein, 2218 aa, synthetic construct
MPAAKRVKLDGGDKKYSIGLDIGTNSVGWAVITDEYKVPSKKFKVLGNTDRHSIKKNLIGALLFDSGETAEATRLKRTARRRYTRRKNRICYLQEIFSNEMAKVDDSFFHRLEESFLVEEDKKHERHPIFGNIVDEVAYHEKYPTIYHLRKKLVDSTDKADLRLIYLALAHMIKFRGHFLIEGDLNPDNSDVDKLFIQLVQTYNQLFEENPINASGVDAKAILSARLSKSRRLENLIAQLPGEKKNGLFGNLIALSLGLTPNFKSNFDLAEDAKLQLSKDTYDDDLDNLLAQIGDQYADLFLAAKNLSDAILLSDILRVNTEITKAPLSASMIKRYDEHHQDLTLLKALVRQQLPEKYKEIFFDQSKNGYAGYIDGGASQEEFYKFIKPILEKMDGTEELLVKLNREDLLRKQRTFDNGSIPHQIHLGELHAILRRQEDFYPFLKDNREKIEKILTFRIPYYVGPLARGNSRFAWMTRKSEETITPWNFEEVVDKGASAQSFIERMTNFDKNLPNEKVLPKHSLLYEYFTVYNELTKVKYVTEGMRKPAFLSGEQKKAIVDLLFKTNRKVTVKQLKEDYFKKIECFDSVEISGVEDRFNASLGTYHDLLKIIKDKDFLDNEENEDILEDIVLTLTLFEDREMIEERLKTYAHLFDDKVMKQLKRRRYTGWGRLSRKLINGIRDKQSGKTILDFLKSDGFANRNFMQLIHDDSLTFKEDIQKAQVSGQGDSLHEHIANLAGSPAIKKGILQTVKVVDELVKVMGRHKPENIVIEMARENQTTQKGQKNSRERMKRIEEGIKELGSQILKEHPVENTQLQNEKLYLYYLQNGRDMYVDQELDINRLSDYDVDHIVPQSFLKDDSIDNKVLTRSDKARGKSDNVPSEEVVKKMKNYWRQLLNAKLITQRKFDNLTKAERGGLSELDKAGFIKRQLVETRQITKHVAQILDSRMNTKYDENDKLIREVKVITLKSKLVSDFRKDFQFYKVREINNYHHAHDAYLNAVVGTALIKKYPKLESEFVYGDYKVYDVRKMIAKSEQEIGKATAKYFFYSNIMNFFKTEITLANGEIRKRPLIETNGETGEIVWDKGRDFATVRKVLSMPQVNIVKKTEVQTGGFSKESILPKRNSDKLIARKKDWDPKKYGGFDSPTVAYSVLVVAKVEKGKSKKLKSVKELLGITIMERSSFEKNPIDFLEAKGYKEVKKDLIIKLPKYSLFELENGRKRMLASAGELQKGNELALPSKYVNFLYLASHYEKLKGSPEDNEQKQLFVEQHKHYLDEIIEQISEFSKRVILADANLDKVLSAYNKHRDKPIREQAENIIHLFTLTNLGAPAAFKYFDTTIDRKRYTSTKEVLDATLIHQSITGLYETRIDLSQLGGDGGGGSEAAAKPAPGGTLGDQGSRGSDPLPEPRVTLTVEGIPTEFLVNTGAEHSVLTKPMGKMGSKRTVVAGATGSKVYPWTTKRLLKIGQKQVTHSFLVIPECPAPLLGRDLLTKLKAQIQFSTEGPQVTWEDRPAMCLVLNLEEEYRLHEKPVPPSIDPSWLQLFPMVWAEKAGMGLANQVPPVVVELKSDASPVAVRQYPMSKEAREGIRPHIQRFLDLGILVPCQSPWNTPLLPVKKPGTNDYRPVQDLREVNKRVQDIHPTVPNPYNLLSSLPPSHTWYSVLDLKDAFFCLKLHPNSQPLFAFEWRDPEKGNTGQLTWTRLPQGFKNSPTLFNEALHRDLASFRALNPQVVMLQYVDDLLVAAPTYRDCKEGTRRLLQELSKLGYRVSAKKAQLCREEVTYLGYLLKGGKRWLTPARKATVMKIPTPTTPRQVREFLGTAGFCRLWIPGFASLAAPLYPLTRPKVPFTWTEAHQEAFGRIKEALLSAPALALPDLTKPFALYVDEKEGVARGVLTQTLGPWRRPVAYLSKKLDPVASGWPTCLKAIAAVALLLKDADKLTLGQNVLVIAPHNLESIVRQPPDRWMTNARMTHYQSLLLNERVSFAPPAILNPATLLPVESDDTPIHICSEILAEETGTRPDLRDQPLPGVPAWYTDGSSFIMDGRRQAGAAIVDNKRTVWASNLPEGTSAQKAELIALTQALRLAEGKSINIYTDSRYAFATAHVHGAIYKQRGWLTSAGKDIKNKEEILALLEAIHLPKRVAIIHCPGHQRGTDPVATGNRKADEAAKQAAQSTRILTETTKNAGKRTADGSEFEKRTADGSEFESPKKKAKVE

SEQ ID NO: 7197 - protein, 2218 aa, synthetic construct
MPAAKRVKLDGGDKKYSIGLDIGTNSVGWAVITDEYKVPSKKFKVLGNTDRHSIKKNLIGALLFDSGETAEATRLKRTARRRYTRRKNRICYLQEIFSNEMAKVDDSFFHRLEESFLVEEDKKHERHPIFGNIVDEVAYHEKYPTIYHLRKKLVDSTDKADLRLIYLALAHMIKFRGHFLIEGDLNPDNSDVDKLFIQLVQTYNQLFEENPINASGVDAKAILSARLSKSRRLENLIAQLPGEKKNGLFGNLIALSLGLTPNFKSNFDLAEDAKLQLSKDTYDDDLDNLLAQIGDQYADLFLAAKNLSDAILLSDILRVNTEITKAPLSASMIKRYDEHHQDLTLLKALVRQQLPEKYKEIFFDQSKNGYAGYIDGGASQEEFYKFIKPILEKMDGTEELLVKLNREDLLRKQRTFDNGSIPHQIHLGELHAILRRQEDFYPFLKDNREKIEKILTFRIPYYVGPLARGNSRFAWMTRKSEETITPWNFEEVVDKGASAQSFIERMTNFDKNLPNEKVLPKHSLLYEYFTVYNELTKVKYVTEGMRKPAFLSGEQKKAIVDLLFKTNRKVTVKQLKEDYFKKIECFDSVEISGVEDRFNASLGTYHDLLKIIKDKDFLDNEENEDILEDIVLTLTLFEDREMIEERLKTYAHLFDDKVMKQLKRRRYTGWGRLSRKLINGIRDKQSGKTILDFLKSDGFANRNFMQLIHDDSLTFKEDIQKAQVSGQGDSLHEHIANLAGSPAIKKGILQTVKVVDELVKVMGRHKPENIVIEMARENQTTQKGQKNSRERMKRIEEGIKELGSQILKEHPVENTQLQNEKLYLYYLQNGRDMYVDQELDINRLSDYDVDHIVPQSFLKDDSIDNKVLTRSDKARGKSDNVPSEEVVKKMKNYWRQLLNAKLITQRKFDNLTKAERGGLSELDKAGFIKRQLVETRQITKHVAQILDSRMNTKYDENDKLIREVKVITLKSKLVSDFRKDFQFYKVREINNYHHAHDAYLNAVVGTALIKKYPKLESEFVYGDYKVYDVRKMIAKSEQEIGKATAKYFFYSNIMNFFKTEITLANGEIRKRPLIETNGETGEIVWDKGRDFATVRKVLSMPQVNIVKKTEVQTGGFSKESILPKRNSDKLIARKKDWDPKKYGGFDSPTVAYSVLVVAKVEKGKSKKLKSVKELLGITIMERSSFEKNPIDFLEAKGYKEVKKDLIIKLPKYSLFELENGRKRMLASAGELQKGNELALPSKYVNFLYLASHYEKLKGSPEDNEQKQLFVEQHKHYLDEIIEQISEFSKRVILADANLDKVLSAYNKHRDKPIREQAENIIHLFTLTNLGAPAAFKYFDTTIDRKRYTSTKEVLDATLIHQSITGLYETRIDLSQLGGDGGGGSEAAAKPAPGGTLGDQGSRGSDPLPEPRVTLTVEGIPTEFLVNTGAEHSVLTKPMGKMGSKRTVVAGATGSKVYPWTTKRLLKIGQKQVTHSFLVIPECPAPLLGRDLLTKLKAQIQFSTEGPQVTWEDRPAMCLVLNLEEEYRLHEKPVPPSIDPSWLQLFPMVWAEKAGMGLANQVPPVVVELKSDASPVAVRQYPMSKEAREGIRPHIQRFLDLGILVPCQSPWNTPLLPVKKPGTNDYRPVQDLREVNKRVQDIHPTVPNPYNLLSSLPPSHTWYSVLDLKDAFFCLKLHPNSQPLFAFEWRDPEKGNTGQLTWTRLPQGFKNSPTLFNEALHRDLASFRALNPQVVMLQYVDDLLVAAPTYRDCKEGTRRLLQELSKLGYRVSAKKAQLCREEVTYLGYLLKGGKRWLTPARKATVMKIPTPTTPRQVREFLGKAGFCRLFIPGFASLAAPLYPLTRPKVPFTWTEAHQEAFGRIKEALLSAPALALPDLTKPFALYVDEKEGVARGVLTQTLGPWRRPVAYLSKKLDPVASGWPTCLKAIAAVALLLKDADKLTLGQNVLVIAPHNLESIVRQPPDRWMTNARMTHYQSLLLNERVSFAPPAILNPATLLPVESDDTPIHICSEILAEETGTRPDLRDQPLPGVPAWYTDGSSFIMDGRRQAGAAIVDNKRTVWASNLPEGTSAQKAELIALTQALRLAEGKSINIYTDSRYAFATAHVHGAIYKQRGWLTSAGKDIKNKEEILALLEAIHLPKRVAIIHCPGHQRGTDPVATGNRKADEAAKQAAQSTRILTETTKNAGKRTADGSEFEKRTADGSEFESPKKKAKVE

SEQ ID NO: 7198 - protein, 2096 aa, synthetic construct
MPAAKRVKLDGGDKKYSIGLDIGTNSVGWAVITDEYKVPSKKFKVLGNTDRHSIKKNLIGALLFDSGETAEATRLKRTARRRYTRRKNRICYLQEIFSNEMAKVDDSFFHRLEESFLVEEDKKHERHPIFGNIVDEVAYHEKYPTIYHLRKKLVDSTDKADLRLIYLALAHMIKFRGHFLIEGDLNPDNSDVDKLFIQLVQTYNQLFEENPINASGVDAKAILSARLSKSRRLENLIAQLPGEKKNGLFGNLIALSLGLTPNFKSNFDLAEDAKLQLSKDTYDDDLDNLLAQIGDQYADLFLAAKNLSDAILLSDILRVNTEITKAPLSASMIKRYDEHHQDLTLLKALVRQQLPEKYKEIFFDQSKNGYAGYIDGGASQEEFYKFIKPILEKMDGTEELLVKLNREDLLRKQRTFDNGSIPHQIHLGELHAILRRQEDFYPFLKDNREKIEKILTFRIPYYVGPLARGNSRFAWMTRKSEETITPWNFEEVVDKGASAQSFIERMTNFDKNLPNEKVLPKHSLLYEYFTVYNELTKVKYVTEGMRKPAFLSGEQKKAIVDLLFKTNRKVTVKQLKEDYFKKIECFDSVEISGVEDRFNASLGTYHDLLKIIKDKDFLDNEENEDILEDIVLTLTLFEDREMIEERLKTYAHLFDDKVMKQLKRRRYTGWGRLSRKLINGIRDKQSGKTILDFLKSDGFANRNFMQLIHDDSLTFKEDIQKAQVSGQGDSLHEHIANLAGSPAIKKGILQTVKVVDELVKVMGRHKPENIVIEMARENQTTQKGQKNSRERMKRIEEGIKELGSQILKEHPVENTQLQNEKLYLYYLQNGRDMYVDQELDINRLSDYDVDHIVPQSFLKDDSIDNKVLTRSDKARGKSDNVPSEEVVKKMKNYWRQLLNAKLITQRKFDNLTKAERGGLSELDKAGFIKRQLVETRQITKHVAQILDSRMNTKYDENDKLIREVKVITLKSKLVSDFRKDFQFYKVREINNYHHAHDAYLNAVVGTALIKKYPKLESEFVYGDYKVYDVRKMIAKSEQEIGKATAKYFFYSNIMNFFKTEITLANGEIRKRPLIETNGETGEIVWDKGRDFATVRKVLSMPQVNIVKKTEVQTGGFSKESILPKRNSDKLIARKKDWDPKKYGGFDSPTVAYSVLVVAKVEKGKSKKLKSVKELLGITIMERSSFEKNPIDFLEAKGYKEVKKDLIIKLPKYSLFELENGRKRMLASAGELQKGNELALPSKYVNFLYLASHYEKLKGSPEDNEQKQLFVEQHKHYLDEIIEQISEFSKRVILADANLDKVLSAYNKHRDKPIREQAENIIHLFTLTNLGAPAAFKYFDTTIDRKRYTSTKEVLDATLIHQSITGLYETRIDLSQLGGDGGGGSEAAAKPAPGGTLNLEDEYRLYETSAEPEVSPGSTWLSDFPQAWAETGGMGLAVRQAPLIIPLKATSTPVSIKQYPMSQEAKLGIKPHIQRLLDQGILVPCQSPWNTPLLPVKKPGTNDYRPVQDLREVNKRVEDIHPTVPNPYNLLSGLPPSHRWYTVLDLKDAFFCLRLHPTSQPLFAFEWRDPGMGISGQLTWTRLPQGFKNSPTLFNEALHRDLADFRIQHPDLILLQYVDDILLAATSELDCQQGTRALLLTLGNLGYRASAKKAQLCQKQVKYLGYLLKEGQRWLTEARKETVMGQPTPKTPRQLREFLGKAGFCRLFIPGFAEMAAPLYPLTKPGTLFNWGPDQQKAYQEIKQALLTAPALGLPDLTKPFELFVDEKQGYAKGVLTQKLGPWRRPVAYLSKKLDPVAAGWPPCLRMVAAIAVLRKDAGKLTMGQPLVILAPHAVEALVKQPPDRWLSNARMTHYQAMLLDTDRVQFGPVVALNPATLLPLPEEGAPHDCLEILAETHGTRPDLTDQPIPDADHTWYTDGSSFLQEGQRKAGAAVTTETEVIWARALPAGTSAQRAELIALTQALKMAEGKRLNVYTDSRYAFATAHIHGEIYRRRGWLTSEGREIKNKSEILALLKALFLPKRLSIIHCLGHQKGDSAEARGNRLADQAAREAAIKTPPDTSTLLAGKRTADGSEFEKRTADGSEFESPKKKAKVE

SEQ ID NO: 7199 - protein, 2096 aa, synthetic construct
MPAAKRVKLDGGDKKYSIGLDIGTNSVGWAVITDEYKVPSKKFKVLGNTDRHSIKKNLIGALLFDSGETAEATRLKRTARRRYTRRKNRICYLQEIFSNEMAKVDDSFFHRLEESFLVEEDKKHERHPIFGNIVDEVAYHEKYPTIYHLRKKLVDSTDKADLRLIYLALAHMIKFRGHFLIEGDLNPDNSDVDKLFIQLVQTYNQLFEENPINASGVDAKAILSARLSKSRRLENLIAQLPGEKKNGLFGNLIALSLGLTPNFKSNFDLAEDAKLQLSKDTYDDDLDNLLAQIGDQYADLFLAAKNLSDAILLSDILRVNTEITKAPLSASMIKRYDEHHQDLTLLKALVRQQLPEKYKEIFFDQSKNGYAGYIDGGASQEEFYKFIKPILEKMDGTEELLVKLNREDLLRKQRTFDNGSIPHQIHLGELHAILRRQEDFYPFLKDNREKIEKILTFRIPYYVGPLARGNSRFAWMTRKSEETITPWNFEEVVDKGASAQSFIERMTNFDKNLPNEKVLPKHSLLYEYFTVYNELTKVKYVTEGMRKPAFLSGEQKKAIVDLLFKTNRKVTVKQLKEDYFKKIECFDSVEISGVEDRFNASLGTYHDLLKIIKDKDFLDNEENEDILEDIVLTLTLFEDREMIEERLKTYAHLFDDKVMKQLKRRRYTGWGRLSRKLINGIRDKQSGKTILDFLKSDGFANRNFMQLIHDDSLTFKEDIQKAQVSGQGDSLHEHIANLAGSPAIKKGILQTVKVVDELVKVMGRHKPENIVIEMARENQTTQKGQKNSRERMKRIEEGIKELGSQILKEHPVENTQLQNEKLYLYYLQNGRDMYVDQELDINRLSDYDVDHIVPQSFLKDDSIDNKVLTRSDKARGKSDNVPSEEVVKKMKNYWRQLLNAKLITQRKFDNLTKAERGGLSELDKAGFIKRQLVETRQITKHVAQILDSRMNTKYDENDKLIREVKVITLKSKLVSDFRKDFQFYKVREINNYHHAHDAYLNAVVGTALIKKYPKLESEFVYGDYKVYDVRKMIAKSEQEIGKATAKYFFYSNIMNFFKTEITLANGEIRKRPLIETNGETGEIVWDKGRDFATVRKVLSMPQVNIVKKTEVQTGGFSKESILPKRNSDKLIARKKDWDPKKYGGFDSPTVAYSVLVVAKVEKGKSKKLKSVKELLGITIMERSSFEKNPIDFLEAKGYKEVKKDLIIKLPKYSLFELENGRKRMLASAGELQKGNELALPSKYVNFLYLASHYEKLKGSPEDNEQKQLFVEQHKHYLDEIIEQISEFSKRVILADANLDKVLSAYNKHRDKPIREQAENIIHLFTLTNLGAPAAFKYFDTTIDRKRYTSTKEVLDATLIHQSITGLYETRIDLSQLGGDGGGGSEAAAKPAPGGTLNIEDEYRLHETSKGPDVPLGSTWLSDFPQAWAETGGMGLAFRQAPLIISLKATSTPVSIKQYPMSQEARLGIKPHIQRLLDQGILVPCQSPWNTPLLPVKKPGTNDYRPVQDLREVNKRVEDIHPTVPNPYNLLSGLPPSHQWYTVLDLKDAFFCLRLHPTSQSLFAFEWKDPEMGISGQLTWTRLPQGFKNSPTLFNEALHRDLADFRIQHPDLILLQYVDDLLLAATSELDCQQGTRALLQTLGDLGYRASAKKAQICQKQVKYLGYLLKEGQRWLTEARKETVMGQPTPKTPRQLREFLGKAGLCRLFIPGFAEMAAPLYPLTKPGTLFKWGPDQQKAYQEIKQALLTAPALGLPDLTKPFELFVDEKQGYAKGVLTQKLGPWRRPVAYLSKKLDPVAAGWPPCLRMVAAIAVLTKDVGKLTMGQPLVILAPHAVEALVKQPPDRWLSNARMTHYQALLLDTDRVQFGPIVALNPATLLPLPEEGLQHDCLDILAEAHGTRPDLTDQPLPDADHTWYTDGSSFLQEGQRRAGAAVTTETEVIWAKALPAGTSAQRAELIALTQALKMAAGKKLNVYTDSRYAFATAHIHGEIYRRRGWLTSEGKEIKNKDEILALLKALFLPKRLSIIHCPGHQKGNHAEARGNRMADQAAREVATRETPETSTLLAGKRTADGSEFEKRTADGSEFESPKKKAKVE

SEQ ID NO: 7200 - protein, 2096 aa, synthetic construct
MPAAKRVKLDGGDKKYSIGLDIGTNSVGWAVITDEYKVPSKKFKVLGNTDRHSIKKNLIGALLFDSGETAEATRLKRTARRRYTRRKNRICYLQEIFSNEMAKVDDSFFHRLEESFLVEEDKKHERHPIFGNIVDEVAYHEKYPTIYHLRKKLVDSTDKADLRLIYLALAHMIKFRGHFLIEGDLNPDNSDVDKLFIQLVQTYNQLFEENPINASGVDAKAILSARLSKSRRLENLIAQLPGEKKNGLFGNLIALSLGLTPNFKSNFDLAEDAKLQLSKDTYDDDLDNLLAQIGDQYADLFLAAKNLSDAILLSDILRVNTEITKAPLSASMIKRYDEHHQDLTLLKALVRQQLPEKYKEIFFDQSKNGYAGYIDGGASQEEFYKFIKPILEKMDGTEELLVKLNREDLLRKQRTFDNGSIPHQIHLGELHAILRRQEDFYPFLKDNREKIEKILTFRIPYYVGPLARGNSRFAWMTRKSEETITPWNFEEVVDKGASAQSFIERMTNFDKNLPNEKVLPKHSLLYEYFTVYNELTKVKYVTEGMRKPAFLSGEQKKAIVDLLFKTNRKVTVKQLKEDYFKKIECFDSVEISGVEDRFNASLGTYHDLLKIIKDKDFLDNEENEDILEDIVLTLTLFEDREMIEERLKTYAHLFDDKVMKQLKRRRYTGWGRLSRKLINGIRDKQSGKTILDFLKSDGFANRNFMQLIHDDSLTFKEDIQKAQVSGQGDSLHEHIANLAGSPAIKKGILQTVKVVDELVKVMGRHKPENIVIEMARENQTTQKGQKNSRERMKRIEEGIKELGSQILKEHPVENTQLQNEKLYLYYLQNGRDMYVDQELDINRLSDYDVDHIVPQSFLKDDSIDNKVLTRSDKARGKSDNVPSEEVVKKMKNYWRQLLNAKLITQRKFDNLTKAERGGLSELDKAGFIKRQLVETRQITKHVAQILDSRMNTKYDENDKLIREVKVITLKSKLVSDFRKDFQFYKVREINNYHHAHDAYLNAVVGTALIKKYPKLESEFVYGDYKVYDVRKMIAKSEQEIGKATAKYFFYSNIMNFFKTEITLANGEIRKRPLIETNGETGEIVWDKGRDFATVRKVLSMPQVNIVKKTEVQTGGFSKESILPKRNSDKLIARKKDWDPKKYGGFDSPTVAYSVLVVAKVEKGKSKKLKSVKELLGITIMERSSFEKNPIDFLEAKGYKEVKKDLIIKLPKYSLFELENGRKRMLASAGELQKGNELALPSKYVNFLYLASHYEKLKGSPEDNEQKQLFVEQHKHYLDEIIEQISEFSKRVILADANLDKVLSAYNKHRDKPIREQAENIIHLFTLTNLGAPAAFKYFDTTIDRKRYTSTKEVLDATLIHQSITGLYETRIDLSQLGGDGGGGSEAAAKPAPGGTLNIEDEHRLHETSKEPDVSLGSTWLSDFPQAWAETGGMGLAVRQAPLIIPLKATSTPVSIKQYPMSQEARLGIKPHIQRLLDQGILVPCQSPWNTPLLPVKKPGTNDYRPVQDLREVNKRVEDIHPTVPNPYNLLSGLPPSHQWYTVLDLKDAFFCLRLHPTSQPLFAFEWRDPEMGISGQLTWTRLPQGFKNSPTLFDEALHRDLADFRIQHPDLILLQYVDDLLLAATSELDCQQGTRALLQTLGNLGYRASAKKAQICQKQVKYLGYLLKEGQRWLTEARKETVMGQPTPKTPRQLREFLGTAGFCRLWIPGFAEMAAPLYPLTKTGTLFNWGPDQQKAYQEIKQALLTAPALGLPDLTKPFELFVDEKQGYAKGVLTQKLGPWRRPVAYLSKKLDPVAAGWPPCLRMVAAIAVLTKDAGKLTMGQPLVILAPHAVEALVKQPPDRWLSNARMTHYQALLLDTDRVQFGPVVALNPATLLPLPEEGLQHNCLDILAEAHGTRPDLTDQPLPDADHTWYTDGSSLLQEGQRKAGAAVTTETEVIWAKALPAGTSAQRAELIALTQALKMAEGKKLNVYTDSRYAFATAHIHGEIYRRRGLLTSEGKEIKNKDEILALLKALFLPKRLSIIHCPGHQKGHSAEARGNRMADQAARKAAITETPDTSTLLAGKRTADGSEFEKRTADGSEFESPKKKAKVE

SEQ ID NO: 7201 - protein, 2090 aa, synthetic construct
MPAAKRVKLDGGDKKYSIGLDIGTNSVGWAVITDEYKVPSKKFKVLGNTDRHSIKKNLIGALLFDSGETAEATRLKRTARRRYTRRKNRICYLQEIFSNEMAKVDDSFFHRLEESFLVEEDKKHERHPIFGNIVDEVAYHEKYPTIYHLRKKLVDSTDKADLRLIYLALAHMIKFRGHFLIEGDLNPDNSDVDKLFIQLVQTYNQLFEENPINASGVDAKAILSARLSKSRRLENLIAQLPGEKKNGLFGNLIALSLGLTPNFKSNFDLAEDAKLQLSKDTYDDDLDNLLAQIGDQYADLFLAAKNLSDAILLSDILRVNTEITKAPLSASMIKRYDEHHQDLTLLKALVRQQLPEKYKEIFFDQSKNGYAGYIDGGASQEEFYKFIKPILEKMDGTEELLVKLNREDLLRKQRTFDNGSIPHQIHLGELHAILRRQEDFYPFLKDNREKIEKILTFRIPYYVGPLARGNSRFAWMTRKSEETITPWNFEEVVDKGASAQSFIERMTNFDKNLPNEKVLPKHSLLYEYFTVYNELTKVKYVTEGMRKPAFLSGEQKKAIVDLLFKTNRKVTVKQLKEDYFKKIECFDSVEISGVEDRFNASLGTYHDLLKIIKDKDFLDNEENEDILEDIVLTLTLFEDREMIEERLKTYAHLFDDKVMKQLKRRRYTGWGRLSRKLINGIRDKQSGKTILDFLKSDGFANRNFMQLIHDDSLTFKEDIQKAQVSGQGDSLHEHIANLAGSPAIKKGILQTVKVVDELVKVMGRHKPENIVIEMARENQTTQKGQKNSRERMKRIEEGIKELGSQILKEHPVENTQLQNEKLYLYYLQNGRDMYVDQELDINRLSDYDVDHIVPQSFLKDDSIDNKVLTRSDKARGKSDNVPSEEVVKKMKNYWRQLLNAKLITQRKFDNLTKAERGGLSELDKAGFIKRQLVETRQITKHVAQILDSRMNTKYDENDKLIREVKVITLKSKLVSDFRKDFQFYKVREINNYHHAHDAYLNAVVGTALIKKYPKLESEFVYGDYKVYDVRKMIAKSEQEIGKATAKYFFYSNIMNFFKTEITLANGEIRKRPLIETNGETGEIVWDKGRDFATVRKVLSMPQVNIVKKTEVQTGGFSKESILPKRNSDKLIARKKDWDPKKYGGFDSPTVAYSVLVVAKVEKGKSKKLKSVKELLGITIMERSSFEKNPIDFLEAKGYKEVKKDLIIKLPKYSLFELENGRKRMLASAGELQKGNELALPSKYVNFLYLASHYEKLKGSPEDNEQKQLFVEQHKHYLDEIIEQISEFSKRVILADANLDKVLSAYNKHRDKPIREQAENIIHLFTLTNLGAPAAFKYFDTTIDRKRYTSTKEVLDATLIHQSITGLYETRIDLSQLGGDGGGGSEAAAKPAPGGTLQLDDEYRLYSPLVKPDQNIQFWLEQFPQAWAETAGMGLAKQVPPQVIQLKASATPVSVRQYPLSKEAQEGIRPHVQRLIQQGILVPVQSPWNTPLLPVRKPGTNDYRPVQDLREVNKRVQDIHPTVPNPYNLLCALPPQRSWYTVLDLKDAFFCLRLHPTSQPLFAFEWRDPGTGRTGQLTWTRLPQGFKNSPTIFDEALHRDLANFRIQHPQVTLLQYVDDLLLAGATKQDCLEGTKALLLELSDLGYRASAKKAQICRREVTYLGYSLRDGQRWLTEARKKTVVQIPAPTTAKQVREFLGTAGFCRLWIPGFATLAAPLYPLTKEKGEFSWAPEHQKAFDAIKKALLSAPALALPDVTKPFTLYVDERKGVARGVLTQTLGPWRRPVAYLSKKLDPVASGWPVCLKAIAAVAILVKDADKLTLGQNITVIAPHALENIVRQPPDRWMTNARMTHYQSLLLTERVTFAPPAALNPATLLPEETDEPVTHDCHQLLIEETGVRKDLTDIPLTGEVLTWFTDGSSYVVEGKRMAGAAVVDGTRTIWASSLPEGTSAQKAELMALTQALRLAEGKSINIYTDSRYAFATAHVHGAIYKQRGLLTSAGREIKNKEEILSLLEALHLPKRLAIIHCPGHQKAKDPISRGNQMADRVAKQAAQGVNLLAGKRTADGSEFEKRTADGSEFESPKKKAKVE

SEQ ID NO: 7202 - protein, 2096 aa, synthetic construct
MPAAKRVKLDGGDKKYSIGLDIGTNSVGWAVITDEYKVPSKKFKVLGNTDRHSIKKNLIGALLFDSGETAEATRLKRTARRRYTRRKNRICYLQEIFSNEMAKVDDSFFHRLEESFLVEEDKKHERHPIFGNIVDEVAYHEKYPTIYHLRKKLVDSTDKADLRLIYLALAHMIKFRGHFLIEGDLNPDNSDVDKLFIQLVQTYNQLFEENPINASGVDAKAILSARLSKSRRLENLIAQLPGEKKNGLFGNLIALSLGLTPNFKSNFDLAEDAKLQLSKDTYDDDLDNLLAQIGDQYADLFLAAKNLSDAILLSDILRVNTEITKAPLSASMIKRYDEHHQDLTLLKALVRQQLPEKYKEIFFDQSKNGYAGYIDGGASQEEFYKFIKPILEKMDGTEELLVKLNREDLLRKQRTFDNGSIPHQIHLGELHAILRRQEDFYPFLKDNREKIEKILTFRIPYYVGPLARGNSRFAWMTRKSEETITPWNFEEVVDKGASAQSFIERMTNFDKNLPNEKVLPKHSLLYEYFTVYNELTKVKYVTEGMRKPAFLSGEQKKAIVDLLFKTNRKVTVKQLKEDYFKKIECFDSVEISGVEDRFNASLGTYHDLLKIIKDKDFLDNEENEDILEDIVLTLTLFEDREMIEERLKTYAHLFDDKVMKQLKRRRYTGWGRLSRKLINGIRDKQSGKTILDFLKSDGFANRNFMQLIHDDSLTFKEDIQKAQVSGQGDSLHEHIANLAGSPAIKKGILQTVKVVDELVKVMGRHKPENIVIEMARENQTTQKGQKNSRERMKRIEEGIKELGSQILKEHPVENTQLQNEKLYLYYLQNGRDMYVDQELDINRLSDYDVDHIVPQSFLKDDSIDNKVLTRSDKARGKSDNVPSEEVVKKMKNYWRQLLNAKLITQRKFDNLTKAERGGLSELDKAGFIKRQLVETRQITKHVAQILDSRMNTKYDENDKLIREVKVITLKSKLVSDFRKDFQFYKVREINNYHHAHDAYLNAVVGTALIKKYPKLESEFVYGDYKVYDVRKMIAKSEQEIGKATAKYFFYSNIMNFFKTEITLANGEIRKRPLIETNGETGEIVWDKGRDFATVRKVLSMPQVNIVKKTEVQTGGFSKESILPKRNSDKLIARKKDWDPKKYGGFDSPTVAYSVLVVAKVEKGKSKKLKSVKELLGITIMERSSFEKNPIDFLEAKGYKEVKKDLIIKLPKYSLFELENGRKRMLASAGELQKGNELALPSKYVNFLYLASHYEKLKGSPEDNEQKQLFVEQHKHYLDEIIEQISEFSKRVILADANLDKVLSAYNKHRDKPIREQAENIIHLFTLTNLGAPAAFKYFDTTIDRKRYTSTKEVLDATLIHQSITGLYETRIDLSQLGGDGGGGSEAAAKPAPGGTLNIEDEYRLHETSKEPDVPLGSTWLSDFPQAWAETGGMGLAVRQAPLIIPLKATSTPVSIKQYPMSQEARLGIKPHIQRLLDQGILVPCQSPWNTPLLPVKKPGTNDYRPVQDLREVNKRVEDIHPTVPNPYNLLSGLPPSHQWYTVLDLKDAFFCLRLHPTSQPLFAFEWRDPEMGISGQLTWTRLPQGFKNSPTLFDEALHRDLADFRIQHPDLILLQYVDDLLLAATSEQDCQRGTRALLQTLGNLGYRASAKKAQICQKQVKYLGYLLKEGQRWLTEARKETVMGQPTPKTPRQLREFLGTAGFCRLWIPGFAEMAAPLYPLTKTGTLFNWGPDQQKAYQEIKQALLTAPALGLPDLTKPFELFVDEKQGYAKGVLTQKLGPWRRPVAYLSKKLDPVAAGWPPCLRMVAAIAVLTKDAGKLTMGQPLVILAPHAVEALVKQPPDRWLSNARMTHYQAMLLDTDRVQFGPVVALNPATLLPLPEKEAPHDCLEILAETHGTRPDLTDQPIPDADYTWYTDGSSFLQEGQRRAGAAVTTETEVIWARALPAGTSAQRAELIALTQALKMAEGKKLNVYTDSRYAFATAHVHGEIYRRRGLLTSEGREIKNKNEILALLKALFLPKRLSIIHCPGHQKGNSAEARGNRMADQAAREAAMKAVLETSTLLAGKRTADGSEFEKRTADGSEFESPKKKAKVE

SEQ ID NO: 7203 - protein, 2096 aa, synthetic construct
MPAAKRVKLDGGDKKYSIGLDIGTNSVGWAVITDEYKVPSKKFKVLGNTDRHSIKKNLIGALLFDSGETAEATRLKRTARRRYTRRKNRICYLQEIFSNEMAKVDDSFFHRLEESFLVEEDKKHERHPIFGNIVDEVAYHEKYPTIYHLRKKLVDSTDKADLRLIYLALAHMIKFRGHFLIEGDLNPDNSDVDKLFIQLVQTYNQLFEENPINASGVDAKAILSARLSKSRRLENLIAQLPGEKKNGLFGNLIALSLGLTPNFKSNFDLAEDAKLQLSKDTYDDDLDNLLAQIGDQYADLFLAAKNLSDAILLSDILRVNTEITKAPLSASMIKRYDEHHQDLTLLKALVRQQLPEKYKEIFFDQSKNGYAGYIDGGASQEEFYKFIKPILEKMDGTEELLVKLNREDLLRKQRTFDNGSIPHQIHLGELHAILRRQEDFYPFLKDNREKIEKILTFRIPYYVGPLARGNSRFAWMTRKSEETITPWNFEEVVDKGASAQSFIERMTNFDKNLPNEKVLPKHSLLYEYFTVYNELTKVKYVTEGMRKPAFLSGEQKKAIVDLLFKTNRKVTVKQLKEDYFKKIECFDSVEISGVEDRFNASLGTYHDLLKIIKDKDFLDNEENEDILEDIVLTLTLFEDREMIEERLKTYAHLFDDKVMKQLKRRRYTGWGRLSRKLINGIRDKQSGKTILDFLKSDGFANRNFMQLIHDDSLTFKEDIQKAQVSGQGDSLHEHIANLAGSPAIKKGILQTVKVVDELVKVMGRHKPENIVIEMARENQTTQKGQKNSRERMKRIEEGIKELGSQILKEHPVENTQLQNEKLYLYYLQNGRDMYVDQELDINRLSDYDVDHIVPQSFLKDDSIDNKVLTRSDKARGKSDNVPSEEVVKKMKNYWRQLLNAKLITQRKFDNLTKAERGGLSELDKAGFIKRQLVETRQITKHVAQILDSRMNTKYDENDKLIREVKVITLKSKLVSDFRKDFQFYKVREINNYHHAHDAYLNAVVGTALIKKYPKLESEFVYGDYKVYDVRKMIAKSEQEIGKATAKYFFYSNIMNFFKTEITLANGEIRKRPLIETNGETGEIVWDKGRDFATVRKVLSMPQVNIVKKTEVQTGGFSKESILPKRNSDKLIARKKDWDPKKYGGFDSPTVAYSVLVVAKVEKGKSKKLKSVKELLGITIMERSSFEKNPIDFLEAKGYKEVKKDLIIKLPKYSLFELENGRKRMLASAGELQKGNELALPSKYVNFLYLASHYEKLKGSPEDNEQKQLFVEQHKHYLDEIIEQISEFSKRVILADANLDKVLSAYNKHRDKPIREQAENIIHLFTLTNLGAPAAFKYFDTTIDRKRYTSTKEVLDATLIHQSITGLYETRIDLSQLGGDGGGGSEAAAKPAPGGTLNIEDEYRLHETSKEPDVPLGSTWLSDFPQAWAETGGMGLAVRQAPLIIPLKATSTPVSIKQYPMSQEARLGIKPHIQRLLDQGILVPCQSPWNTPLLPVKKPGTNDYRPVQDLREVNKRVEDIHPTVPNPYNLLSGLPPSHQWYTVLDLKDAFFCLRLHPTSQPLFAFEWRDPEMGISGQLTWTRLPQGFKNSPTLFNEALHRDLADFRIQHPDLILLQYVDDLLLAATSEQDCQRGTRALLQTLGNLGYRASAKKAQICQKQVKYLGYLLKEGQRWLTEARKETVMGQPTPKTPRQLREFLGTAGFCRLWIPGFAEMAAPLYPLTKPGTLFNWGPDQQKAYQEIKQALLTAPALGLPDLTKPFELFVDEKQGYAKGVLTQKLGPWRRPVAYLSKKLDPVAAGWPPCLRMVAAIAVLTKDAGKLTMGQPLVILAPHAVEALVKQPPDRWLSNARMTHYQAMLLDTDRVQFGPVVALNPATLLPLPEKEAPHDCLEILAETHGTRPDLTDQPIPDADYTWYTDGSSFLQEGQRRAGAAVTTETEVIWARALPAGTSAQRAELIALTQALKMAEGKKLNVYTDSRYAFATAHVHGEIYRRRGWLTSEGREIKNKNEILALLKALFLPKRLSIIHCPGHQKGNSAEARGNRMADQAAREAAMKAVLETSTLLAGKRTADGSEFEKRTADGSEFESPKKKAKVE

SEQ ID NO: 7204 - protein, 2098 aa, synthetic construct
MPAAKRVKLDGGDKKYSIGLDIGTNSVGWAVITDEYKVPSKKFKVLGNTDRHSIKKNLIGALLFDSGETAEATRLKRTARRRYTRRKNRICYLQEIFSNEMAKVDDSFFHRLEESFLVEEDKKHERHPIFGNIVDEVAYHEKYPTIYHLRKKLVDSTDKADLRLIYLALAHMIKFRGHFLIEGDLNPDNSDVDKLFIQLVQTYNQLFEENPINASGVDAKAILSARLSKSRRLENLIAQLPGEKKNGLFGNLIALSLGLTPNFKSNFDLAEDAKLQLSKDTYDDDLDNLLAQIGDQYADLFLAAKNLSDAILLSDILRVNTEITKAPLSASMIKRYDEHHQDLTLLKALVRQQLPEKYKEIFFDQSKNGYAGYIDGGASQEEFYKFIKPILEKMDGTEELLVKLNREDLLRKQRTFDNGSIPHQIHLGELHAILRRQEDFYPFLKDNREKIEKILTFRIPYYVGPLARGNSRFAWMTRKSEETITPWNFEEVVDKGASAQSFIERMTNFDKNLPNEKVLPKHSLLYEYFTVYNELTKVKYVTEGMRKPAFLSGEQKKAIVDLLFKTNRKVTVKQLKEDYFKKIECFDSVEISGVEDRFNASLGTYHDLLKIIKDKDFLDNEENEDILEDIVLTLTLFEDREMIEERLKTYAHLFDDKVMKQLKRRRYTGWGRLSRKLINGIRDKQSGKTILDFLKSDGFANRNFMQLIHDDSLTFKEDIQKAQVSGQGDSLHEHIANLAGSPAIKKGILQTVKVVDELVKVMGRHKPENIVIEMARENQTTQKGQKNSRERMKRIEEGIKELGSQILKEHPVENTQLQNEKLYLYYLQNGRDMYVDQELDINRLSDYDVDHIVPQSFLKDDSIDNKVLTRSDKARGKSDNVPSEEVVKKMKNYWRQLLNAKLITQRKFDNLTKAERGGLSELDKAGFIKRQLVETRQITKHVAQILDSRMNTKYDENDKLIREVKVITLKSKLVSDFRKDFQFYKVREINNYHHAHDAYLNAVVGTALIKKYPKLESEFVYGDYKVYDVRKMIAKSEQEIGKATAKYFFYSNIMNFFKTEITLANGEIRKRPLIETNGETGEIVWDKGRDFATVRKVLSMPQVNIVKKTEVQTGGFSKESILPKRNSDKLIARKKDWDPKKYGGFDSPTVAYSVLVVAKVEKGKSKKLKSVKELLGITIMERSSFEKNPIDFLEAKGYKEVKKDLIIKLPKYSLFELENGRKRMLASAGELQKGNELALPSKYVNFLYLASHYEKLKGSPEDNEQKQLFVEQHKHYLDEIIEQISEFSKRVILADANLDKVLSAYNKHRDKPIREQAENIIHLFTLTNLGAPAAFKYFDTTIDRKRYTSTKEVLDATLIHQSITGLYETRIDLSQLGGDGGGGSPAPEAAAKGGTAPLEEEYRLFLEAPIQNVTLLEQWKREIPKVWAEINPPGLASTQAPIHVQLLSTALPVRVRQYPITLEAKRSLRETIRKFRAAGILRPVHSPWNTPLLPVRKSGTSEYRMVQDLREVNKRVETIHPTVPNPYTLLSLLPPDRIWYSVLDLKDAFFCIPLAPESQLIFAFEWADAEEGESGQLTWTRLPQGFKNSPTLFNEALNRDLQGFRLDHPSVSLLQYVDDLLIAADTQAACLSATRDLLMTLAELGYRVSGKKAQLCQEEVTYLGFKIHKGSRSLSNSRTQAILQIPVPKTKRQVREFLGKIGYCRLFIPGFAELAQPLYAATRPGNDPLVWGEKEEEAFQSLKLALTQPPALALPSLDKPFQLFVEETSGAAKGVLTQALGPWKRPVAYLSKRLDPVAAGWPRCLRAIAAAALLTREASKLTFGQDIEITSSHNLESLLRSPPDKWLTNARITQYQVLLLDPPRVRFKQTAALNPATLLPETDDTLPIHHCLDTLDSLTSTRPDLTDQPLAQAEATLFTDGSSYIRDGKRYAGAAVVTLDSVIWAEPLPIGTSAQKAELIALTKALEWSKDKSVNIYTDSRYAFATLHVHGMIYRERGWLTAGGKAIKNAPEILALLTAVWLPKRVAVMHCKGHQKDDAPTSTGNRRADEVAREVAIRPLSTQATISAGKRTADGSEFEKRTADGSEFESPKKKAKVE

SEQ ID NO: 7205 - protein, 2218 aa, synthetic construct
MPAAKRVKLDGGDKKYSIGLDIGTNSVGWAVITDEYKVPSKKFKVLGNTDRHSIKKNLIGALLFDSGETAEATRLKRTARRRYTRRKNRICYLQEIFSNEMAKVDDSFFHRLEESFLVEEDKKHERHPIFGNIVDEVAYHEKYPTIYHLRKKLVDSTDKADLRLIYLALAHMIKFRGHFLIEGDLNPDNSDVDKLFIQLVQTYNQLFEENPINASGVDAKAILSARLSKSRRLENLIAQLPGEKKNGLFGNLIALSLGLTPNFKSNFDLAEDAKLQLSKDTYDDDLDNLLAQIGDQYADLFLAAKNLSDAILLSDILRVNTEITKAPLSASMIKRYDEHHQDLTLLKALVRQQLPEKYKEIFFDQSKNGYAGYIDGGASQEEFYKFIKPILEKMDGTEELLVKLNREDLLRKQRTFDNGSIPHQIHLGELHAILRRQEDFYPFLKDNREKIEKILTFRIPYYVGPLARGNSRFAWMTRKSEETITPWNFEEVVDKGASAQSFIERMTNFDKNLPNEKVLPKHSLLYEYFTVYNELTKVKYVTEGMRKPAFLSGEQKKAIVDLLFKTNRKVTVKQLKEDYFKKIECFDSVEISGVEDRFNASLGTYHDLLKIIKDKDFLDNEENEDILEDIVLTLTLFEDREMIEERLKTYAHLFDDKVMKQLKRRRYTGWGRLSRKLINGIRDKQSGKTILDFLKSDGFANRNFMQLIHDDSLTFKEDIQKAQVSGQGDSLHEHIANLAGSPAIKKGILQTVKVVDELVKVMGRHKPENIVIEMARENQTTQKGQKNSRERMKRIEEGIKELGSQILKEHPVENTQLQNEKLYLYYLQNGRDMYVDQELDINRLSDYDVDHIVPQSFLKDDSIDNKVLTRSDKARGKSDNVPSEEVVKKMKNYWRQLLNAKLITQRKFDNLTKAERGGLSELDKAGFIKRQLVETRQITKHVAQILDSRMNTKYDENDKLIREVKVITLKSKLVSDFRKDFQFYKVREINNYHHAHDAYLNAVVGTALIKKYPKLESEFVYGDYKVYDVRKMIAKSEQEIGKATAKYFFYSNIMNFFKTEITLANGEIRKRPLIETNGETGEIVWDKGRDFATVRKVLSMPQVNIVKKTEVQTGGFSKESILPKRNSDKLIARKKDWDPKKYGGFDSPTVAYSVLVVAKVEKGKSKKLKSVKELLGITIMERSSFEKNPIDFLEAKGYKEVKKDLIIKLPKYSLFELENGRKRMLASAGELQKGNELALPSKYVNFLYLASHYEKLKGSPEDNEQKQLFVEQHKHYLDEIIEQISEFSKRVILADANLDKVLSAYNKHRDKPIREQAENIIHLFTLTNLGAPAAFKYFDTTIDRKRYTSTKEVLDATLIHQSITGLYETRIDLSQLGGDGGGGSPAPEAAAKGGTLGDQGSRGSDPLPEPRVTLTVEGIPTEFLVNTGAEHSVLTKPMGKMGSKRTVVAGATGSKVYPWTTKRLLKIGQKQVTHSFLVIPECPAPLLGRDLLTKLKAQIQFSTEGPQVTWEDRPAMCLVLNLEEEYRLHEKPVPPSIDPSWLQLFPMVWAEKAGMGLANQVPPVVVELKSDASPVAVRQYPMSKEAREGIRPHIQRFLDLGILVPCQSPWNTPLLPVKKPGTNDYRPVQDLREVNKRVQDIHPTVPNPYNLLSSLPPSHTWYSVLDLKDAFFCLKLHPNSQPLFAFEWRDPEKGNTGQLTWTRLPQGFKNSPTLFNEALHRDLASFRALNPQVVMLQYVDDLLVAAPTYRDCKEGTRRLLQELSKLGYRVSAKKAQLCREEVTYLGYLLKGGKRWLTPARKATVMKIPTPTTPRQVREFLGTAGFCRLWIPGFASLAAPLYPLTRPKVPFTWTEAHQEAFGRIKEALLSAPALALPDLTKPFALYVDEKEGVARGVLTQTLGPWRRPVAYLSKKLDPVASGWPTCLKAIAAVALLLKDADKLTLGQNVLVIAPHNLESIVRQPPDRWMTNARMTHYQSLLLNERVSFAPPAILNPATLLPVESDDTPIHICSEILAEETGTRPDLRDQPLPGVPAWYTDGSSFIMDGRRQAGAAIVDNKRTVWASNLPEGTSAQKAELIALTQALRLAEGKSINIYTDSRYAFATAHVHGAIYKQRGWLTSAGKDIKNKEEILALLEAIHLPKRVAIIHCPGHQRGTDPVATGNRKADEAAKQAAQSTRILTETTKNAGKRTADGSEFEKRTADGSEFESPKKKAKVE

SEQ ID NO: 7206 - protein, 2096 aa, synthetic construct
MPAAKRVKLDGGDKKYSIGLDIGTNSVGWAVITDEYKVPSKKFKVLGNTDRHSIKKNLIGALLFDSGETAEATRLKRTARRRYTRRKNRICYLQEIFSNEMAKVDDSFFHRLEESFLVEEDKKHERHPIFGNIVDEVAYHEKYPTIYHLRKKLVDSTDKADLRLIYLALAHMIKFRGHFLIEGDLNPDNSDVDKLFIQLVQTYNQLFEENPINASGVDAKAILSARLSKSRRLENLIAQLPGEKKNGLFGNLIALSLGLTPNFKSNFDLAEDAKLQLSKDTYDDDLDNLLAQIGDQYADLFLAAKNLSDAILLSDILRVNTEITKAPLSASMIKRYDEHHQDLTLLKALVRQQLPEKYKEIFFDQSKNGYAGYIDGGASQEEFYKFIKPILEKMDGTEELLVKLNREDLLRKQRTFDNGSIPHQIHLGELHAILRRQEDFYPFLKDNREKIEKILTFRIPYYVGPLARGNSRFAWMTRKSEETITPWNFEEVVDKGASAQSFIERMTNFDKNLPNEKVLPKHSLLYEYFTVYNELTKVKYVTEGMRKPAFLSGEQKKAIVDLLFKTNRKVTVKQLKEDYFKKIECFDSVEISGVEDRFNASLGTYHDLLKIIKDKDFLDNEENEDILEDIVLTLTLFEDREMIEERLKTYAHLFDDKVMKQLKRRRYTGWGRLSRKLINGIRDKQSGKTILDFLKSDGFANRNFMQLIHDDSLTFKEDIQKAQVSGQGDSLHEHIANLAGSPAIKKGILQTVKVVDELVKVMGRHKPENIVIEMARENQTTQKGQKNSRERMKRIEEGIKELGSQILKEHPVENTQLQNEKLYLYYLQNGRDMYVDQELDINRLSDYDVDHIVPQSFLKDDSIDNKVLTRSDKARGKSDNVPSEEVVKKMKNYWRQLLNAKLITQRKFDNLTKAERGGLSELDKAGFIKRQLVETRQITKHVAQILDSRMNTKYDENDKLIREVKVITLKSKLVSDFRKDFQFYKVREINNYHHAHDAYLNAVVGTALIKKYPKLESEFVYGDYKVYDVRKMIAKSEQEIGKATAKYFFYSNIMNFFKTEITLANGEIRKRPLIETNGETGEIVWDKGRDFATVRKVLSMPQVNIVKKTEVQTGGFSKESILPKRNSDKLIARKKDWDPKKYGGFDSPTVAYSVLVVAKVEKGKSKKLKSVKELLGITIMERSSFEKNPIDFLEAKGYKEVKKDLIIKLPKYSLFELENGRKRMLASAGELQKGNELALPSKYVNFLYLASHYEKLKGSPEDNEQKQLFVEQHKHYLDEIIEQISEFSKRVILADANLDKVLSAYNKHRDKPIREQAENIIHLFTLTNLGAPAAFKYFDTTIDRKRYTSTKEVLDATLIHQSITGLYETRIDLSQLGGDGGGGSPAPEAAAKGGTLNIEDEHRLHETSKEPDVSLGSTWLSDFPQAWAETGGMGLAVRQAPLIIPLKATSTPVSIKQYPMSQEARLGIKPHIQRLLDQGILVPCQSPWNTPLLPVKKPGTNDYRPVQDLREVNKRVEDIHPTVPNPYNLLSGLPPSHQWYTVLDLKDAFFCLRLHPTSQPLFAFEWRDPEMGISGQLTWTRLPQGFKNSPTLFDEALHRDLADFRIQHPDLILLQYVDDLLLAATSELDCQQGTRALLQTLGNLGYRASAKKAQICQKQVKYLGYLLKEGQRWLTEARKETVMGQPTPKTPRQLREFLGTAGFCRLWIPGFAEMAAPLYPLTKTGTLFNWGPDQQKAYQEIKQALLTAPALGLPDLTKPFELFVDEKQGYAKGVLTQKLGPWRRPVAYLSKKLDPVAAGWPPCLRMVAAIAVLTKDAGKLTMGQPLVILAPHAVEALVKQPPDRWLSNARMTHYQALLLDTDRVQFGPVVALNPATLLPLPEEGLQHNCLDILAEAHGTRPDLTDQPLPDADHTWYTDGSSLLQEGQRKAGAAVTTETEVIWAKALPAGTSAQRAELIALTQALKMAEGKKLNVYTDSRYAFATAHIHGEIYRRRGLLTSEGKEIKNKDEILALLKALFLPKRLSIIHCPGHQKGHSAEARGNRMADQAARKAAITETPDTSTLLAGKRTADGSEFEKRTADGSEFESPKKKAKVE

SEQ ID NO: 7207 - protein, 2090 aa, synthetic construct
MPAAKRVKLDGGDKKYSIGLDIGTNSVGWAVITDEYKVPSKKFKVLGNTDRHSIKKNLIGALLFDSGETAEATRLKRTARRRYTRRKNRICYLQEIFSNEMAKVDDSFFHRLEESFLVEEDKKHERHPIFGNIVDEVAYHEKYPTIYHLRKKLVDSTDKADLRLIYLALAHMIKFRGHFLIEGDLNPDNSDVDKLFIQLVQTYNQLFEENPINASGVDAKAILSARLSKSRRLENLIAQLPGEKKNGLFGNLIALSLGLTPNFKSNFDLAEDAKLQLSKDTYDDDLDNLLAQIGDQYADLFLAAKNLSDAILLSDILRVNTEITKAPLSASMIKRYDEHHQDLTLLKALVRQQLPEKYKEIFFDQSKNGYAGYIDGGASQEEFYKFIKPILEKMDGTEELLVKLNREDLLRKQRTFDNGSIPHQIHLGELHAILRRQEDFYPFLKDNREKIEKILTFRIPYYVGPLARGNSRFAWMTRKSEETITPWNFEEVVDKGASAQSFIERMTNFDKNLPNEKVLPKHSLLYEYFTVYNELTKVKYVTEGMRKPAFLSGEQKKAIVDLLFKTNRKVTVKQLKEDYFKKIECFDSVEISGVEDRFNASLGTYHDLLKIIKDKDFLDNEENEDILEDIVLTLTLFEDREMIEERLKTYAHLFDDKVMKQLKRRRYTGWGRLSRKLINGIRDKQSGKTILDFLKSDGFANRNFMQLIHDDSLTFKEDIQKAQVSGQGDSLHEHIANLAGSPAIKKGILQTVKVVDELVKVMGRHKPENIVIEMARENQTTQKGQKNSRERMKRIEEGIKELGSQILKEHPVENTQLQNEKLYLYYLQNGRDMYVDQELDINRLSDYDVDHIVPQSFLKDDSIDNKVLTRSDKARGKSDNVPSEEVVKKMKNYWRQLLNAKLITQRKFDNLTKAERGGLSELDKAGFIKRQLVETRQITKHVAQILDSRMNTKYDENDKLIREVKVITLKSKLVSDFRKDFQFYKVREINNYHHAHDAYLNAVVGTALIKKYPKLESEFVYGDYKVYDVRKMIAKSEQEIGKATAKYFFYSNIMNFFKTEITLANGEIRKRPLIETNGETGEIVWDKGRDFATVRKVLSMPQVNIVKKTEVQTGGFSKESILPKRNSDKLIARKKDWDPKKYGGFDSPTVAYSVLVVAKVEKGKSKKLKSVKELLGITIMERSSFEKNPIDFLEAKGYKEVKKDLIIKLPKYSLFELENGRKRMLASAGELQKGNELALPSKYVNFLYLASHYEKLKGSPEDNEQKQLFVEQHKHYLDEIIEQISEFSKRVILADANLDKVLSAYNKHRDKPIREQAENIIHLFTLTNLGAPAAFKYFDTTIDRKRYTSTKEVLDATLIHQSITGLYETRIDLSQLGGDGGGGSPAPEAAAKGGTLQLDDEYRLYSPLVKPDQNIQFWLEQFPQAWAETAGMGLAKQVPPQVIQLKASATPVSVRQYPLSKEAQEGIRPHVQRLIQQGILVPVQSPWNTPLLPVRKPGTNDYRPVQDLREVNKRVQDIHPTVPNPYNLLCALPPQRSWYTVLDLKDAFFCLRLHPTSQPLFAFEWRDPGTGRTGQLTWTRLPQGFKNSPTIFDEALHRDLANFRIQHPQVTLLQYVDDLLLAGATKQDCLEGTKALLLELSDLGYRASAKKAQICRREVTYLGYSLRDGQRWLTEARKKTVVQIPAPTTAKQVREFLGTAGFCRLWIPGFATLAAPLYPLTKEKGEFSWAPEHQKAFDAIKKALLSAPALALPDVTKPFTLYVDERKGVARGVLTQTLGPWRRPVAYLSKKLDPVASGWPVCLKAIAAVAILVKDADKLTLGQNITVIAPHALENIVRQPPDRWMTNARMTHYQSLLLTERVTFAPPAALNPATLLPEETDEPVTHDCHQLLIEETGVRKDLTDIPLTGEVLTWFTDGSSYVVEGKRMAGAAVVDGTRTIWASSLPEGTSAQKAELMALTQALRLAEGKSINIYTDSRYAFATAHVHGAIYKQRGLLTSAGREIKNKEEILSLLEALHLPKRLAIIHCPGHQKAKDPISRGNQMADRVAKQAAQGVNLLAGKRTADGSEFEKRTADGSEFESPKKKAKVE

SEQ ID NO: 7208 - protein, 2087 aa, synthetic construct
MPAAKRVKLDGGDKKYSIGLDIGTNSVGWAVITDEYKVPSKKFKVLGNTDRHSIKKNLIGALLFDSGETAEATRLKRTARRRYTRRKNRICYLQEIFSNEMAKVDDSFFHRLEESFLVEEDKKHERHPIFGNIVDEVAYHEKYPTIYHLRKKLVDSTDKADLRLIYLALAHMIKFRGHFLIEGDLNPDNSDVDKLFIQLVQTYNQLFEENPINASGVDAKAILSARLSKSRRLENLIAQLPGEKKNGLFGNLIALSLGLTPNFKSNFDLAEDAKLQLSKDTYDDDLDNLLAQIGDQYADLFLAAKNLSDAILLSDILRVNTEITKAPLSASMIKRYDEHHQDLTLLKALVRQQLPEKYKEIFFDQSKNGYAGYIDGGASQEEFYKFIKPILEKMDGTEELLVKLNREDLLRKQRTFDNGSIPHQIHLGELHAILRRQEDFYPFLKDNREKIEKILTFRIPYYVGPLARGNSRFAWMTRKSEETITPWNFEEVVDKGASAQSFIERMTNFDKNLPNEKVLPKHSLLYEYFTVYNELTKVKYVTEGMRKPAFLSGEQKKAIVDLLFKTNRKVTVKQLKEDYFKKIECFDSVEISGVEDRFNASLGTYHDLLKIIKDKDFLDNEENEDILEDIVLTLTLFEDREMIEERLKTYAHLFDDKVMKQLKRRRYTGWGRLSRKLINGIRDKQSGKTILDFLKSDGFANRNFMQLIHDDSLTFKEDIQKAQVSGQGDSLHEHIANLAGSPAIKKGILQTVKVVDELVKVMGRHKPENIVIEMARENQTTQKGQKNSRERMKRIEEGIKELGSQILKEHPVENTQLQNEKLYLYYLQNGRDMYVDQELDINRLSDYDVDHIVPQSFLKDDSIDNKVLTRSDKARGKSDNVPSEEVVKKMKNYWRQLLNAKLITQRKFDNLTKAERGGLSELDKAGFIKRQLVETRQITKHVAQILDSRMNTKYDENDKLIREVKVITLKSKLVSDFRKDFQFYKVREINNYHHAHDAYLNAVVGTALIKKYPKLESEFVYGDYKVYDVRKMIAKSEQEIGKATAKYFFYSNIMNFFKTEITLANGEIRKRPLIETNGETGEIVWDKGRDFATVRKVLSMPQVNIVKKTEVQTGGFSKESILPKRNSDKLIARKKDWDPKKYGGFDSPTVAYSVLVVAKVEKGKSKKLKSVKELLGITIMERSSFEKNPIDFLEAKGYKEVKKDLIIKLPKYSLFELENGRKRMLASAGELQKGNELALPSKYVNFLYLASHYEKLKGSPEDNEQKQLFVEQHKHYLDEIIEQISEFSKRVILADANLDKVLSAYNKHRDKPIREQAENIIHLFTLTNLGAPAAFKYFDTTIDRKRYTSTKEVLDATLIHQSITGLYETRIDLSQLGGDGGGGSPAPEAAAKGGIPWLMKKPLQLTTLVPLQEYEERLLKQTMLTGSYKEKLQSLFLKYDALWQHWENQVGHRRIKPHHIATGTVNPRPQKQYPINPKAKASIQTVINDLLKQGVLIQQNSIMNTPVYPVPKPDGKWRMVLDYREVNKTIPLIAAQNQHSAGILSSIFRGKYKTTLDLSNGFWAHSITPESYWLTAFTWLGQQYCWTRLPQGFLNSPALFNADVVDLLKEVPNVQVYVDDIYISHDDPREHLEQLEKVFSLLLNAGYVVSLKKSEIAQHEVEFLGFNITKEGRGLTETFKQKLLNITPPRDLKQLQSILGLLNFARNFIPNFSELVKPLYNIIATAPGKYITWTTDNSQQLQNIISMLNSAENLEERNPEVRLIMKVNTSPSAGYIRFYNEFAKRPIMYLNYVYTKAEVKFTNTEKLLTTIHKGLIKALDLGMGQEILVYSPIVSMTKIQKTPLPERKALPIRWITWMSYLEDPRIQFHYDKTLPELQQVPTVTDDIIAKIKHPSEFSMVFYTDGSAIKHPNVNKSHNAGMGIAQVQFKPEFTVINTWSIPLGDHTAQLAEVAAVEFACKKALKIDGPVLIVTDSFYVAESVNKELPYWQSNGFFNNKKKPLKHVSKWKSIADCIQLKPDIIIIHEKGHQPTASTFHTEGNNLADKLATQGSYVVNAGKRTADGSEFEKRTADGSEFESPKKKAKVE

SEQ ID NO: 7209 - protein, 2094 aa, synthetic construct
MPAAKRVKLDGGDKKYSIGLDIGTNSVGWAVITDEYKVPSKKFKVLGNTDRHSIKKNLIGALLFDSGETAEATRLKRTARRRYTRRKNRICYLQEIFSNEMAKVDDSFFHRLEESFLVEEDKKHERHPIFGNIVDEVAYHEKYPTIYHLRKKLVDSTDKADLRLIYLALAHMIKFRGHFLIEGDLNPDNSDVDKLFIQLVQTYNQLFEENPINASGVDAKAILSARLSKSRRLENLIAQLPGEKKNGLFGNLIALSLGLTPNFKSNFDLAEDAKLQLSKDTYDDDLDNLLAQIGDQYADLFLAAKNLSDAILLSDILRVNTEITKAPLSASMIKRYDEHHQDLTLLKALVRQQLPEKYKEIFFDQSKNGYAGYIDGGASQEEFYKFIKPILEKMDGTEELLVKLNREDLLRKQRTFDNGSIPHQIHLGELHAILRRQEDFYPFLKDNREKIEKILTFRIPYYVGPLARGNSRFAWMTRKSEETITPWNFEEVVDKGASAQSFIERMTNFDKNLPNEKVLPKHSLLYEYFTVYNELTKVKYVTEGMRKPAFLSGEQKKAIVDLLFKTNRKVTVKQLKEDYFKKIECFDSVEISGVEDRFNASLGTYHDLLKIIKDKDFLDNEENEDILEDIVLTLTLFEDREMIEERLKTYAHLFDDKVMKQLKRRRYTGWGRLSRKLINGIRDKQSGKTILDFLKSDGFANRNFMQLIHDDSLTFKEDIQKAQVSGQGDSLHEHIANLAGSPAIKKGILQTVKVVDELVKVMGRHKPENIVIEMARENQTTQKGQKNSRERMKRIEEGIKELGSQILKEHPVENTQLQNEKLYLYYLQNGRDMYVDQELDINRLSDYDVDHIVPQSFLKDDSIDNKVLTRSDKARGKSDNVPSEEVVKKMKNYWRQLLNAKLITQRKFDNLTKAERGGLSELDKAGFIKRQLVETRQITKHVAQILDSRMNTKYDENDKLIREVKVITLKSKLVSDFRKDFQFYKVREINNYHHAHDAYLNAVVGTALIKKYPKLESEFVYGDYKVYDVRKMIAKSEQEIGKATAKYFFYSNIMNFFKTEITLANGEIRKRPLIETNGETGEIVWDKGRDFATVRKVLSMPQVNIVKKTEVQTGGFSKESILPKRNSDKLIARKKDWDPKKYGGFDSPTVAYSVLVVAKVEKGKSKKLKSVKELLGITIMERSSFEKNPIDFLEAKGYKEVKKDLIIKLPKYSLFELENGRKRMLASAGELQKGNELALPSKYVNFLYLASHYEKLKGSPEDNEQKQLFVEQHKHYLDEIIEQISEFSKRVILADANLDKVLSAYNKHRDKPIREQAENIIHLFTLTNLGAPAAFKYFDTTIDRKRYTSTKEVLDATLIHQSITGLYETRIDLSQLGGDGGGGSPAPEAAAKGGVLNLEEEYRLHEKPVPSSIDPSWLQLFPTVWAERAGMGLANQVPPVVVELRSGASPVAVRQYPMSKEAREGIRPHIQRFLDLGVLVPCQSPWNTPLLPVKKPGTNDYRPVQDLREINKRVQDIHPTVPNPYNLLSSLPPSHTWYSVLDLKDAFFCLKLHPNSQPLFAFEWRDPEKGNTGQLTWTRLPQGFKNSPTLFNEALHRDLAPFRALNPQVVLLQYVDDLLVAAPTYRDCKEGTQKLLQELSKLGYRVSAKKAQLCQKEVTYLGYLLKEGKRWLTPARKATVMKIPPPTTPRQVREFLGTAGFCRLWIPGFASLAAPLYPLTKPSIPFIWTEEHQKAFDRIKEALLSAPALALPDLTKPFTLYVDERAGVARGVLTQTLGPWRRPVAYLSKKLDPVASGWPTCLKAVAAVALLLKDADKLTLGQNVTVIASHSLESIVRQPPDRWMTNARMTHYQSLLLNERVSFAPPAVLNPATLLPVESEATPVHRCSEILAEETGTRRDLKDQPLPGVPAWYTDGSSFIAEGKRRAGAAIVDGKRTVWASSLPEGTSAQKAELVALTQALRLAEGKDINIYTDSRYAFATAHIHGAIYKQRGWLTSAGKDIKNKEEILALLEAIHLPKRVAIIHCPGHQKGNDPVATGNRRADEAAKQAALSTRVLAETTKPAGKRTADGSEFEKRTADGSEFESPKKKAKVE

SEQ ID NO: 7210 - protein, 2102 aa, synthetic construct
MPAAKRVKLDGGDKKYSIGLDIGTNSVGWAVITDEYKVPSKKFKVLGNTDRHSIKKNLIGALLFDSGETAEATRLKRTARRRYTRRKNRICYLQEIFSNEMAKVDDSFFHRLEESFLVEEDKKHERHPIFGNIVDEVAYHEKYPTIYHLRKKLVDSTDKADLRLIYLALAHMIKFRGHFLIEGDLNPDNSDVDKLFIQLVQTYNQLFEENPINASGVDAKAILSARLSKSRRLENLIAQLPGEKKNGLFGNLIALSLGLTPNFKSNFDLAEDAKLQLSKDTYDDDLDNLLAQIGDQYADLFLAAKNLSDAILLSDILRVNTEITKAPLSASMIKRYDEHHQDLTLLKALVRQQLPEKYKEIFFDQSKNGYAGYIDGGASQEEFYKFIKPILEKMDGTEELLVKLNREDLLRKQRTFDNGSIPHQIHLGELHAILRRQEDFYPFLKDNREKIEKILTFRIPYYVGPLARGNSRFAWMTRKSEETITPWNFEEVVDKGASAQSFIERMTNFDKNLPNEKVLPKHSLLYEYFTVYNELTKVKYVTEGMRKPAFLSGEQKKAIVDLLFKTNRKVTVKQLKEDYFKKIECFDSVEISGVEDRFNASLGTYHDLLKIIKDKDFLDNEENEDILEDIVLTLTLFEDREMIEERLKTYAHLFDDKVMKQLKRRRYTGWGRLSRKLINGIRDKQSGKTILDFLKSDGFANRNFMQLIHDDSLTFKEDIQKAQVSGQGDSLHEHIANLAGSPAIKKGILQTVKVVDELVKVMGRHKPENIVIEMARENQTTQKGQKNSRERMKRIEEGIKELGSQILKEHPVENTQLQNEKLYLYYLQNGRDMYVDQELDINRLSDYDVDHIVPQSFLKDDSIDNKVLTRSDKARGKSDNVPSEEVVKKMKNYWRQLLNAKLITQRKFDNLTKAERGGLSELDKAGFIKRQLVETRQITKHVAQILDSRMNTKYDENDKLIREVKVITLKSKLVSDFRKDFQFYKVREINNYHHAHDAYLNAVVGTALIKKYPKLESEFVYGDYKVYDVRKMIAKSEQEIGKATAKYFFYSNIMNFFKTEITLANGEIRKRPLIETNGETGEIVWDKGRDFATVRKVLSMPQVNIVKKTEVQTGGFSKESILPKRNSDKLIARKKDWDPKKYGGFDSPTVAYSVLVVAKVEKGKSKKLKSVKELLGITIMERSSFEKNPIDFLEAKGYKEVKKDLIIKLPKYSLFELENGRKRMLASAGELQKGNELALPSKYVNFLYLASHYEKLKGSPEDNEQKQLFVEQHKHYLDEIIEQISEFSKRVILADANLDKVLSAYNKHRDKPIREQAENIIHLFTLTNLGAPAAFKYFDTTIDRKRYTSTKEVLDATLIHQSITGLYETRIDLSQLGGDGGEAAAKGGSPAPGGTVSLQDEHRLFDIPVTTSLPDVWLQDFPQAWAETGGLGRAKCQAPIIIDLKPTAVPVSIKQYPMSLEAHMGIRQHIIKFLELGVLRPCRSPWNTPLLPVKKPGTQDYRPVQDLREINKRTVDIHPTVPNPYNLLSTLKPDYSWYTVLDLKDAFFCLPLAPQSQELFAFEWKDPERGISGQLTWTRLPQGFKNSPTLFNEALHRDLTDFRTQHPEVTLLQYVDDLLLAAPTKKACTQGTRHLLQELGEKGYRASAKKAQICQTKVTYLGYILSEGKRWLTPGRIETVARIPPPRNPREVREFLGTAGFCRLWIPGFAELAAPLYALTKPSTPFTWQTEHQLAFEALKKALLSAPALGLPDTSKPFTLFLDERQGIAKGVLTQKLGPWKRPVAYLSKKLDPVAAGWPPCLRIMAATAMLVKDSAKLTLGQPLTVITPHTLEAIVRQPPDRWITNARLTHYQALLLDTDRVQFGPPVTLNPATLLPVPENQPSPHDCRQVLAETHGTREDLKDQELPDADHTWYTDGSSYLDSGTRRAGAAVVDGHNTIWAQSLPPGTSAQKAELIALTKALELSKGKKANIYTDSRYAFATAHTHGSIYERRGWLTSEGKEIKNKAEIIALLKALFLPQEVAIIHCPGHQKGQDPVAVGNRQADRVARQAAMAEVLTLATEPDNTSHITAGKRTADGSEFEKRTADGSEFESPKKKAKVE

SEQ ID NO: 7211 - protein, 2087 aa, synthetic construct
MPAAKRVKLDGGDKKYSIGLDIGTNSVGWAVITDEYKVPSKKFKVLGNTDRHSIKKNLIGALLFDSGETAEATRLKRTARRRYTRRKNRICYLQEIFSNEMAKVDDSFFHRLEESFLVEEDKKHERHPIFGNIVDEVAYHEKYPTIYHLRKKLVDSTDKADLRLIYLALAHMIKFRGHFLIEGDLNPDNSDVDKLFIQLVQTYNQLFEENPINASGVDAKAILSARLSKSRRLENLIAQLPGEKKNGLFGNLIALSLGLTPNFKSNFDLAEDAKLQLSKDTYDDDLDNLLAQIGDQYADLFLAAKNLSDAILLSDILRVNTEITKAPLSASMIKRYDEHHQDLTLLKALVRQQLPEKYKEIFFDQSKNGYAGYIDGGASQEEFYKFIKPILEKMDGTEELLVKLNREDLLRKQRTFDNGSIPHQIHLGELHAILRRQEDFYPFLKDNREKIEKILTFRIPYYVGPLARGNSRFAWMTRKSEETITPWNFEEVVDKGASAQSFIERMTNFDKNLPNEKVLPKHSLLYEYFTVYNELTKVKYVTEGMRKPAFLSGEQKKAIVDLLFKTNRKVTVKQLKEDYFKKIECFDSVEISGVEDRFNASLGTYHDLLKIIKDKDFLDNEENEDILEDIVLTLTLFEDREMIEERLKTYAHLFDDKVMKQLKRRRYTGWGRLSRKLINGIRDKQSGKTILDFLKSDGFANRNFMQLIHDDSLTFKEDIQKAQVSGQGDSLHEHIANLAGSPAIKKGILQTVKVVDELVKVMGRHKPENIVIEMARENQTTQKGQKNSRERMKRIEEGIKELGSQILKEHPVENTQLQNEKLYLYYLQNGRDMYVDQELDINRLSDYDVDHIVPQSFLKDDSIDNKVLTRSDKARGKSDNVPSEEVVKKMKNYWRQLLNAKLITQRKFDNLTKAERGGLSELDKAGFIKRQLVETRQITKHVAQILDSRMNTKYDENDKLIREVKVITLKSKLVSDFRKDFQFYKVREINNYHHAHDAYLNAVVGTALIKKYPKLESEFVYGDYKVYDVRKMIAKSEQEIGKATAKYFFYSNIMNFFKTEITLANGEIRKRPLIETNGETGEIVWDKGRDFATVRKVLSMPQVNIVKKTEVQTGGFSKESILPKRNSDKLIARKKDWDPKKYGGFDSPTVAYSVLVVAKVEKGKSKKLKSVKELLGITIMERSSFEKNPIDFLEAKGYKEVKKDLIIKLPKYSLFELENGRKRMLASAGELQKGNELALPSKYVNFLYLASHYEKLKGSPEDNEQKQLFVEQHKHYLDEIIEQISEFSKRVILADANLDKVLSAYNKHRDKPIREQAENIIHLFTLTNLGAPAAFKYFDTTIDRKRYTSTKEVLDATLIHQSITGLYETRIDLSQLGGDGGEAAAKGGSPAPGGVPWILKKPLELTIKLDLEEQQGTLLNNSILSKKGKEELKQLFEKYSALWQSWENQVGHRRIRPHKIATGTVKPTPQKQYHINPKAKPDIQIVINDLLKQGVLIQKESTMNTPVYPVPKPNGRWRMVLDYRAVNKVTPLIAVQNQHSYGILGSLFKGRYKTTIDLSNGFWAHPIVPEDYWITAFTWQGKQYCWTVLPQGFLNSPGLFNGDVVDLLQGIPNVEVYVDDVYISHDSEKEHLEYLDILFNRLKEAGYIISLKKSNIANSIVDFLGFQITNEGRGLTDTFKEKLENITAPTTLKQLQSILGLLNFARNFIPDFTELIAPLYALIPKSPKNYVPWQIEHSTTLETLITKLNGAEYLQGRKGDKTLIMKVNASYTTGYIRYYNEGEKKPISYVSIVFSKTELKFTELEKLLTTVHKGLLKALDLSMGQNIHVYSPIVSMQNIQKTPQTAKKALASRWLSWLSYLEDPRIRFFYDPQMPALKDLPAVDTGKDNKKHPSNFQHIFYTDGSAITSPTKEGHLNAGMGIVYFINKDGNLQKQQEWSISLGNHTAQFAEIAAFEFALKKCLPLGGNILVVTDSNYVAKAYNEELDVWASNGFVNNRKKPLKHISKWKSVADLKRLRPDVVVTHEPGHQKLDSSPHAYGNNLADQLATQASFKVHAGKRTADGSEFEKRTADGSEFESPKKKAKVE

SEQ ID NO: 7212 - protein, 2095 aa, synthetic construct
MPAAKRVKLDGGDKKYSIGLDIGTNSVGWAVITDEYKVPSKKFKVLGNTDRHSIKKNLIGALLFDSGETAEATRLKRTARRRYTRRKNRICYLQEIFSNEMAKVDDSFFHRLEESFLVEEDKKHERHPIFGNIVDEVAYHEKYPTIYHLRKKLVDSTDKADLRLIYLALAHMIKFRGHFLIEGDLNPDNSDVDKLFIQLVQTYNQLFEENPINASGVDAKAILSARLSKSRRLENLIAQLPGEKKNGLFGNLIALSLGLTPNFKSNFDLAEDAKLQLSKDTYDDDLDNLLAQIGDQYADLFLAAKNLSDAILLSDILRVNTEITKAPLSASMIKRYDEHHQDLTLLKALVRQQLPEKYKEIFFDQSKNGYAGYIDGGASQEEFYKFIKPILEKMDGTEELLVKLNREDLLRKQRTFDNGSIPHQIHLGELHAILRRQEDFYPFLKDNREKIEKILTFRIPYYVGPLARGNSRFAWMTRKSEETITPWNFEEVVDKGASAQSFIERMTNFDKNLPNEKVLPKHSLLYEYFTVYNELTKVKYVTEGMRKPAFLSGEQKKAIVDLLFKTNRKVTVKQLKEDYFKKIECFDSVEISGVEDRFNASLGTYHDLLKIIKDKDFLDNEENEDILEDIVLTLTLFEDREMIEERLKTYAHLFDDKVMKQLKRRRYTGWGRLSRKLINGIRDKQSGKTILDFLKSDGFANRNFMQLIHDDSLTFKEDIQKAQVSGQGDSLHEHIANLAGSPAIKKGILQTVKVVDELVKVMGRHKPENIVIEMARENQTTQKGQKNSRERMKRIEEGIKELGSQILKEHPVENTQLQNEKLYLYYLQNGRDMYVDQELDINRLSDYDVDHIVPQSFLKDDSIDNKVLTRSDKARGKSDNVPSEEVVKKMKNYWRQLLNAKLITQRKFDNLTKAERGGLSELDKAGFIKRQLVETRQITKHVAQILDSRMNTKYDENDKLIREVKVITLKSKLVSDFRKDFQFYKVREINNYHHAHDAYLNAVVGTALIKKYPKLESEFVYGDYKVYDVRKMIAKSEQEIGKATAKYFFYSNIMNFFKTEITLANGEIRKRPLIETNGETGEIVWDKGRDFATVRKVLSMPQVNIVKKTEVQTGGFSKESILPKRNSDKLIARKKDWDPKKYGGFDSPTVAYSVLVVAKVEKGKSKKLKSVKELLGITIMERSSFEKNPIDFLEAKGYKEVKKDLIIKLPKYSLFELENGRKRMLASAGELQKGNELALPSKYVNFLYLASHYEKLKGSPEDNEQKQLFVEQHKHYLDEIIEQISEFSKRVILADANLDKVLSAYNKHRDKPIREQAENIIHLFTLTNLGAPAAFKYFDTTIDRKRYTSTKEVLDATLIHQSITGLYETRIDLSQLGGDGGEAAAKGGSPAPGGTLQLEEEYRLFEPESTQKQEMDIWLKNFPQAWAETGGMGTAHCQAPVLIQLKATATPISIRQYPMPHEAYQGIKPHIRRMLDQGILKPCQSPWNTPLLPVKKPGTEDYRPVQDLREVNKRVEDIHPTVPNPYNLLSTLPPSHPWYTVLDLKDAFFCLRLHSESQLLFAFEWRDPEIGLSGQLTWTRLPQGFKNSPTLFNEALHSDLADFRVRYPALVLLQYVDDLLLAAATRTECLEGTKALLETLGNKGYRASAKKAQICLQEVTYLGYSLKDGQRWLTKARKEAILSIPVPKNSRQVREFLGKAGYCRLFIPGFAELAAPLYPLTRPGTLFQWGTEQQLAFEDIKKALLSSPALGLPDITKPFELFIDENSGFAKGVLVQKLGPWKRPVAYLSKKLDTVASGWPPCLRMVAAIAILVKDAGKLTLGQPLTILTSHPVEALVRQPPNKWLSNARMTHYQAMLLDAERVHFGPTVSLNPATLLPLPSGGNHHDCLQILAETHGTRPDLTDQPLPDADLTWYTDGSSFIRNGEREAGAAVTTESEVIWAAPLPPGTSAQRAELIALTQALKMAEGKKLTVYTDSRYAFATTHVHGEIYRRRGWLTSEGKEIKNKNEILALLEALFLPKRLSIIHCPGHQKGDSPQAKGNRLADDTAKKAATETHSSLTVLPAGKRTADGSEFEKRTADGSEFESPKKKAKVE

SEQ ID NO: 7213 - protein, 2176 aa, synthetic construct
MPAAKRVKLDGGDKKYSIGLDIGTNSVGWAVITDEYKVPSKKFKVLGNTDRHSIKKNLIGALLFDSGETAEATRLKRTARRRYTRRKNRICYLQEIFSNEMAKVDDSFFHRLEESFLVEEDKKHERHPIFGNIVDEVAYHEKYPTIYHLRKKLVDSTDKADLRLIYLALAHMIKFRGHFLIEGDLNPDNSDVDKLFIQLVQTYNQLFEENPINASGVDAKAILSARLSKSRRLENLIAQLPGEKKNGLFGNLIALSLGLTPNFKSNFDLAEDAKLQLSKDTYDDDLDNLLAQIGDQYADLFLAAKNLSDAILLSDILRVNTEITKAPLSASMIKRYDEHHQDLTLLKALVRQQLPEKYKEIFFDQSKNGYAGYIDGGASQEEFYKFIKPILEKMDGTEELLVKLNREDLLRKQRTFDNGSIPHQIHLGELHAILRRQEDFYPFLKDNREKIEKILTFRIPYYVGPLARGNSRFAWMTRKSEETITPWNFEEVVDKGASAQSFIERMTNFDKNLPNEKVLPKHSLLYEYFTVYNELTKVKYVTEGMRKPAFLSGEQKKAIVDLLFKTNRKVTVKQLKEDYFKKIECFDSVEISGVEDRFNASLGTYHDLLKIIKDKDFLDNEENEDILEDIVLTLTLFEDREMIEERLKTYAHLFDDKVMKQLKRRRYTGWGRLSRKLINGIRDKQSGKTILDFLKSDGFANRNFMQLIHDDSLTFKEDIQKAQVSGQGDSLHEHIANLAGSPAIKKGILQTVKVVDELVKVMGRHKPENIVIEMARENQTTQKGQKNSRERMKRIEEGIKELGSQILKEHPVENTQLQNEKLYLYYLQNGRDMYVDQELDINRLSDYDVDHIVPQSFLKDDSIDNKVLTRSDKARGKSDNVPSEEVVKKMKNYWRQLLNAKLITQRKFDNLTKAERGGLSELDKAGFIKRQLVETRQITKHVAQILDSRMNTKYDENDKLIREVKVITLKSKLVSDFRKDFQFYKVREINNYHHAHDAYLNAVVGTALIKKYPKLESEFVYGDYKVYDVRKMIAKSEQEIGKATAKYFFYSNIMNFFKTEITLANGEIRKRPLIETNGETGEIVWDKGRDFATVRKVLSMPQVNIVKKTEVQTGGFSKESILPKRNSDKLIARKKDWDPKKYGGFDSPTVAYSVLVVAKVEKGKSKKLKSVKELLGITIMERSSFEKNPIDFLEAKGYKEVKKDLIIKLPKYSLFELENGRKRMLASAGELQKGNELALPSKYVNFLYLASHYEKLKGSPEDNEQKQLFVEQHKHYLDEIIEQISEFSKRVILADANLDKVLSAYNKHRDKPIREQAENIIHLFTLTNLGAPAAFKYFDTTIDRKRYTSTKEVLDATLIHQSITGLYETRIDLSQLGGDGGEAAAKGGSPAPGGMNPLQLLQPLPAEIKGTKLLAHWNSGATITCIPESFLEDEQPIKKTLIKTIHGEKQQNVYYVTFKVKGRKVEAEVIASPYEYILLSPTDVPWLTQQPLQLTILVPLQEYQEKILSKTALPEDQKQQLKTLFVKYDNLWQHWENQVGHRKIRPHNIATGDYPPRPQKQYPINPKAKPSIQIVIDDLLKQGVLTPQNSTMNTPVYPVPKPDGRWRMVLDYREVNKTIPLTAAQNQHSAGILATIVRQKYKTTLDLANGFWAHPITPESYWLTAFTWQGKQYCWTRLPQGFLNSPALFNADVVDLLKEIPNVQVYVDDIYLSHDDPKEHVQQLEKVFQILLQAGYVVSLKKSEIGQKTVEFLGFNITKEGRGLTDTFKTKLLNITPPKDLKQLQSILGKLNFARNFIPNFAELVQPLYNLIAPAKGKYIEWSEENTKQLNMVIEALNTASNLEERLPEQRLVIKVNTSPSAGYVRYYNETGKKPIMYLNYVFSKAELKFSMLEKLLTTMHKALIKAMDLAMGQEILVYSPIVSMTKIQKTPLPERKALPIRWITWMTYLEDPRIQFHYDKTLPELKHIPDVYTSSQSPVKHPSQYEGVFYTDGSAIKSPDPTKSNNAGMGIVHATYKPEYQVLNQWSIPLGNHTAQMAEIAAVEFACKKALKIPGPVLVITDSFYVAESANKELPYWKSNGFVNNKKKPLKHISKWKSIAECLSMKPDITIQHEKGISLQIPVFILKGNALADKLATQGSYVVNAGKRTADGSEFEKRTADGSEFESPKKKAKVE

SEQ ID NO: 7214 - protein, 2094 aa, synthetic construct
MPAAKRVKLDGGDKKYSIGLDIGTNSVGWAVITDEYKVPSKKFKVLGNTDRHSIKKNLIGALLFDSGETAEATRLKRTARRRYTRRKNRICYLQEIFSNEMAKVDDSFFHRLEESFLVEEDKKHERHPIFGNIVDEVAYHEKYPTIYHLRKKLVDSTDKADLRLIYLALAHMIKFRGHFLIEGDLNPDNSDVDKLFIQLVQTYNQLFEENPINASGVDAKAILSARLSKSRRLENLIAQLPGEKKNGLFGNLIALSLGLTPNFKSNFDLAEDAKLQLSKDTYDDDLDNLLAQIGDQYADLFLAAKNLSDAILLSDILRVNTEITKAPLSASMIKRYDEHHQDLTLLKALVRQQLPEKYKEIFFDQSKNGYAGYIDGGASQEEFYKFIKPILEKMDGTEELLVKLNREDLLRKQRTFDNGSIPHQIHLGELHAILRRQEDFYPFLKDNREKIEKILTFRIPYYVGPLARGNSRFAWMTRKSEETITPWNFEEVVDKGASAQSFIERMTNFDKNLPNEKVLPKHSLLYEYFTVYNELTKVKYVTEGMRKPAFLSGEQKKAIVDLLFKTNRKVTVKQLKEDYFKKIECFDSVEISGVEDRFNASLGTYHDLLKIIKDKDFLDNEENEDILEDIVLTLTLFEDREMIEERLKTYAHLFDDKVMKQLKRRRYTGWGRLSRKLINGIRDKQSGKTILDFLKSDGFANRNFMQLIHDDSLTFKEDIQKAQVSGQGDSLHEHIANLAGSPAIKKGILQTVKVVDELVKVMGRHKPENIVIEMARENQTTQKGQKNSRERMKRIEEGIKELGSQILKEHPVENTQLQNEKLYLYYLQNGRDMYVDQELDINRLSDYDVDHIVPQSFLKDDSIDNKVLTRSDKARGKSDNVPSEEVVKKMKNYWRQLLNAKLITQRKFDNLTKAERGGLSELDKAGFIKRQLVETRQITKHVAQILDSRMNTKYDENDKLIREVKVITLKSKLVSDFRKDFQFYKVREINNYHHAHDAYLNAVVGTALIKKYPKLESEFVYGDYKVYDVRKMIAKSEQEIGKATAKYFFYSNIMNFFKTEITLANGEIRKRPLIETNGETGEIVWDKGRDFATVRKVLSMPQVNIVKKTEVQTGGFSKESILPKRNSDKLIARKKDWDPKKYGGFDSPTVAYSVLVVAKVEKGKSKKLKSVKELLGITIMERSSFEKNPIDFLEAKGYKEVKKDLIIKLPKYSLFELENGRKRMLASAGELQKGNELALPSKYVNFLYLASHYEKLKGSPEDNEQKQLFVEQHKHYLDEIIEQISEFSKRVILADANLDKVLSAYNKHRDKPIREQAENIIHLFTLTNLGAPAAFKYFDTTIDRKRYTSTKEVLDATLIHQSITGLYETRIDLSQLGGDGGEAAAKGGSPAPGGVLNLEEEYRLHEKPVPSSIDPSWLQLFPTVWAERAGMGLANQVPPVVVELRSGASPVAVRQYPMSKEAREGIRPHIQKFLDLGVLVPCRSPWNTPLLPVKKPGTNDYRPVQDLREINKRVQDIHPTVPNPYNLLSSLPPSYTWYSVLDLKDAFFCLRLHPNSQPLFAFEWKDPEKGNTGQLTWTRLPQGFKNSPTLFNEALHRDLAPFRALNPQVVLLQYVDDLLVAAPTYEDCKKGTQKLLQELSKLGYRVSAKKAQLCQREVTYLGYLLKEGKRWLTPARKATVMKIPVPTTPRQVREFLGTAGFCRLWIPGFASLAAPLYPLTKPSIPFIWTEEHQQAFDHIKKALLSAPALALPDLTKPFTLYIDERAGVARGVLTQTLGPWRRPVAYLSKKLDPVASGWPTCLKAVAAVALLLKDADKLTLGQNVTVIASHSLESIVRQPPDRWMTNARMTHYQSLLLNERVSFAPPAVLNPATLLPVESEATPVHRCSEILAEETGTRRDLEDQPLPGVPTWYTDGSSFITEGKRRAGAPIVDGKRTVWASSLPEGTSAQKAELVALTQALRLAEGKNINIYTDSRYAFATAHIHGAIYKQRGWLTSAGKDIKNKEEILALLEAIHLPRRVAIIHCPGHQRGSNPVATGNRRADEAAKQAALSTRVLAGTTKPAGKRTADGSEFEKRTADGSEFESPKKKAKVE

SEQ ID NO: 7215 - protein, 2127 aa, synthetic construct
MPAAKRVKLDGGDKKYSIGLDIGTNSVGWAVITDEYKVPSKKFKVLGNTDRHSIKKNLIGALLFDSGETAEATRLKRTARRRYTRRKNRICYLQEIFSNEMAKVDDSFFHRLEESFLVEEDKKHERHPIFGNIVDEVAYHEKYPTIYHLRKKLVDSTDKADLRLIYLALAHMIKFRGHFLIEGDLNPDNSDVDKLFIQLVQTYNQLFEENPINASGVDAKAILSARLSKSRRLENLIAQLPGEKKNGLFGNLIALSLGLTPNFKSNFDLAEDAKLQLSKDTYDDDLDNLLAQIGDQYADLFLAAKNLSDAILLSDILRVNTEITKAPLSASMIKRYDEHHQDLTLLKALVRQQLPEKYKEIFFDQSKNGYAGYIDGGASQEEFYKFIKPILEKMDGTEELLVKLNREDLLRKQRTFDNGSIPHQIHLGELHAILRRQEDFYPFLKDNREKIEKILTFRIPYYVGPLARGNSRFAWMTRKSEETITPWNFEEVVDKGASAQSFIERMTNFDKNLPNEKVLPKHSLLYEYFTVYNELTKVKYVTEGMRKPAFLSGEQKKAIVDLLFKTNRKVTVKQLKEDYFKKIECFDSVEISGVEDRFNASLGTYHDLLKIIKDKDFLDNEENEDILEDIVLTLTLFEDREMIEERLKTYAHLFDDKVMKQLKRRRYTGWGRLSRKLINGIRDKQSGKTILDFLKSDGFANRNFMQLIHDDSLTFKEDIQKAQVSGQGDSLHEHIANLAGSPAIKKGILQTVKVVDELVKVMGRHKPENIVIEMARENQTTQKGQKNSRERMKRIEEGIKELGSQILKEHPVENTQLQNEKLYLYYLQNGRDMYVDQELDINRLSDYDVDHIVPQSFLKDDSIDNKVLTRSDKARGKSDNVPSEEVVKKMKNYWRQLLNAKLITQRKFDNLTKAERGGLSELDKAGFIKRQLVETRQITKHVAQILDSRMNTKYDENDKLIREVKVITLKSKLVSDFRKDFQFYKVREINNYHHAHDAYLNAVVGTALIKKYPKLESEFVYGDYKVYDVRKMIAKSEQEIGKATAKYFFYSNIMNFFKTEITLANGEIRKRPLIETNGETGEIVWDKGRDFATVRKVLSMPQVNIVKKTEVQTGGFSKESILPKRNSDKLIARKKDWDPKKYGGFDSPTVAYSVLVVAKVEKGKSKKLKSVKELLGITIMERSSFEKNPIDFLEAKGYKEVKKDLIIKLPKYSLFELENGRKRMLASAGELQKGNELALPSKYVNFLYLASHYEKLKGSPEDNEQKQLFVEQHKHYLDEIIEQISEFSKRVILADANLDKVLSAYNKHRDKPIREQAENIIHLFTLTNLGAPAAFKYFDTTIDRKRYTSTKEVLDATLIHQSITGLYETRIDLSQLGGDGGEAAAKGGSPAPGGLLGRDLLTKLKAQIQFSTEGPQVTWEDRPAMCLVLNLEEEYRLHEKPVPPSIDPSWLQLFPMVWAEKAGMGLANQVPPVVVELKSDASPVAVRQYPMSKEAREGIRPHIQRFLDLGILVPCQSPWNTPLLPVKKPGTNDYRPVQDLREVNKRVQDIHPTVPNPYNLLSSLPPSHTWYSVLDLKDAFFCLKLHPNSQPLFAFEWRDPEKGNTGQLTWTRLPQGFKNSPTLFNEALHRDLASFRALNPQVVMLQYVDDLLVAAPTYRDCKEGTRRLLQELSKLGYRVSAKKAQLCREEVTYLGYLLKGGKRWLTPARKATVMKIPTPTTPRQVREFLGTAGFCRLWIPGFASLAAPLYPLTRPKVPFTWTEAHQEAFGRIKEALLSAPALALPDLTKPFALYVDEKEGVARGVLTQTLGPWRRPVAYLSKKLDPVASGWPTCLKAIAAVALLLKDADKLTLGQNVLVIAPHNLESIVRQPPDRWMTNARMTHYQSLLLNERVSFAPPAILNPATLLPVESDDTPIHICSEILAEETGTRPDLRDQPLPGVPAWYTDGSSFIMDGRRQAGAAIVDNKRTVWASNLPEGTSAQKAELIALTQALRLAEGKSINIYTDSRYAFATAHVHGAIYKQRGWLTSAGKDIKNKEEILALLEAIHLPKRVAIIHCPGHQRGTDPVATGNRKADEAAKQAAQSTRILTETTKNAGKRTADGSEFEKRTADGSEFESPKKKAKVE

SEQ ID NO: 7216 - protein, 2127 aa, synthetic construct
MPAAKRVKLDGGDKKYSIGLDIGTNSVGWAVITDEYKVPSKKFKVLGNTDRHSIKKNLIGALLFDSGETAEATRLKRTARRRYTRRKNRICYLQEIFSNEMAKVDDSFFHRLEESFLVEEDKKHERHPIFGNIVDEVAYHEKYPTIYHLRKKLVDSTDKADLRLIYLALAHMIKFRGHFLIEGDLNPDNSDVDKLFIQLVQTYNQLFEENPINASGVDAKAILSARLSKSRRLENLIAQLPGEKKNGLFGNLIALSLGLTPNFKSNFDLAEDAKLQLSKDTYDDDLDNLLAQIGDQYADLFLAAKNLSDAILLSDILRVNTEITKAPLSASMIKRYDEHHQDLTLLKALVRQQLPEKYKEIFFDQSKNGYAGYIDGGASQEEFYKFIKPILEKMDGTEELLVKLNREDLLRKQRTFDNGSIPHQIHLGELHAILRRQEDFYPFLKDNREKIEKILTFRIPYYVGPLARGNSRFAWMTRKSEETITPWNFEEVVDKGASAQSFIERMTNFDKNLPNEKVLPKHSLLYEYFTVYNELTKVKYVTEGMRKPAFLSGEQKKAIVDLLFKTNRKVTVKQLKEDYFKKIECFDSVEISGVEDRFNASLGTYHDLLKIIKDKDFLDNEENEDILEDIVLTLTLFEDREMIEERLKTYAHLFDDKVMKQLKRRRYTGWGRLSRKLINGIRDKQSGKTILDFLKSDGFANRNFMQLIHDDSLTFKEDIQKAQVSGQGDSLHEHIANLAGSPAIKKGILQTVKVVDELVKVMGRHKPENIVIEMARENQTTQKGQKNSRERMKRIEEGIKELGSQILKEHPVENTQLQNEKLYLYYLQNGRDMYVDQELDINRLSDYDVDHIVPQSFLKDDSIDNKVLTRSDKARGKSDNVPSEEVVKKMKNYWRQLLNAKLITQRKFDNLTKAERGGLSELDKAGFIKRQLVETRQITKHVAQILDSRMNTKYDENDKLIREVKVITLKSKLVSDFRKDFQFYKVREINNYHHAHDAYLNAVVGTALIKKYPKLESEFVYGDYKVYDVRKMIAKSEQEIGKATAKYFFYSNIMNFFKTEITLANGEIRKRPLIETNGETGEIVWDKGRDFATVRKVLSMPQVNIVKKTEVQTGGFSKESILPKRNSDKLIARKKDWDPKKYGGFDSPTVAYSVLVVAKVEKGKSKKLKSVKELLGITIMERSSFEKNPIDFLEAKGYKEVKKDLIIKLPKYSLFELENGRKRMLASAGELQKGNELALPSKYVNFLYLASHYEKLKGSPEDNEQKQLFVEQHKHYLDEIIEQISEFSKRVILADANLDKVLSAYNKHRDKPIREQAENIIHLFTLTNLGAPAAFKYFDTTIDRKRYTSTKEVLDATLIHQSITGLYETRIDLSQLGGDGGEAAAKGGSPAPGGLLGRDLLTKLKAQIQFSTEGPQVTWEDRPAMCLVLNLEEEYRLHEKPVPPSIDPSWLQLFPMVWAEKAGMGLANQVPPVVVELKSDASPVAVRQYPMSKEAREGIRPHIQRFLDLGILVPCQSPWNTPLLPVKKPGTNDYRPVQDLREVNKRVQDIHPTVPNPYNLLSSLPPSHTWYSVLDLKDAFFCLKLHPNSQPLFAFEWRDPEKGNTGQLTWTRLPQGFKNSPTLFNEALHRDLASFRALNPQVVMLQYVDDLLVAAPTYRDCKEGTRRLLQELSKLGYRVSAKKAQLCREEVTYLGYLLKGGKRWLTPARKATVMKIPTPTTPRQVREFLGKAGFCRLFIPGFASLAAPLYPLTRPKVPFTWTEAHQEAFGRIKEALLSAPALALPDLTKPFALYVDEKEGVARGVLTQTLGPWRRPVAYLSKKLDPVASGWPTCLKAIAAVALLLKDADKLTLGQNVLVIAPHNLESIVRQPPDRWMTNARMTHYQSLLLNERVSFAPPAILNPATLLPVESDDTPIHICSEILAEETGTRPDLRDQPLPGVPAWYTDGSSFIMDGRRQAGAAIVDNKRTVWASNLPEGTSAQKAELIALTQALRLAEGKSINIYTDSRYAFATAHVHGAIYKQRGWLTSAGKDIKNKEEILALLEAIHLPKRVAIIHCPGHQRGTDPVATGNRKADEAAKQAAQSTRILTETTKNAGKRTADGSEFEKRTADGSEFESPKKKAKVE

SEQ ID NO: 7217 - protein, 2218 aa, synthetic construct
MPAAKRVKLDGGDKKYSIGLDIGTNSVGWAVITDEYKVPSKKFKVLGNTDRHSIKKNLIGALLFDSGETAEATRLKRTARRRYTRRKNRICYLQEIFSNEMAKVDDSFFHRLEESFLVEEDKKHERHPIFGNIVDEVAYHEKYPTIYHLRKKLVDSTDKADLRLIYLALAHMIKFRGHFLIEGDLNPDNSDVDKLFIQLVQTYNQLFEENPINASGVDAKAILSARLSKSRRLENLIAQLPGEKKNGLFGNLIALSLGLTPNFKSNFDLAEDAKLQLSKDTYDDDLDNLLAQIGDQYADLFLAAKNLSDAILLSDILRVNTEITKAPLSASMIKRYDEHHQDLTLLKALVRQQLPEKYKEIFFDQSKNGYAGYIDGGASQEEFYKFIKPILEKMDGTEELLVKLNREDLLRKQRTFDNGSIPHQIHLGELHAILRRQEDFYPFLKDNREKIEKILTFRIPYYVGPLARGNSRFAWMTRKSEETITPWNFEEVVDKGASAQSFIERMTNFDKNLPNEKVLPKHSLLYEYFTVYNELTKVKYVTEGMRKPAFLSGEQKKAIVDLLFKTNRKVTVKQLKEDYFKKIECFDSVEISGVEDRFNASLGTYHDLLKIIKDKDFLDNEENEDILEDIVLTLTLFEDREMIEERLKTYAHLFDDKVMKQLKRRRYTGWGRLSRKLINGIRDKQSGKTILDFLKSDGFANRNFMQLIHDDSLTFKEDIQKAQVSGQGDSLHEHIANLAGSPAIKKGILQTVKVVDELVKVMGRHKPENIVIEMARENQTTQKGQKNSRERMKRIEEGIKELGSQILKEHPVENTQLQNEKLYLYYLQNGRDMYVDQELDINRLSDYDVDHIVPQSFLKDDSIDNKVLTRSDKARGKSDNVPSEEVVKKMKNYWRQLLNAKLITQRKFDNLTKAERGGLSELDKAGFIKRQLVETRQITKHVAQILDSRMNTKYDENDKLIREVKVITLKSKLVSDFRKDFQFYKVREINNYHHAHDAYLNAVVGTALIKKYPKLESEFVYGDYKVYDVRKMIAKSEQEIGKATAKYFFYSNIMNFFKTEITLANGEIRKRPLIETNGETGEIVWDKGRDFATVRKVLSMPQVNIVKKTEVQTGGFSKESILPKRNSDKLIARKKDWDPKKYGGFDSPTVAYSVLVVAKVEKGKSKKLKSVKELLGITIMERSSFEKNPIDFLEAKGYKEVKKDLIIKLPKYSLFELENGRKRMLASAGELQKGNELALPSKYVNFLYLASHYEKLKGSPEDNEQKQLFVEQHKHYLDEIIEQISEFSKRVILADANLDKVLSAYNKHRDKPIREQAENIIHLFTLTNLGAPAAFKYFDTTIDRKRYTSTKEVLDATLIHQSITGLYETRIDLSQLGGDGGEAAAKGGSPAPGGTLGDQGSRGSDPLPEPRVTLTVEGIPTEFLVNTGAEHSVLTKPMGKMGSKRTVVAGATGSKVYPWTTKRLLKIGQKQVTHSFLVIPECPAPLLGRDLLTKLKAQIQFSTEGPQVTWEDRPAMCLVLNLEEEYRLHEKPVPPSIDPSWLQLFPMVWAEKAGMGLANQVPPVVVELKSDASPVAVRQYPMSKEAREGIRPHIQRFLDLGILVPCQSPWNTPLLPVKKPGTNDYRPVQDLREVNKRVQDIHPTVPNPYNLLSSLPPSHTWYSVLDLKDAFFCLKLHPNSQPLFAFEWRDPEKGNTGQLTWTRLPQGFKNSPTLFNEALHRDLASFRALNPQVVMLQYVDDLLVAAPTYRDCKEGTRRLLQELSKLGYRVSAKKAQLCREEVTYLGYLLKGGKRWLTPARKATVMKIPTPTTPRQVREFLGTAGFCRLWIPGFASLAAPLYPLTRPKVPFTWTEAHQEAFGRIKEALLSAPALALPDLTKPFALYVDEKEGVARGVLTQTLGPWRRPVAYLSKKLDPVASGWPTCLKAIAAVALLLKDADKLTLGQNVLVIAPHNLESIVRQPPDRWMTNARMTHYQSLLLNERVSFAPPAILNPATLLPVESDDTPIHICSEILAEETGTRPDLRDQPLPGVPAWYTDGSSFIMDGRRQAGAAIVDNKRTVWASNLPEGTSAQKAELIALTQALRLAEGKSINIYTDSRYAFATAHVHGAIYKQRGWLTSAGKDIKNKEEILALLEAIHLPKRVAIIHCPGHQRGTDPVATGNRKADEAAKQAAQSTRILTETTKNAGKRTADGSEFEKRTADGSEFESPKKKAKVE

SEQ ID NO: 7218 - protein, 2096 aa, synthetic construct
MPAAKRVKLDGGDKKYSIGLDIGTNSVGWAVITDEYKVPSKKFKVLGNTDRHSIKKNLIGALLFDSGETAEATRLKRTARRRYTRRKNRICYLQEIFSNEMAKVDDSFFHRLEESFLVEEDKKHERHPIFGNIVDEVAYHEKYPTIYHLRKKLVDSTDKADLRLIYLALAHMIKFRGHFLIEGDLNPDNSDVDKLFIQLVQTYNQLFEENPINASGVDAKAILSARLSKSRRLENLIAQLPGEKKNGLFGNLIALSLGLTPNFKSNFDLAEDAKLQLSKDTYDDDLDNLLAQIGDQYADLFLAAKNLSDAILLSDILRVNTEITKAPLSASMIKRYDEHHQDLTLLKALVRQQLPEKYKEIFFDQSKNGYAGYIDGGASQEEFYKFIKPILEKMDGTEELLVKLNREDLLRKQRTFDNGSIPHQIHLGELHAILRRQEDFYPFLKDNREKIEKILTFRIPYYVGPLARGNSRFAWMTRKSEETITPWNFEEVVDKGASAQSFIERMTNFDKNLPNEKVLPKHSLLYEYFTVYNELTKVKYVTEGMRKPAFLSGEQKKAIVDLLFKTNRKVTVKQLKEDYFKKIECFDSVEISGVEDRFNASLGTYHDLLKIIKDKDFLDNEENEDILEDIVLTLTLFEDREMIEERLKTYAHLFDDKVMKQLKRRRYTGWGRLSRKLINGIRDKQSGKTILDFLKSDGFANRNFMQLIHDDSLTFKEDIQKAQVSGQGDSLHEHIANLAGSPAIKKGILQTVKVVDELVKVMGRHKPENIVIEMARENQTTQKGQKNSRERMKRIEEGIKELGSQILKEHPVENTQLQNEKLYLYYLQNGRDMYVDQELDINRLSDYDVDHIVPQSFLKDDSIDNKVLTRSDKARGKSDNVPSEEVVKKMKNYWRQLLNAKLITQRKFDNLTKAERGGLSELDKAGFIKRQLVETRQITKHVAQILDSRMNTKYDENDKLIREVKVITLKSKLVSDFRKDFQFYKVREINNYHHAHDAYLNAVVGTALIKKYPKLESEFVYGDYKVYDVRKMIAKSEQEIGKATAKYFFYSNIMNFFKTEITLANGEIRKRPLIETNGETGEIVWDKGRDFATVRKVLSMPQVNIVKKTEVQTGGFSKESILPKRNSDKLIARKKDWDPKKYGGFDSPTVAYSVLVVAKVEKGKSKKLKSVKELLGITIMERSSFEKNPIDFLEAKGYKEVKKDLIIKLPKYSLFELENGRKRMLASAGELQKGNELALPSKYVNFLYLASHYEKLKGSPEDNEQKQLFVEQHKHYLDEIIEQISEFSKRVILADANLDKVLSAYNKHRDKPIREQAENIIHLFTLTNLGAPAAFKYFDTTIDRKRYTSTKEVLDATLIHQSITGLYETRIDLSQLGGDGGEAAAKGGSPAPGGTLNLEDEYRLYETSAEPEVSPGSTWLSDFPQAWAETGGMGLAVRQAPLIIPLKATSTPVSIKQYPMSQEAKLGIKPHIQRLLDQGILVPCQSPWNTPLLPVKKPGTNDYRPVQDLREVNKRVEDIHPTVPNPYNLLSGLPPSHRWYTVLDLKDAFFCLRLHPTSQPLFAFEWRDPGMGISGQLTWTRLPQGFKNSPTLFNEALHRDLADFRIQHPDLILLQYVDDILLAATSELDCQQGTRALLLTLGNLGYRASAKKAQLCQKQVKYLGYLLKEGQRWLTEARKETVMGQPTPKTPRQLREFLGTAGFCRLWIPGFAEMAAPLYPLTKPGTLFNWGPDQQKAYQEIKQALLTAPALGLPDLTKPFELFVDEKQGYAKGVLTQKLGPWRRPVAYLSKKLDPVAAGWPPCLRMVAAIAVLRKDAGKLTMGQPLVILAPHAVEALVKQPPDRWLSNARMTHYQAMLLDTDRVQFGPVVALNPATLLPLPEEGAPHDCLEILAETHGTRPDLTDQPIPDADHTWYTDGSSFLQEGQRKAGAAVTTETEVIWARALPAGTSAQRAELIALTQALKMAEGKRLNVYTDSRYAFATAHIHGEIYRRRGWLTSEGREIKNKSEILALLKALFLPKRLSIIHCLGHQKGDSAEARGNRLADQAAREAAIKTPPDTSTLLAGKRTADGSEFEKRTADGSEFESPKKKAKVE

SEQ ID NO: 7219 - protein, 2096 aa, synthetic construct
MPAAKRVKLDGGDKKYSIGLDIGTNSVGWAVITDEYKVPSKKFKVLGNTDRHSIKKNLIGALLFDSGETAEATRLKRTARRRYTRRKNRICYLQEIFSNEMAKVDDSFFHRLEESFLVEEDKKHERHPIFGNIVDEVAYHEKYPTIYHLRKKLVDSTDKADLRLIYLALAHMIKFRGHFLIEGDLNPDNSDVDKLFIQLVQTYNQLFEENPINASGVDAKAILSARLSKSRRLENLIAQLPGEKKNGLFGNLIALSLGLTPNFKSNFDLAEDAKLQLSKDTYDDDLDNLLAQIGDQYADLFLAAKNLSDAILLSDILRVNTEITKAPLSASMIKRYDEHHQDLTLLKALVRQQLPEKYKEIFFDQSKNGYAGYIDGGASQEEFYKFIKPILEKMDGTEELLVKLNREDLLRKQRTFDNGSIPHQIHLGELHAILRRQEDFYPFLKDNREKIEKILTFRIPYYVGPLARGNSRFAWMTRKSEETITPWNFEEVVDKGASAQSFIERMTNFDKNLPNEKVLPKHSLLYEYFTVYNELTKVKYVTEGMRKPAFLSGEQKKAIVDLLFKTNRKVTVKQLKEDYFKKIECFDSVEISGVEDRFNASLGTYHDLLKIIKDKDFLDNEENEDILEDIVLTLTLFEDREMIEERLKTYAHLFDDKVMKQLKRRRYTGWGRLSRKLINGIRDKQSGKTILDFLKSDGFANRNFMQLIHDDSLTFKEDIQKAQVSGQGDSLHEHIANLAGSPAIKKGILQTVKVVDELVKVMGRHKPENIVIEMARENQTTQKGQKNSRERMKRIEEGIKELGSQILKEHPVENTQLQNEKLYLYYLQNGRDMYVDQELDINRLSDYDVDHIVPQSFLKDDSIDNKVLTRSDKARGKSDNVPSEEVVKKMKNYWRQLLNAKLITQRKFDNLTKAERGGLSELDKAGFIKRQLVETRQITKHVAQILDSRMNTKYDENDKLIREVKVITLKSKLVSDFRKDFQFYKVREINNYHHAHDAYLNAVVGTALIKKYPKLESEFVYGDYKVYDVRKMIAKSEQEIGKATAKYFFYSNIMNFFKTEITLANGEIRKRPLIETNGETGEIVWDKGRDFATVRKVLSMPQVNIVKKTEVQTGGFSKESILPKRNSDKLIARKKDWDPKKYGGFDSPTVAYSVLVVAKVEKGKSKKLKSVKELLGITIMERSSFEKNPIDFLEAKGYKEVKKDLIIKLPKYSLFELENGRKRMLASAGELQKGNELALPSKYVNFLYLASHYEKLKGSPEDNEQKQLFVEQHKHYLDEIIEQISEFSKRVILADANLDKVLSAYNKHRDKPIREQAENIIHLFTLTNLGAPAAFKYFDTTIDRKRYTSTKEVLDATLIHQSITGLYETRIDLSQLGGDGGEAAAKGGSPAPGGTLNLEDEYRLYETSAEPEVSPGSTWLSDFPQAWAETGGMGLAVRQAPLIIPLKATSTPVSIKQYPMSQEAKLGIKPHIQRLLDQGILVPCQSPWNTPLLPVKKPGTNDYRPVQDLREVNKRVEDIHPTVPNPYNLLSGLPPSHRWYTVLDLKDAFFCLRLHPTSQPLFAFEWRDPGMGISGQLTWTRLPQGFKNSPTLFNEALHRDLADFRIQHPDLILLQYVDDILLAATSELDCQQGTRALLLTLGNLGYRASAKKAQLCQKQVKYLGYLLKEGQRWLTEARKETVMGQPTPKTPRQLREFLGKAGFCRLFIPGFAEMAAPLYPLTKPGTLFNWGPDQQKAYQEIKQALLTAPALGLPDLTKPFELFVDEKQGYAKGVLTQKLGPWRRPVAYLSKKLDPVAAGWPPCLRMVAAIAVLRKDAGKLTMGQPLVILAPHAVEALVKQPPDRWLSNARMTHYQAMLLDTDRVQFGPVVALNPATLLPLPEEGAPHDCLEILAETHGTRPDLTDQPIPDADHTWYTDGSSFLQEGQRKAGAAVTTETEVIWARALPAGTSAQRAELIALTQALKMAEGKRLNVYTDSRYAFATAHIHGEIYRRRGWLTSEGREIKNKSEILALLKALFLPKRLSIIHCLGHQKGDSAEARGNRLADQAAREAAIKTPPDTSTLLAGKRTADGSEFEKRTADGSEFESPKKKAKVE

SEQ ID NO: 7220 - protein, 2096 aa, synthetic construct
MPAAKRVKLDGGDKKYSIGLDIGTNSVGWAVITDEYKVPSKKFKVLGNTDRHSIKKNLIGALLFDSGETAEATRLKRTARRRYTRRKNRICYLQEIFSNEMAKVDDSFFHRLEESFLVEEDKKHERHPIFGNIVDEVAYHEKYPTIYHLRKKLVDSTDKADLRLIYLALAHMIKFRGHFLIEGDLNPDNSDVDKLFIQLVQTYNQLFEENPINASGVDAKAILSARLSKSRRLENLIAQLPGEKKNGLFGNLIALSLGLTPNFKSNFDLAEDAKLQLSKDTYDDDLDNLLAQIGDQYADLFLAAKNLSDAILLSDILRVNTEITKAPLSASMIKRYDEHHQDLTLLKALVRQQLPEKYKEIFFDQSKNGYAGYIDGGASQEEFYKFIKPILEKMDGTEELLVKLNREDLLRKQRTFDNGSIPHQIHLGELHAILRRQEDFYPFLKDNREKIEKILTFRIPYYVGPLARGNSRFAWMTRKSEETITPWNFEEVVDKGASAQSFIERMTNFDKNLPNEKVLPKHSLLYEYFTVYNELTKVKYVTEGMRKPAFLSGEQKKAIVDLLFKTNRKVTVKQLKEDYFKKIECFDSVEISGVEDRFNASLGTYHDLLKIIKDKDFLDNEENEDILEDIVLTLTLFEDREMIEERLKTYAHLFDDKVMKQLKRRRYTGWGRLSRKLINGIRDKQSGKTILDFLKSDGFANRNFMQLIHDDSLTFKEDIQKAQVSGQGDSLHEHIANLAGSPAIKKGILQTVKVVDELVKVMGRHKPENIVIEMARENQTTQKGQKNSRERMKRIEEGIKELGSQILKEHPVENTQLQNEKLYLYYLQNGRDMYVDQELDINRLSDYDVDHIVPQSFLKDDSIDNKVLTRSDKARGKSDNVPSEEVVKKMKNYWRQLLNAKLITQRKFDNLTKAERGGLSELDKAGFIKRQLVETRQITKHVAQILDSRMNTKYDENDKLIREVKVITLKSKLVSDFRKDFQFYKVREINNYHHAHDAYLNAVVGTALIKKYPKLESEFVYGDYKVYDVRKMIAKSEQEIGKATAKYFFYSNIMNFFKTEITLANGEIRKRPLIETNGETGEIVWDKGRDFATVRKVLSMPQVNIVKKTEVQTGGFSKESILPKRNSDKLIARKKDWDPKKYGGFDSPTVAYSVLVVAKVEKGKSKKLKSVKELLGITIMERSSFEKNPIDFLEAKGYKEVKKDLIIKLPKYSLFELENGRKRMLASAGELQKGNELALPSKYVNFLYLASHYEKLKGSPEDNEQKQLFVEQHKHYLDEIIEQISEFSKRVILADANLDKVLSAYNKHRDKPIREQAENIIHLFTLTNLGAPAAFKYFDTTIDRKRYTSTKEVLDATLIHQSITGLYETRIDLSQLGGDGGEAAAKGGSPAPGGTLGIEDEYRLHETSTEPDVSLGSTWLSDFPQAWAETGGMGLAVRQAPLIIPLKATSTPVSIQQYPMSHEARLGIKPHIQRLLDQGILVPCQSPWNTPLLPVKKPGTNDYRPVQDLREVNKRVEDIHPTVPNPYNLLSGLPPSHQWYTVLDLKDAFFCLRLHPTSQPLFAFEWRDPGMGISGQLTWTRLPQGFKNSPTLFNEALHRDLADFRIQHPDLILLQYVDDILLAATSELDCQQGTRALLQTLGDLGYRASAKKAQICQKQVKYLGYLLREGQRWLTEARKETVMGQPVPKTPRQLREFLGTAGFCRLWIPGFAEMAAPLYPLTKPGTLFSWGPDQQKAYQEIKQALLTAPALGLPDLTKPFELFVDEKQGYAKGVLTQKLGPWRRPVAYLSKKLDPVAAGWPPCLRMVAAIAVLTKDAGKLTMGQPLVILAPHAVEALVKQPPDRWLSNARMTHYQAMLLDTDRVQFGPVVALNPATLLPLPEEGAPHDCLEILAETHGTRPDLTDQPIPDADHTWYTDGSSFLQEGQRKAGAAVTTETEVIWAGALPAGTSAQRAELIALTQALKMAEGKRLNVYTDSRYAFATAHIHGEIYRRRGWLTSEGREIKNKSEILALLKALFLPKRLSIIHCLGHQKGDSAEARGNRLADQAAREAAIKTPPDTSTLLAGKRTADGSEFEKRTADGSEFESPKKKAKVE

SEQ ID NO: 7221 - protein, 2096 aa, synthetic construct
MPAAKRVKLDGGDKKYSIGLDIGTNSVGWAVITDEYKVPSKKFKVLGNTDRHSIKKNLIGALLFDSGETAEATRLKRTARRRYTRRKNRICYLQEIFSNEMAKVDDSFFHRLEESFLVEEDKKHERHPIFGNIVDEVAYHEKYPTIYHLRKKLVDSTDKADLRLIYLALAHMIKFRGHFLIEGDLNPDNSDVDKLFIQLVQTYNQLFEENPINASGVDAKAILSARLSKSRRLENLIAQLPGEKKNGLFGNLIALSLGLTPNFKSNFDLAEDAKLQLSKDTYDDDLDNLLAQIGDQYADLFLAAKNLSDAILLSDILRVNTEITKAPLSASMIKRYDEHHQDLTLLKALVRQQLPEKYKEIFFDQSKNGYAGYIDGGASQEEFYKFIKPILEKMDGTEELLVKLNREDLLRKQRTFDNGSIPHQIHLGELHAILRRQEDFYPFLKDNREKIEKILTFRIPYYVGPLARGNSRFAWMTRKSEETITPWNFEEVVDKGASAQSFIERMTNFDKNLPNEKVLPKHSLLYEYFTVYNELTKVKYVTEGMRKPAFLSGEQKKAIVDLLFKTNRKVTVKQLKEDYFKKIECFDSVEISGVEDRFNASLGTYHDLLKIIKDKDFLDNEENEDILEDIVLTLTLFEDREMIEERLKTYAHLFDDKVMKQLKRRRYTGWGRLSRKLINGIRDKQSGKTILDFLKSDGFANRNFMQLIHDDSLTFKEDIQKAQVSGQGDSLHEHIANLAGSPAIKKGILQTVKVVDELVKVMGRHKPENIVIEMARENQTTQKGQKNSRERMKRIEEGIKELGSQILKEHPVENTQLQNEKLYLYYLQNGRDMYVDQELDINRLSDYDVDHIVPQSFLKDDSIDNKVLTRSDKARGKSDNVPSEEVVKKMKNYWRQLLNAKLITQRKFDNLTKAERGGLSELDKAGFIKRQLVETRQITKHVAQILDSRMNTKYDENDKLIREVKVITLKSKLVSDFRKDFQFYKVREINNYHHAHDAYLNAVVGTALIKKYPKLESEFVYGDYKVYDVRKMIAKSEQEIGKATAKYFFYSNIMNFFKTEITLANGEIRKRPLIETNGETGEIVWDKGRDFATVRKVLSMPQVNIVKKTEVQTGGFSKESILPKRNSDKLIARKKDWDPKKYGGFDSPTVAYSVLVVAKVEKGKSKKLKSVKELLGITIMERSSFEKNPIDFLEAKGYKEVKKDLIIKLPKYSLFELENGRKRMLASAGELQKGNELALPSKYVNFLYLASHYEKLKGSPEDNEQKQLFVEQHKHYLDEIIEQISEFSKRVILADANLDKVLSAYNKHRDKPIREQAENIIHLFTLTNLGAPAAFKYFDTTIDRKRYTSTKEVLDATLIHQSITGLYETRIDLSQLGGDGGEAAAKGGSPAPGGTLNIEDEYRLHETSKGPDVPLGSTWLSDFPQAWAETGGMGLAVRQAPLIIPLKATSTPVSIKQYPMSQEARLGIKPHIQRLLDQGILVPCQSPWNTPLLPVKKPGTNDYRPVQDLREVNKRVEDIHPTVPNPYNLLSGLPPSHQWYTVLDLKDAFFCLRLHPTSQSLFAFEWRDPEMGISGQLTWTRLPQGFKNSPTLFDEALHRDLADFRIQHPDLILLQYVDDLLLAATSELDCQQGTRALLQTLGDLGYRASAKKAQICQKQVKYLGYLLKEGQRWLTEARKETVMGQPTPKTPRQLREFLGTAGFCRLWIPGFAEMAAPLYPLTKTGTLFEWGPDQQKAYQEIKQALLTAPALGLPDLTKPFELFVDEKQGYAKGVLTQKLGPWRRPVAYLSKKLDPVAAGWPPCLRMVAAIAVLTKDAGKLTMGQPLVILAPHAVEALVKQPPDRWLSNARMTHYQALLLDTDRVQFGPIVALNPATLLPLPEEGLQHDCLDILAEAHGTRPDLTDQPLPDADHTWYTDGSSFLQEGQRKAGAAVTTETEVVWAKALPAGTSAQRAELIALTQALKMAEGKKLNVYTDSRYAFATAHIHGEIYRRRGLLTSEGKEIKNKDEILALLKALFLPKRLSIIHCPGHQKGNRAEARGNRMADQAAREVATRETPETSTLLAGKRTADGSEFEKRTADGSEFESPKKKAKVE

SEQ ID NO: 7222 - protein, 2096 aa, synthetic construct
MPAAKRVKLDGGDKKYSIGLDIGTNSVGWAVITDEYKVPSKKFKVLGNTDRHSIKKNLIGALLFDSGETAEATRLKRTARRRYTRRKNRICYLQEIFSNEMAKVDDSFFHRLEESFLVEEDKKHERHPIFGNIVDEVAYHEKYPTIYHLRKKLVDSTDKADLRLIYLALAHMIKFRGHFLIEGDLNPDNSDVDKLFIQLVQTYNQLFEENPINASGVDAKAILSARLSKSRRLENLIAQLPGEKKNGLFGNLIALSLGLTPNFKSNFDLAEDAKLQLSKDTYDDDLDNLLAQIGDQYADLFLAAKNLSDAILLSDILRVNTEITKAPLSASMIKRYDEHHQDLTLLKALVRQQLPEKYKEIFFDQSKNGYAGYIDGGASQEEFYKFIKPILEKMDGTEELLVKLNREDLLRKQRTFDNGSIPHQIHLGELHAILRRQEDFYPFLKDNREKIEKILTFRIPYYVGPLARGNSRFAWMTRKSEETITPWNFEEVVDKGASAQSFIERMTNFDKNLPNEKVLPKHSLLYEYFTVYNELTKVKYVTEGMRKPAFLSGEQKKAIVDLLFKTNRKVTVKQLKEDYFKKIECFDSVEISGVEDRFNASLGTYHDLLKIIKDKDFLDNEENEDILEDIVLTLTLFEDREMIEERLKTYAHLFDDKVMKQLKRRRYTGWGRLSRKLINGIRDKQSGKTILDFLKSDGFANRNFMQLIHDDSLTFKEDIQKAQVSGQGDSLHEHIANLAGSPAIKKGILQTVKVVDELVKVMGRHKPENIVIEMARENQTTQKGQKNSRERMKRIEEGIKELGSQILKEHPVENTQLQNEKLYLYYLQNGRDMYVDQELDINRLSDYDVDHIVPQSFLKDDSIDNKVLTRSDKARGKSDNVPSEEVVKKMKNYWRQLLNAKLITQRKFDNLTKAERGGLSELDKAGFIKRQLVETRQITKHVAQILDSRMNTKYDENDKLIREVKVITLKSKLVSDFRKDFQFYKVREINNYHHAHDAYLNAVVGTALIKKYPKLESEFVYGDYKVYDVRKMIAKSEQEIGKATAKYFFYSNIMNFFKTEITLANGEIRKRPLIETNGETGEIVWDKGRDFATVRKVLSMPQVNIVKKTEVQTGGFSKESILPKRNSDKLIARKKDWDPKKYGGFDSPTVAYSVLVVAKVEKGKSKKLKSVKELLGITIMERSSFEKNPIDFLEAKGYKEVKKDLIIKLPKYSLFELENGRKRMLASAGELQKGNELALPSKYVNFLYLASHYEKLKGSPEDNEQKQLFVEQHKHYLDEIIEQISEFSKRVILADANLDKVLSAYNKHRDKPIREQAENIIHLFTLTNLGAPAAFKYFDTTIDRKRYTSTKEVLDATLIHQSITGLYETRIDLSQLGGDGGEAAAKGGSPAPGGTLNIEDEYRLHETSKGPDVPLGSTWLSDFPQAWAETGGMGLAVRQAPLIIPLKATSTPVSIKQYPMSQEARLGIKPHIQRLLDQGILVPCQSPWNTPLLPVKKPGTNDYRPVQDLREVNKRVEDIHPTVPNPYNLLSGLPPSHQWYTVLDLKDAFFCLRLHPTSQSLFAFEWRDPEMGISGQLTWTRLPQGFKNSPTLFNEALHRDLADFRIQHPDLILLQYVDDLLLAATSELDCQQGTRALLQTLGDLGYRASAKKAQICQKQVKYLGYLLKEGQRWLTEARKETVMGQPTPKTPRQLREFLGKAGFCRLFIPGFAEMAAPLYPLTKPGTLFEWGPDQQKAYQEIKQALLTAPALGLPDLTKPFELFVDEKQGYAKGVLTQKLGPWRRPVAYLSKKLDPVAAGWPPCLRMVAAIAVLTKDAGKLTMGQPLVILAPHAVEALVKQPPDRWLSNARMTHYQALLLDTDRVQFGPIVALNPATLLPLPEEGLQHDCLDILAEAHGTRPDLTDQPLPDADHTWYTDGSSFLQEGQRKAGAAVTTETEVVWAKALPAGTSAQRAELIALTQALKMAEGKKLNVYTDSRYAFATAHIHGEIYRRRGWLTSEGKEIKNKDEILALLKALFLPKRLSIIHCPGHQKGNRAEARGNRMADQAAREVATRETPETSTLLAGKRTADGSEFEKRTADGSEFESPKKKAKVE

SEQ ID NO: 7223 - protein, 2087 aa, synthetic construct
MPAAKRVKLDGGDKKYSIGLDIGTNSVGWAVITDEYKVPSKKFKVLGNTDRHSIKKNLIGALLFDSGETAEATRLKRTARRRYTRRKNRICYLQEIFSNEMAKVDDSFFHRLEESFLVEEDKKHERHPIFGNIVDEVAYHEKYPTIYHLRKKLVDSTDKADLRLIYLALAHMIKFRGHFLIEGDLNPDNSDVDKLFIQLVQTYNQLFEENPINASGVDAKAILSARLSKSRRLENLIAQLPGEKKNGLFGNLIALSLGLTPNFKSNFDLAEDAKLQLSKDTYDDDLDNLLAQIGDQYADLFLAAKNLSDAILLSDILRVNTEITKAPLSASMIKRYDEHHQDLTLLKALVRQQLPEKYKEIFFDQSKNGYAGYIDGGASQEEFYKFIKPILEKMDGTEELLVKLNREDLLRKQRTFDNGSIPHQIHLGELHAILRRQEDFYPFLKDNREKIEKILTFRIPYYVGPLARGNSRFAWMTRKSEETITPWNFEEVVDKGASAQSFIERMTNFDKNLPNEKVLPKHSLLYEYFTVYNELTKVKYVTEGMRKPAFLSGEQKKAIVDLLFKTNRKVTVKQLKEDYFKKIECFDSVEISGVEDRFNASLGTYHDLLKIIKDKDFLDNEENEDILEDIVLTLTLFEDREMIEERLKTYAHLFDDKVMKQLKRRRYTGWGRLSRKLINGIRDKQSGKTILDFLKSDGFANRNFMQLIHDDSLTFKEDIQKAQVSGQGDSLHEHIANLAGSPAIKKGILQTVKVVDELVKVMGRHKPENIVIEMARENQTTQKGQKNSRERMKRIEEGIKELGSQILKEHPVENTQLQNEKLYLYYLQNGRDMYVDQELDINRLSDYDVDHIVPQSFLKDDSIDNKVLTRSDKARGKSDNVPSEEVVKKMKNYWRQLLNAKLITQRKFDNLTKAERGGLSELDKAGFIKRQLVETRQITKHVAQILDSRMNTKYDENDKLIREVKVITLKSKLVSDFRKDFQFYKVREINNYHHAHDAYLNAVVGTALIKKYPKLESEFVYGDYKVYDVRKMIAKSEQEIGKATAKYFFYSNIMNFFKTEITLANGEIRKRPLIETNGETGEIVWDKGRDFATVRKVLSMPQVNIVKKTEVQTGGFSKESILPKRNSDKLIARKKDWDPKKYGGFDSPTVAYSVLVVAKVEKGKSKKLKSVKELLGITIMERSSFEKNPIDFLEAKGYKEVKKDLIIKLPKYSLFELENGRKRMLASAGELQKGNELALPSKYVNFLYLASHYEKLKGSPEDNEQKQLFVEQHKHYLDEIIEQISEFSKRVILADANLDKVLSAYNKHRDKPIREQAENIIHLFTLTNLGAPAAFKYFDTTIDRKRYTSTKEVLDATLIHQSITGLYETRIDLSQLGGDGGEAAAKGGSPAPGGIPWLMKKPLQLTTLVPLQEYEERLLKQTMLTGSYKEKLQSLFLKYDALWQHWENQVGHRRIKPHHIATGTVNPRPQKQYPINPKAKASIQTVINDLLKQGVLIQQNSIMNTPVYPVPKPDGKWRMVLDYREVNKTIPLIAAQNQHSAGILSSIFRGKYKTTLDLSNGFWAHSITPESYWLTAFTWLGQQYCWTRLPQGFLNSPALFTADVVDLLKEVPNVQVYVDDIYISHDDPREHLEQLEKVFSLLLNAGYVVSLKKSEIAQHEVEFLGFNITKEGRGLTETFKQKLLNITPPRDLKQLQSILGLLNFARNFIPNFSELVKPLYNIIATANGKYITWTTDNSQQLQNIISMLNSAENLEERNPEVRLIMKVNTSPSAGYIRFYNEFAKRPIMYLNYVYTKAEVKFTNTEKLLTTIHKGLIKALDLGMGQEILVYSPIVSMTKIQKTPLPERKALPIRWITWMSYLEDPRIQFHYDKTLPELQQVPTVTDDIIAKIKHPSEFSMVFYTDGSAIKHPNVNKSHNAGMGIAQVQFKPEFTVINTWSIPLGDHTAQLAEVAAVEFACKKALKIDGPVLIVTDSFYVAESVNKELPYWQSNGFFNNKKKPLKHVSKWKSIADCIQLKPDIIIIHEKGHQPTASTFHTEGNNLADKLATQGSYVVNAGKRTADGSEFEKRTADGSEFESPKKKAKVE

SEQ ID NO: 7224 - protein, 2087 aa, synthetic construct
MPAAKRVKLDGGDKKYSIGLDIGTNSVGWAVITDEYKVPSKKFKVLGNTDRHSIKKNLIGALLFDSGETAEATRLKRTARRRYTRRKNRICYLQEIFSNEMAKVDDSFFHRLEESFLVEEDKKHERHPIFGNIVDEVAYHEKYPTIYHLRKKLVDSTDKADLRLIYLALAHMIKFRGHFLIEGDLNPDNSDVDKLFIQLVQTYNQLFEENPINASGVDAKAILSARLSKSRRLENLIAQLPGEKKNGLFGNLIALSLGLTPNFKSNFDLAEDAKLQLSKDTYDDDLDNLLAQIGDQYADLFLAAKNLSDAILLSDILRVNTEITKAPLSASMIKRYDEHHQDLTLLKALVRQQLPEKYKEIFFDQSKNGYAGYIDGGASQEEFYKFIKPILEKMDGTEELLVKLNREDLLRKQRTFDNGSIPHQIHLGELHAILRRQEDFYPFLKDNREKIEKILTFRIPYYVGPLARGNSRFAWMTRKSEETITPWNFEEVVDKGASAQSFIERMTNFDKNLPNEKVLPKHSLLYEYFTVYNELTKVKYVTEGMRKPAFLSGEQKKAIVDLLFKTNRKVTVKQLKEDYFKKIECFDSVEISGVEDRFNASLGTYHDLLKIIKDKDFLDNEENEDILEDIVLTLTLFEDREMIEERLKTYAHLFDDKVMKQLKRRRYTGWGRLSRKLINGIRDKQSGKTILDFLKSDGFANRNFMQLIHDDSLTFKEDIQKAQVSGQGDSLHEHIANLAGSPAIKKGILQTVKVVDELVKVMGRHKPENIVIEMARENQTTQKGQKNSRERMKRIEEGIKELGSQILKEHPVENTQLQNEKLYLYYLQNGRDMYVDQELDINRLSDYDVDHIVPQSFLKDDSIDNKVLTRSDKARGKSDNVPSEEVVKKMKNYWRQLLNAKLITQRKFDNLTKAERGGLSELDKAGFIKRQLVETRQITKHVAQILDSRMNTKYDENDKLIREVKVITLKSKLVSDFRKDFQFYKVREINNYHHAHDAYLNAVVGTALIKKYPKLESEFVYGDYKVYDVRKMIAKSEQEIGKATAKYFFYSNIMNFFKTEITLANGEIRKRPLIETNGETGEIVWDKGRDFATVRKVLSMPQVNIVKKTEVQTGGFSKESILPKRNSDKLIARKKDWDPKKYGGFDSPTVAYSVLVVAKVEKGKSKKLKSVKELLGITIMERSSFEKNPIDFLEAKGYKEVKKDLIIKLPKYSLFELENGRKRMLASAGELQKGNELALPSKYVNFLYLASHYEKLKGSPEDNEQKQLFVEQHKHYLDEIIEQISEFSKRVILADANLDKVLSAYNKHRDKPIREQAENIIHLFTLTNLGAPAAFKYFDTTIDRKRYTSTKEVLDATLIHQSITGLYETRIDLSQLGGDGGEAAAKGGSPAPGGIPWLMKKPLQLTTLVPLQEYEERLLKQTMLTGSYKEKLQSLFLKYDALWQHWENQVGHRRIKPHHIATGTVNPRPQKQYPINPKAKASIQTVINDLLKQGVLIQQNSIMNTPVYPVPKPDGKWRMVLDYREVNKTIPLIAAQNQHSAGILSSIFRGKYKTTLDLSNGFWAHSITPESYWLTAFTWLGQQYCWTRLPQGFLNSPALFNADVVDLLKEVPNVQVYVDDIYISHDDPREHLEQLEKVFSLLLNAGYVVSLKKSEIAQHEVEFLGFNITKEGRGLTETFKQKLLNITPPRDLKQLQSILGLLNFARNFIPNFSELVKPLYNIIATAPGKYITWTTDNSQQLQNIISMLNSAENLEERNPEVRLIMKVNTSPSAGYIRFYNEFAKRPIMYLNYVYTKAEVKFTNTEKLLTTIHKGLIKALDLGMGQEILVYSPIVSMTKIQKTPLPERKALPIRWITWMSYLEDPRIQFHYDKTLPELQQVPTVTDDIIAKIKHPSEFSMVFYTDGSAIKHPNVNKSHNAGMGIAQVQFKPEFTVINTWSIPLGDHTAQLAEVAAVEFACKKALKIDGPVLIVTDSFYVAESVNKELPYWQSNGFFNNKKKPLKHVSKWKSIADCIQLKPDIIIIHEKGHQPTASTFHTEGNNLADKLATQGSYVVNAGKRTADGSEFEKRTADGSEFESPKKKAKVE

SEQ ID NO: 7225 - protein, 2094 aa, synthetic construct
MPAAKRVKLDGGDKKYSIGLDIGTNSVGWAVITDEYKVPSKKFKVLGNTDRHSIKKNLIGALLFDSGETAEATRLKRTARRRYTRRKNRICYLQEIFSNEMAKVDDSFFHRLEESFLVEEDKKHERHPIFGNIVDEVAYHEKYPTIYHLRKKLVDSTDKADLRLIYLALAHMIKFRGHFLIEGDLNPDNSDVDKLFIQLVQTYNQLFEENPINASGVDAKAILSARLSKSRRLENLIAQLPGEKKNGLFGNLIALSLGLTPNFKSNFDLAEDAKLQLSKDTYDDDLDNLLAQIGDQYADLFLAAKNLSDAILLSDILRVNTEITKAPLSASMIKRYDEHHQDLTLLKALVRQQLPEKYKEIFFDQSKNGYAGYIDGGASQEEFYKFIKPILEKMDGTEELLVKLNREDLLRKQRTFDNGSIPHQIHLGELHAILRRQEDFYPFLKDNREKIEKILTFRIPYYVGPLARGNSRFAWMTRKSEETITPWNFEEVVDKGASAQSFIERMTNFDKNLPNEKVLPKHSLLYEYFTVYNELTKVKYVTEGMRKPAFLSGEQKKAIVDLLFKTNRKVTVKQLKEDYFKKIECFDSVEISGVEDRFNASLGTYHDLLKIIKDKDFLDNEENEDILEDIVLTLTLFEDREMIEERLKTYAHLFDDKVMKQLKRRRYTGWGRLSRKLINGIRDKQSGKTILDFLKSDGFANRNFMQLIHDDSLTFKEDIQKAQVSGQGDSLHEHIANLAGSPAIKKGILQTVKVVDELVKVMGRHKPENIVIEMARENQTTQKGQKNSRERMKRIEEGIKELGSQILKEHPVENTQLQNEKLYLYYLQNGRDMYVDQELDINRLSDYDVDHIVPQSFLKDDSIDNKVLTRSDKARGKSDNVPSEEVVKKMKNYWRQLLNAKLITQRKFDNLTKAERGGLSELDKAGFIKRQLVETRQITKHVAQILDSRMNTKYDENDKLIREVKVITLKSKLVSDFRKDFQFYKVREINNYHHAHDAYLNAVVGTALIKKYPKLESEFVYGDYKVYDVRKMIAKSEQEIGKATAKYFFYSNIMNFFKTEITLANGEIRKRPLIETNGETGEIVWDKGRDFATVRKVLSMPQVNIVKKTEVQTGGFSKESILPKRNSDKLIARKKDWDPKKYGGFDSPTVAYSVLVVAKVEKGKSKKLKSVKELLGITIMERSSFEKNPIDFLEAKGYKEVKKDLIIKLPKYSLFELENGRKRMLASAGELQKGNELALPSKYVNFLYLASHYEKLKGSPEDNEQKQLFVEQHKHYLDEIIEQISEFSKRVILADANLDKVLSAYNKHRDKPIREQAENIIHLFTLTNLGAPAAFKYFDTTIDRKRYTSTKEVLDATLIHQSITGLYETRIDLSQLGGDGGEAAAKGGSPAPGGVLNLEEEYRLHEKPVPSSIDPSWLQLFPTVWAERAGMGLANQVPPVVVELRSGASPVAVRQYPMSKEAREGIRPHIQRFLDLGVLVPCQSPWNTPLLPVKKPGTNDYRPVQDLREINKRVQDIHPTVPNPYNLLSSLPPSHTWYSVLDLKDAFFCLKLHPNSQPLFAFEWRDPEKGNTGQLTWTRLPQGFKNSPTLFDEALHRDLAPFRALNPQVVLLQYVDDLLVAAPTYRDCKEGTQKLLQELSKLGYRVSAKKAQLCQKEVTYLGYLLKEGKRWLTPARKATVMKIPPPTTPRQVREFLGTAGFCRLWIPGFASLAAPLYPLTKESIPFIWTEEHQKAFDRIKEALLSAPALALPDLTKPFTLYVDERAGVARGVLTQTLGPWRRPVAYLSKKLDPVASGWPTCLKAVAAVALLLKDADKLTLGQNVTVIASHSLESIVRQPPDRWMTNARMTHYQSLLLNERVSFAPPAVLNPATLLPVESEATPVHRCSEILAEETGTRRDLKDQPLPGVPAWYTDGSSFIAEGKRRAGAAIVDGKRTVWASSLPEGTSAQKAELVALTQALRLAEGKDINIYTDSRYAFATAHIHGAIYKQRGLLTSAGKDIKNKEEILALLEAIHLPKRVAIIHCPGHQKGNDPVATGNRRADEAAKQAALSTRVLAETTKPAGKRTADGSEFEKRTADGSEFESPKKKAKVE

SEQ ID NO: 7226 - protein, 2094 aa, synthetic construct
MPAAKRVKLDGGDKKYSIGLDIGTNSVGWAVITDEYKVPSKKFKVLGNTDRHSIKKNLIGALLFDSGETAEATRLKRTARRRYTRRKNRICYLQEIFSNEMAKVDDSFFHRLEESFLVEEDKKHERHPIFGNIVDEVAYHEKYPTIYHLRKKLVDSTDKADLRLIYLALAHMIKFRGHFLIEGDLNPDNSDVDKLFIQLVQTYNQLFEENPINASGVDAKAILSARLSKSRRLENLIAQLPGEKKNGLFGNLIALSLGLTPNFKSNFDLAEDAKLQLSKDTYDDDLDNLLAQIGDQYADLFLAAKNLSDAILLSDILRVNTEITKAPLSASMIKRYDEHHQDLTLLKALVRQQLPEKYKEIFFDQSKNGYAGYIDGGASQEEFYKFIKPILEKMDGTEELLVKLNREDLLRKQRTFDNGSIPHQIHLGELHAILRRQEDFYPFLKDNREKIEKILTFRIPYYVGPLARGNSRFAWMTRKSEETITPWNFEEVVDKGASAQSFIERMTNFDKNLPNEKVLPKHSLLYEYFTVYNELTKVKYVTEGMRKPAFLSGEQKKAIVDLLFKTNRKVTVKQLKEDYFKKIECFDSVEISGVEDRFNASLGTYHDLLKIIKDKDFLDNEENEDILEDIVLTLTLFEDREMIEERLKTYAHLFDDKVMKQLKRRRYTGWGRLSRKLINGIRDKQSGKTILDFLKSDGFANRNFMQLIHDDSLTFKEDIQKAQVSGQGDSLHEHIANLAGSPAIKKGILQTVKVVDELVKVMGRHKPENIVIEMARENQTTQKGQKNSRERMKRIEEGIKELGSQILKEHPVENTQLQNEKLYLYYLQNGRDMYVDQELDINRLSDYDVDHIVPQSFLKDDSIDNKVLTRSDKARGKSDNVPSEEVVKKMKNYWRQLLNAKLITQRKFDNLTKAERGGLSELDKAGFIKRQLVETRQITKHVAQILDSRMNTKYDENDKLIREVKVITLKSKLVSDFRKDFQFYKVREINNYHHAHDAYLNAVVGTALIKKYPKLESEFVYGDYKVYDVRKMIAKSEQEIGKATAKYFFYSNIMNFFKTEITLANGEIRKRPLIETNGETGEIVWDKGRDFATVRKVLSMPQVNIVKKTEVQTGGFSKESILPKRNSDKLIARKKDWDPKKYGGFDSPTVAYSVLVVAKVEKGKSKKLKSVKELLGITIMERSSFEKNPIDFLEAKGYKEVKKDLIIKLPKYSLFELENGRKRMLASAGELQKGNELALPSKYVNFLYLASHYEKLKGSPEDNEQKQLFVEQHKHYLDEIIEQISEFSKRVILADANLDKVLSAYNKHRDKPIREQAENIIHLFTLTNLGAPAAFKYFDTTIDRKRYTSTKEVLDATLIHQSITGLYETRIDLSQLGGDGGEAAAKGGSPAPGGVLNLEEEYRLHEKPVPSSIDPSWLQLFPTVWAERAGMGLANQVPPVVVELRSGASPVAVRQYPMSKEAREGIRPHIQRFLDLGVLVPCQSPWNTPLLPVKKPGTNDYRPVQDLREINKRVQDIHPTVPNPYNLLSSLPPSHTWYSVLDLKDAFFCLKLHPNSQPLFAFEWRDPEKGNTGQLTWTRLPQGFKNSPTLFNEALHRDLAPFRALNPQVVLLQYVDDLLVAAPTYRDCKEGTQKLLQELSKLGYRVSAKKAQLCQKEVTYLGYLLKEGKRWLTPARKATVMKIPPPTTPRQVREFLGKAGFCRLFIPGFASLAAPLYPLTKPSIPFIWTEEHQKAFDRIKEALLSAPALALPDLTKPFTLYVDERAGVARGVLTQTLGPWRRPVAYLSKKLDPVASGWPTCLKAVAAVALLLKDADKLTLGQNVTVIASHSLESIVRQPPDRWMTNARMTHYQSLLLNERVSFAPPAVLNPATLLPVESEATPVHRCSEILAEETGTRRDLKDQPLPGVPAWYTDGSSFIAEGKRRAGAAIVDGKRTVWASSLPEGTSAQKAELVALTQALRLAEGKDINIYTDSRYAFATAHIHGAIYKQRGWLTSAGKDIKNKEEILALLEAIHLPKRVAIIHCPGHQKGNDPVATGNRRADEAAKQAALSTRVLAETTKPAGKRTADGSEFEKRTADGSEFESPKKKAKVE

SEQ ID NO: 7227 - protein, 2096 aa, synthetic construct
MPAAKRVKLDGGDKKYSIGLDIGTNSVGWAVITDEYKVPSKKFKVLGNTDRHSIKKNLIGALLFDSGETAEATRLKRTARRRYTRRKNRICYLQEIFSNEMAKVDDSFFHRLEESFLVEEDKKHERHPIFGNIVDEVAYHEKYPTIYHLRKKLVDSTDKADLRLIYLALAHMIKFRGHFLIEGDLNPDNSDVDKLFIQLVQTYNQLFEENPINASGVDAKAILSARLSKSRRLENLIAQLPGEKKNGLFGNLIALSLGLTPNFKSNFDLAEDAKLQLSKDTYDDDLDNLLAQIGDQYADLFLAAKNLSDAILLSDILRVNTEITKAPLSASMIKRYDEHHQDLTLLKALVRQQLPEKYKEIFFDQSKNGYAGYIDGGASQEEFYKFIKPILEKMDGTEELLVKLNREDLLRKQRTFDNGSIPHQIHLGELHAILRRQEDFYPFLKDNREKIEKILTFRIPYYVGPLARGNSRFAWMTRKSEETITPWNFEEVVDKGASAQSFIERMTNFDKNLPNEKVLPKHSLLYEYFTVYNELTKVKYVTEGMRKPAFLSGEQKKAIVDLLFKTNRKVTVKQLKEDYFKKIECFDSVEISGVEDRFNASLGTYHDLLKIIKDKDFLDNEENEDILEDIVLTLTLFEDREMIEERLKTYAHLFDDKVMKQLKRRRYTGWGRLSRKLINGIRDKQSGKTILDFLKSDGFANRNFMQLIHDDSLTFKEDIQKAQVSGQGDSLHEHIANLAGSPAIKKGILQTVKVVDELVKVMGRHKPENIVIEMARENQTTQKGQKNSRERMKRIEEGIKELGSQILKEHPVENTQLQNEKLYLYYLQNGRDMYVDQELDINRLSDYDVDHIVPQSFLKDDSIDNKVLTRSDKARGKSDNVPSEEVVKKMKNYWRQLLNAKLITQRKFDNLTKAERGGLSELDKAGFIKRQLVETRQITKHVAQILDSRMNTKYDENDKLIREVKVITLKSKLVSDFRKDFQFYKVREINNYHHAHDAYLNAVVGTALIKKYPKLESEFVYGDYKVYDVRKMIAKSEQEIGKATAKYFFYSNIMNFFKTEITLANGEIRKRPLIETNGETGEIVWDKGRDFATVRKVLSMPQVNIVKKTEVQTGGFSKESILPKRNSDKLIARKKDWDPKKYGGFDSPTVAYSVLVVAKVEKGKSKKLKSVKELLGITIMERSSFEKNPIDFLEAKGYKEVKKDLIIKLPKYSLFELENGRKRMLASAGELQKGNELALPSKYVNFLYLASHYEKLKGSPEDNEQKQLFVEQHKHYLDEIIEQISEFSKRVILADANLDKVLSAYNKHRDKPIREQAENIIHLFTLTNLGAPAAFKYFDTTIDRKRYTSTKEVLDATLIHQSITGLYETRIDLSQLGGDGGEAAAKGGSPAPGGTLNIEDEYRLHETSKEPDVPLGSTWLSDFPQAWAETGGMGLAVRQAPLIIPLKATSTPVSIKQYPMSQEARLGIKPHIQRLLDQGILVPCQSPWNTPLLPVKKPGTNDYRPVQDLREVNKRVEDIHPTVPNPYNLLSGLPPSHQWYTVLDLKDAFFCLRLHPTSQPLFAFEWRDPEMGISGQLTWTRLPQGFKNSPTLFNEALHRDLADFRIQHPDLILLQYVDDLLLAATSEQDCQRGTRALLQTLGNLGYRASAKKAQICQKQVKYLGYLLKEGQRWLTEARKETVMGQPTPKTPRQLREFLGTAGFCRLWIPGFAEMAAPLYPLTKPGTLFNWGPDQQKAYQEIKQALLTAPALGLPDLTKPFELFVDEKQGYAKGVLTQKLGPWRRPVAYLSKKLDPVAAGWPPCLRMVAAIAVLTKDAGKLTMGQPLVILAPHAVEALVKQPPDRWLSNARMTHYQAMLLDTDRVQFGPVVALNPATLLPLPEKEAPHDCLEILAETHGTRPDLTDQPIPDADYTWYTDGSSFLQEGQRRAGAAVTTETEVIWARALPAGTSAQRAELIALTQALKMAEGKKLNVYTDSRYAFATAHVHGEIYRRRGWLTSEGREIKNKNEILALLKALFLPKRLSIIHCPGHQKGNSAEARGNRMADQAAREAAMKAVLETSTLLAGKRTADGSEFEKRTADGSEFESPKKKAKVE

SEQ ID NO: 7228 - protein, 2087 aa, synthetic construct
MPAAKRVKLDGGDKKYSIGLDIGTNSVGWAVITDEYKVPSKKFKVLGNTDRHSIKKNLIGALLFDSGETAEATRLKRTARRRYTRRKNRICYLQEIFSNEMAKVDDSFFHRLEESFLVEEDKKHERHPIFGNIVDEVAYHEKYPTIYHLRKKLVDSTDKADLRLIYLALAHMIKFRGHFLIEGDLNPDNSDVDKLFIQLVQTYNQLFEENPINASGVDAKAILSARLSKSRRLENLIAQLPGEKKNGLFGNLIALSLGLTPNFKSNFDLAEDAKLQLSKDTYDDDLDNLLAQIGDQYADLFLAAKNLSDAILLSDILRVNTEITKAPLSASMIKRYDEHHQDLTLLKALVRQQLPEKYKEIFFDQSKNGYAGYIDGGASQEEFYKFIKPILEKMDGTEELLVKLNREDLLRKQRTFDNGSIPHQIHLGELHAILRRQEDFYPFLKDNREKIEKILTFRIPYYVGPLARGNSRFAWMTRKSEETITPWNFEEVVDKGASAQSFIERMTNFDKNLPNEKVLPKHSLLYEYFTVYNELTKVKYVTEGMRKPAFLSGEQKKAIVDLLFKTNRKVTVKQLKEDYFKKIECFDSVEISGVEDRFNASLGTYHDLLKIIKDKDFLDNEENEDILEDIVLTLTLFEDREMIEERLKTYAHLFDDKVMKQLKRRRYTGWGRLSRKLINGIRDKQSGKTILDFLKSDGFANRNFMQLIHDDSLTFKEDIQKAQVSGQGDSLHEHIANLAGSPAIKKGILQTVKVVDELVKVMGRHKPENIVIEMARENQTTQKGQKNSRERMKRIEEGIKELGSQILKEHPVENTQLQNEKLYLYYLQNGRDMYVDQELDINRLSDYDVDHIVPQSFLKDDSIDNKVLTRSDKARGKSDNVPSEEVVKKMKNYWRQLLNAKLITQRKFDNLTKAERGGLSELDKAGFIKRQLVETRQITKHVAQILDSRMNTKYDENDKLIREVKVITLKSKLVSDFRKDFQFYKVREINNYHHAHDAYLNAVVGTALIKKYPKLESEFVYGDYKVYDVRKMIAKSEQEIGKATAKYFFYSNIMNFFKTEITLANGEIRKRPLIETNGETGEIVWDKGRDFATVRKVLSMPQVNIVKKTEVQTGGFSKESILPKRNSDKLIARKKDWDPKKYGGFDSPTVAYSVLVVAKVEKGKSKKLKSVKELLGITIMERSSFEKNPIDFLEAKGYKEVKKDLIIKLPKYSLFELENGRKRMLASAGELQKGNELALPSKYVNFLYLASHYEKLKGSPEDNEQKQLFVEQHKHYLDEIIEQISEFSKRVILADANLDKVLSAYNKHRDKPIREQAENIIHLFTLTNLGAPAAFKYFDTTIDRKRYTSTKEVLDATLIHQSITGLYETRIDLSQLGGDGGEAAAKPAPGGSGGVPWILKKPLELTIKLDLEEQQGTLLNNSILSKKGKEELKQLFEKYSALWQSWENQVGHRRIRPHKIATGTVKPTPQKQYHINPKAKPDIQIVINDLLKQGVLIQKESTMNTPVYPVPKPNGRWRMVLDYRAVNKVTPLIAVQNQHSYGILGSLFKGRYKTTIDLSNGFWAHPIVPEDYWITAFTWQGKQYCWTVLPQGFLNSPGLFNGDVVDLLQGIPNVEVYVDDVYISHDSEKEHLEYLDILFNRLKEAGYIISLKKSNIANSIVDFLGFQITNEGRGLTDTFKEKLENITAPTTLKQLQSILGLLNFARNFIPDFTELIAPLYALIPKSPKNYVPWQIEHSTTLETLITKLNGAEYLQGRKGDKTLIMKVNASYTTGYIRYYNEGEKKPISYVSIVFSKTELKFTELEKLLTTVHKGLLKALDLSMGQNIHVYSPIVSMQNIQKTPQTAKKALASRWLSWLSYLEDPRIRFFYDPQMPALKDLPAVDTGKDNKKHPSNFQHIFYTDGSAITSPTKEGHLNAGMGIVYFINKDGNLQKQQEWSISLGNHTAQFAEIAAFEFALKKCLPLGGNILVVTDSNYVAKAYNEELDVWASNGFVNNRKKPLKHISKWKSVADLKRLRPDVVVTHEPGHQKLDSSPHAYGNNLADQLATQASFKVHAGKRTADGSEFEKRTADGSEFESPKKKAKVE

SEQ ID NO: 7229 - protein, 2176 aa, synthetic construct
MPAAKRVKLDGGDKKYSIGLDIGTNSVGWAVITDEYKVPSKKFKVLGNTDRHSIKKNLIGALLFDSGETAEATRLKRTARRRYTRRKNRICYLQEIFSNEMAKVDDSFFHRLEESFLVEEDKKHERHPIFGNIVDEVAYHEKYPTIYHLRKKLVDSTDKADLRLIYLALAHMIKFRGHFLIEGDLNPDNSDVDKLFIQLVQTYNQLFEENPINASGVDAKAILSARLSKSRRLENLIAQLPGEKKNGLFGNLIALSLGLTPNFKSNFDLAEDAKLQLSKDTYDDDLDNLLAQIGDQYADLFLAAKNLSDAILLSDILRVNTEITKAPLSASMIKRYDEHHQDLTLLKALVRQQLPEKYKEIFFDQSKNGYAGYIDGGASQEEFYKFIKPILEKMDGTEELLVKLNREDLLRKQRTFDNGSIPHQIHLGELHAILRRQEDFYPFLKDNREKIEKILTFRIPYYVGPLARGNSRFAWMTRKSEETITPWNFEEVVDKGASAQSFIERMTNFDKNLPNEKVLPKHSLLYEYFTVYNELTKVKYVTEGMRKPAFLSGEQKKAIVDLLFKTNRKVTVKQLKEDYFKKIECFDSVEISGVEDRFNASLGTYHDLLKIIKDKDFLDNEENEDILEDIVLTLTLFEDREMIEERLKTYAHLFDDKVMKQLKRRRYTGWGRLSRKLINGIRDKQSGKTILDFLKSDGFANRNFMQLIHDDSLTFKEDIQKAQVSGQGDSLHEHIANLAGSPAIKKGILQTVKVVDELVKVMGRHKPENIVIEMARENQTTQKGQKNSRERMKRIEEGIKELGSQILKEHPVENTQLQNEKLYLYYLQNGRDMYVDQELDINRLSDYDVDHIVPQSFLKDDSIDNKVLTRSDKARGKSDNVPSEEVVKKMKNYWRQLLNAKLITQRKFDNLTKAERGGLSELDKAGFIKRQLVETRQITKHVAQILDSRMNTKYDENDKLIREVKVITLKSKLVSDFRKDFQFYKVREINNYHHAHDAYLNAVVGTALIKKYPKLESEFVYGDYKVYDVRKMIAKSEQEIGKATAKYFFYSNIMNFFKTEITLANGEIRKRPLIETNGETGEIVWDKGRDFATVRKVLSMPQVNIVKKTEVQTGGFSKESILPKRNSDKLIARKKDWDPKKYGGFDSPTVAYSVLVVAKVEKGKSKKLKSVKELLGITIMERSSFEKNPIDFLEAKGYKEVKKDLIIKLPKYSLFELENGRKRMLASAGELQKGNELALPSKYVNFLYLASHYEKLKGSPEDNEQKQLFVEQHKHYLDEIIEQISEFSKRVILADANLDKVLSAYNKHRDKPIREQAENIIHLFTLTNLGAPAAFKYFDTTIDRKRYTSTKEVLDATLIHQSITGLYETRIDLSQLGGDGGEAAAKPAPGGSGGMNPLQLLQPLPAEIKGTKLLAHWNSGATITCIPESFLEDEQPIKKTLIKTIHGEKQQNVYYVTFKVKGRKVEAEVIASPYEYILLSPTDVPWLTQQPLQLTILVPLQEYQEKILSKTALPEDQKQQLKTLFVKYDNLWQHWENQVGHRKIRPHNIATGDYPPRPQKQYPINPKAKPSIQIVIDDLLKQGVLTPQNSTMNTPVYPVPKPDGRWRMVLDYREVNKTIPLTAAQNQHSAGILATIVRQKYKTTLDLANGFWAHPITPESYWLTAFTWQGKQYCWTRLPQGFLNSPALFNADVVDLLKEIPNVQVYVDDIYLSHDDPKEHVQQLEKVFQILLQAGYVVSLKKSEIGQKTVEFLGFNITKEGRGLTDTFKTKLLNITPPKDLKQLQSILGLLNFARNFIPNFAELVQPLYNLIAPAKGKYIEWSEENTKQLNMVIEALNTASNLEERLPEQRLVIKVNTSPSAGYVRYYNETGKKPIMYLNYVFSKAELKFSMLEKLLTTMHKALIKAMDLAMGQEILVYSPIVSMTKIQKTPLPERKALPIRWITWMTYLEDPRIQFHYDKTLPELKHIPDVYTSSQSPVKHPSQYEGVFYTDGSAIKSPDPTKSNNAGMGIVHATYKPEYQVLNQWSIPLGNHTAQMAEIAAVEFACKKALKIPGPVLVITDSFYVAESANKELPYWKSNGFVNNKKKPLKHISKWKSIAECLSMKPDITIQHEKGISLQIPVFILKGNALADKLATQGSYVVNAGKRTADGSEFEKRTADGSEFESPKKKAKVE

SEQ ID NO: 7230 - protein, 2094 aa, synthetic construct
MPAAKRVKLDGGDKKYSIGLDIGTNSVGWAVITDEYKVPSKKFKVLGNTDRHSIKKNLIGALLFDSGETAEATRLKRTARRRYTRRKNRICYLQEIFSNEMAKVDDSFFHRLEESFLVEEDKKHERHPIFGNIVDEVAYHEKYPTIYHLRKKLVDSTDKADLRLIYLALAHMIKFRGHFLIEGDLNPDNSDVDKLFIQLVQTYNQLFEENPINASGVDAKAILSARLSKSRRLENLIAQLPGEKKNGLFGNLIALSLGLTPNFKSNFDLAEDAKLQLSKDTYDDDLDNLLAQIGDQYADLFLAAKNLSDAILLSDILRVNTEITKAPLSASMIKRYDEHHQDLTLLKALVRQQLPEKYKEIFFDQSKNGYAGYIDGGASQEEFYKFIKPILEKMDGTEELLVKLNREDLLRKQRTFDNGSIPHQIHLGELHAILRRQEDFYPFLKDNREKIEKILTFRIPYYVGPLARGNSRFAWMTRKSEETITPWNFEEVVDKGASAQSFIERMTNFDKNLPNEKVLPKHSLLYEYFTVYNELTKVKYVTEGMRKPAFLSGEQKKAIVDLLFKTNRKVTVKQLKEDYFKKIECFDSVEISGVEDRFNASLGTYHDLLKIIKDKDFLDNEENEDILEDIVLTLTLFEDREMIEERLKTYAHLFDDKVMKQLKRRRYTGWGRLSRKLINGIRDKQSGKTILDFLKSDGFANRNFMQLIHDDSLTFKEDIQKAQVSGQGDSLHEHIANLAGSPAIKKGILQTVKVVDELVKVMGRHKPENIVIEMARENQTTQKGQKNSRERMKRIEEGIKELGSQILKEHPVENTQLQNEKLYLYYLQNGRDMYVDQELDINRLSDYDVDHIVPQSFLKDDSIDNKVLTRSDKARGKSDNVPSEEVVKKMKNYWRQLLNAKLITQRKFDNLTKAERGGLSELDKAGFIKRQLVETRQITKHVAQILDSRMNTKYDENDKLIREVKVITLKSKLVSDFRKDFQFYKVREINNYHHAHDAYLNAVVGTALIKKYPKLESEFVYGDYKVYDVRKMIAKSEQEIGKATAKYFFYSNIMNFFKTEITLANGEIRKRPLIETNGETGEIVWDKGRDFATVRKVLSMPQVNIVKKTEVQTGGFSKESILPKRNSDKLIARKKDWDPKKYGGFDSPTVAYSVLVVAKVEKGKSKKLKSVKELLGITIMERSSFEKNPIDFLEAKGYKEVKKDLIIKLPKYSLFELENGRKRMLASAGELQKGNELALPSKYVNFLYLASHYEKLKGSPEDNEQKQLFVEQHKHYLDEIIEQISEFSKRVILADANLDKVLSAYNKHRDKPIREQAENIIHLFTLTNLGAPAAFKYFDTTIDRKRYTSTKEVLDATLIHQSITGLYETRIDLSQLGGDGGEAAAKPAPGGSGGVLNLEEEYRLHEKPVPSSIDPSWLQLFPTVWAERAGMGLANQVPPVVVELRSGASPVAVRQYPMSKEAREGIRPHIQKFLDLGVLVPCRSPWNTPLLPVKKPGTNDYRPVQDLREINKRVQDIHPTVPNPYNLLSSLPPSYTWYSVLDLKDAFFCLRLHPNSQPLFAFEWKDPEKGNTGQLTWTRLPQGFKNSPTLFNEALHRDLAPFRALNPQVVLLQYVDDLLVAAPTYEDCKKGTQKLLQELSKLGYRVSAKKAQLCQREVTYLGYLLKEGKRWLTPARKATVMKIPVPTTPRQVREFLGTAGFCRLWIPGFASLAAPLYPLTKPSIPFIWTEEHQQAFDHIKKALLSAPALALPDLTKPFTLYIDERAGVARGVLTQTLGPWRRPVAYLSKKLDPVASGWPTCLKAVAAVALLLKDADKLTLGQNVTVIASHSLESIVRQPPDRWMTNARMTHYQSLLLNERVSFAPPAVLNPATLLPVESEATPVHRCSEILAEETGTRRDLEDQPLPGVPTWYTDGSSFITEGKRRAGAPIVDGKRTVWASSLPEGTSAQKAELVALTQALRLAEGKNINIYTDSRYAFATAHIHGAIYKQRGWLTSAGKDIKNKEEILALLEAIHLPRRVAIIHCPGHQRGSNPVATGNRRADEAAKQAALSTRVLAGTTKPAGKRTADGSEFEKRTADGSEFESPKKKAKVE

SEQ ID NO: 7231 - protein, 2127 aa, synthetic construct
MPAAKRVKLDGGDKKYSIGLDIGTNSVGWAVITDEYKVPSKKFKVLGNTDRHSIKKNLIGALLFDSGETAEATRLKRTARRRYTRRKNRICYLQEIFSNEMAKVDDSFFHRLEESFLVEEDKKHERHPIFGNIVDEVAYHEKYPTIYHLRKKLVDSTDKADLRLIYLALAHMIKFRGHFLIEGDLNPDNSDVDKLFIQLVQTYNQLFEENPINASGVDAKAILSARLSKSRRLENLIAQLPGEKKNGLFGNLIALSLGLTPNFKSNFDLAEDAKLQLSKDTYDDDLDNLLAQIGDQYADLFLAAKNLSDAILLSDILRVNTEITKAPLSASMIKRYDEHHQDLTLLKALVRQQLPEKYKEIFFDQSKNGYAGYIDGGASQEEFYKFIKPILEKMDGTEELLVKLNREDLLRKQRTFDNGSIPHQIHLGELHAILRRQEDFYPFLKDNREKIEKILTFRIPYYVGPLARGNSRFAWMTRKSEETITPWNFEEVVDKGASAQSFIERMTNFDKNLPNEKVLPKHSLLYEYFTVYNELTKVKYVTEGMRKPAFLSGEQKKAIVDLLFKTNRKVTVKQLKEDYFKKIECFDSVEISGVEDRFNASLGTYHDLLKIIKDKDFLDNEENEDILEDIVLTLTLFEDREMIEERLKTYAHLFDDKVMKQLKRRRYTGWGRLSRKLINGIRDKQSGKTILDFLKSDGFANRNFMQLIHDDSLTFKEDIQKAQVSGQGDSLHEHIANLAGSPAIKKGILQTVKVVDELVKVMGRHKPENIVIEMARENQTTQKGQKNSRERMKRIEEGIKELGSQILKEHPVENTQLQNEKLYLYYLQNGRDMYVDQELDINRLSDYDVDHIVPQSFLKDDSIDNKVLTRSDKARGKSDNVPSEEVVKKMKNYWRQLLNAKLITQRKFDNLTKAERGGLSELDKAGFIKRQLVETRQITKHVAQILDSRMNTKYDENDKLIREVKVITLKSKLVSDFRKDFQFYKVREINNYHHAHDAYLNAVVGTALIKKYPKLESEFVYGDYKVYDVRKMIAKSEQEIGKATAKYFFYSNIMNFFKTEITLANGEIRKRPLIETNGETGEIVWDKGRDFATVRKVLSMPQVNIVKKTEVQTGGFSKESILPKRNSDKLIARKKDWDPKKYGGFDSPTVAYSVLVVAKVEKGKSKKLKSVKELLGITIMERSSFEKNPIDFLEAKGYKEVKKDLIIKLPKYSLFELENGRKRMLASAGELQKGNELALPSKYVNFLYLASHYEKLKGSPEDNEQKQLFVEQHKHYLDEIIEQISEFSKRVILADANLDKVLSAYNKHRDKPIREQAENIIHLFTLTNLGAPAAFKYFDTTIDRKRYTSTKEVLDATLIHQSITGLYETRIDLSQLGGDGGEAAAKPAPGGSGGLLGRDLLTKLKAQIQFSTEGPQVTWEDRPAMCLVLNLEEEYRLHEKPVPPSIDPSWLQLFPMVWAEKAGMGLANQVPPVVVELKSDASPVAVRQYPMSKEAREGIRPHIQRFLDLGILVPCQSPWNTPLLPVKKPGTNDYRPVQDLREVNKRVQDIHPTVPNPYNLLSSLPPSHTWYSVLDLKDAFFCLKLHPNSQPLFAFEWRDPEKGNTGQLTWTRLPQGFKNSPTLFNEALHRDLASFRALNPQVVMLQYVDDLLVAAPTYRDCKEGTRRLLQELSKLGYRVSAKKAQLCREEVTYLGYLLKGGKRWLTPARKATVMKIPTPTTPRQVREFLGTAGFCRLWIPGFASLAAPLYPLTRPKVPFTWTEAHQEAFGRIKEALLSAPALALPDLTKPFALYVDEKEGVARGVLTQTLGPWRRPVAYLSKKLDPVASGWPTCLKAIAAVALLLKDADKLTLGQNVLVIAPHNLESIVRQPPDRWMTNARMTHYQSLLLNERVSFAPPAILNPATLLPVESDDTPIHICSEILAEETGTRPDLRDQPLPGVPAWYTDGSSFIMDGRRQAGAAIVDNKRTVWASNLPEGTSAQKAELIALTQALRLAEGKSINIYTDSRYAFATAHVHGAIYKQRGWLTSAGKDIKNKEEILALLEAIHLPKRVAIIHCPGHQRGTDPVATGNRKADEAAKQAAQSTRILTETTKNAGKRTADGSEFEKRTADGSEFESPKKKAKVE

SEQ ID NO: 7232 - protein, 2218 aa, synthetic construct
MPAAKRVKLDGGDKKYSIGLDIGTNSVGWAVITDEYKVPSKKFKVLGNTDRHSIKKNLIGALLFDSGETAEATRLKRTARRRYTRRKNRICYLQEIFSNEMAKVDDSFFHRLEESFLVEEDKKHERHPIFGNIVDEVAYHEKYPTIYHLRKKLVDSTDKADLRLIYLALAHMIKFRGHFLIEGDLNPDNSDVDKLFIQLVQTYNQLFEENPINASGVDAKAILSARLSKSRRLENLIAQLPGEKKNGLFGNLIALSLGLTPNFKSNFDLAEDAKLQLSKDTYDDDLDNLLAQIGDQYADLFLAAKNLSDAILLSDILRVNTEITKAPLSASMIKRYDEHHQDLTLLKALVRQQLPEKYKEIFFDQSKNGYAGYIDGGASQEEFYKFIKPILEKMDGTEELLVKLNREDLLRKQRTFDNGSIPHQIHLGELHAILRRQEDFYPFLKDNREKIEKILTFRIPYYVGPLARGNSRFAWMTRKSEETITPWNFEEVVDKGASAQSFIERMTNFDKNLPNEKVLPKHSLLYEYFTVYNELTKVKYVTEGMRKPAFLSGEQKKAIVDLLFKTNRKVTVKQLKEDYFKKIECFDSVEISGVEDRFNASLGTYHDLLKIIKDKDFLDNEENEDILEDIVLTLTLFEDREMIEERLKTYAHLFDDKVMKQLKRRRYTGWGRLSRKLINGIRDKQSGKTILDFLKSDGFANRNFMQLIHDDSLTFKEDIQKAQVSGQGDSLHEHIANLAGSPAIKKGILQTVKVVDELVKVMGRHKPENIVIEMARENQTTQKGQKNSRERMKRIEEGIKELGSQILKEHPVENTQLQNEKLYLYYLQNGRDMYVDQELDINRLSDYDVDHIVPQSFLKDDSIDNKVLTRSDKARGKSDNVPSEEVVKKMKNYWRQLLNAKLITQRKFDNLTKAERGGLSELDKAGFIKRQLVETRQITKHVAQILDSRMNTKYDENDKLIREVKVITLKSKLVSDFRKDFQFYKVREINNYHHAHDAYLNAVVGTALIKKYPKLESEFVYGDYKVYDVRKMIAKSEQEIGKATAKYFFYSNIMNFFKTEITLANGEIRKRPLIETNGETGEIVWDKGRDFATVRKVLSMPQVNIVKKTEVQTGGFSKESILPKRNSDKLIARKKDWDPKKYGGFDSPTVAYSVLVVAKVEKGKSKKLKSVKELLGITIMERSSFEKNPIDFLEAKGYKEVKKDLIIKLPKYSLFELENGRKRMLASAGELQKGNELALPSKYVNFLYLASHYEKLKGSPEDNEQKQLFVEQHKHYLDEIIEQISEFSKRVILADANLDKVLSAYNKHRDKPIREQAENIIHLFTLTNLGAPAAFKYFDTTIDRKRYTSTKEVLDATLIHQSITGLYETRIDLSQLGGDGGEAAAKPAPGGSGGTLGDQGSRGSDPLPEPRVTLTVEGIPTEFLVNTGAEHSVLTKPMGKMGSKRTVVAGATGSKVYPWTTKRLLKIGQKQVTHSFLVIPECPAPLLGRDLLTKLKAQIQFSTEGPQVTWEDRPAMCLVLNLEEEYRLHEKPVPPSIDPSWLQLFPMVWAEKAGMGLANQVPPVVVELKSDASPVAVRQYPMSKEAREGIRPHIQRFLDLGILVPCQSPWNTPLLPVKKPGTNDYRPVQDLREVNKRVQDIHPTVPNPYNLLSSLPPSHTWYSVLDLKDAFFCLKLHPNSQPLFAFEWRDPEKGNTGQLTWTRLPQGFKNSPTLFNEALHRDLASFRALNPQVVMLQYVDDLLVAAPTYRDCKEGTRRLLQELSKLGYRVSAKKAQLCREEVTYLGYLLKGGKRWLTPARKATVMKIPTPTTPRQVREFLGTAGFCRLWIPGFASLAAPLYPLTRPKVPFTWTEAHQEAFGRIKEALLSAPALALPDLTKPFALYVDEKEGVARGVLTQTLGPWRRPVAYLSKKLDPVASGWPTCLKAIAAVALLLKDADKLTLGQNVLVIAPHNLESIVRQPPDRWMTNARMTHYQSLLLNERVSFAPPAILNPATLLPVESDDTPIHICSEILAEETGTRPDLRDQPLPGVPAWYTDGSSFIMDGRRQAGAAIVDNKRTVWASNLPEGTSAQKAELIALTQALRLAEGKSINIYTDSRYAFATAHVHGAIYKQRGWLTSAGKDIKNKEEILALLEAIHLPKRVAIIHCPGHQRGTDPVATGNRKADEAAKQAAQSTRILTETTKNAGKRTADGSEFEKRTADGSEFESPKKKAKVE

SEQ ID NO: 7233 - protein, 2096 aa, synthetic construct
MPAAKRVKLDGGDKKYSIGLDIGTNSVGWAVITDEYKVPSKKFKVLGNTDRHSIKKNLIGALLFDSGETAEATRLKRTARRRYTRRKNRICYLQEIFSNEMAKVDDSFFHRLEESFLVEEDKKHERHPIFGNIVDEVAYHEKYPTIYHLRKKLVDSTDKADLRLIYLALAHMIKFRGHFLIEGDLNPDNSDVDKLFIQLVQTYNQLFEENPINASGVDAKAILSARLSKSRRLENLIAQLPGEKKNGLFGNLIALSLGLTPNFKSNFDLAEDAKLQLSKDTYDDDLDNLLAQIGDQYADLFLAAKNLSDAILLSDILRVNTEITKAPLSASMIKRYDEHHQDLTLLKALVRQQLPEKYKEIFFDQSKNGYAGYIDGGASQEEFYKFIKPILEKMDGTEELLVKLNREDLLRKQRTFDNGSIPHQIHLGELHAILRRQEDFYPFLKDNREKIEKILTFRIPYYVGPLARGNSRFAWMTRKSEETITPWNFEEVVDKGASAQSFIERMTNFDKNLPNEKVLPKHSLLYEYFTVYNELTKVKYVTEGMRKPAFLSGEQKKAIVDLLFKTNRKVTVKQLKEDYFKKIECFDSVEISGVEDRFNASLGTYHDLLKIIKDKDFLDNEENEDILEDIVLTLTLFEDREMIEERLKTYAHLFDDKVMKQLKRRRYTGWGRLSRKLINGIRDKQSGKTILDFLKSDGFANRNFMQLIHDDSLTFKEDIQKAQVSGQGDSLHEHIANLAGSPAIKKGILQTVKVVDELVKVMGRHKPENIVIEMARENQTTQKGQKNSRERMKRIEEGIKELGSQILKEHPVENTQLQNEKLYLYYLQNGRDMYVDQELDINRLSDYDVDHIVPQSFLKDDSIDNKVLTRSDKARGKSDNVPSEEVVKKMKNYWRQLLNAKLITQRKFDNLTKAERGGLSELDKAGFIKRQLVETRQITKHVAQILDSRMNTKYDENDKLIREVKVITLKSKLVSDFRKDFQFYKVREINNYHHAHDAYLNAVVGTALIKKYPKLESEFVYGDYKVYDVRKMIAKSEQEIGKATAKYFFYSNIMNFFKTEITLANGEIRKRPLIETNGETGEIVWDKGRDFATVRKVLSMPQVNIVKKTEVQTGGFSKESILPKRNSDKLIARKKDWDPKKYGGFDSPTVAYSVLVVAKVEKGKSKKLKSVKELLGITIMERSSFEKNPIDFLEAKGYKEVKKDLIIKLPKYSLFELENGRKRMLASAGELQKGNELALPSKYVNFLYLASHYEKLKGSPEDNEQKQLFVEQHKHYLDEIIEQISEFSKRVILADANLDKVLSAYNKHRDKPIREQAENIIHLFTLTNLGAPAAFKYFDTTIDRKRYTSTKEVLDATLIHQSITGLYETRIDLSQLGGDGGEAAAKPAPGGSGGTLGIEDEYRLHETSTEPDVSLGSTWLSDFPQAWAETGGMGLAVRQAPLIIPLKATSTPVSIQQYPMSHEARLGIKPHIQRLLDQGILVPCQSPWNTPLLPVKKPGTNDYRPVQDLREVNKRVEDIHPTVPNPYNLLSGLPPSHQWYTVLDLKDAFFCLRLHPTSQPLFAFEWRDPGMGISGQLTWTRLPQGFKNSPTLFNEALHRDLADFRIQHPDLILLQYVDDILLAATSELDCQQGTRALLQTLGDLGYRASAKKAQICQKQVKYLGYLLREGQRWLTEARKETVMGQPVPKTPRQLREFLGTAGFCRLWIPGFAEMAAPLYPLTKPGTLFSWGPDQQKAYQEIKQALLTAPALGLPDLTKPFELFVDEKQGYAKGVLTQKLGPWRRPVAYLSKKLDPVAAGWPPCLRMVAAIAVLTKDAGKLTMGQPLVILAPHAVEALVKQPPDRWLSNARMTHYQAMLLDTDRVQFGPVVALNPATLLPLPEEGAPHDCLEILAETHGTRPDLTDQPIPDADHTWYTDGSSFLQEGQRKAGAAVTTETEVIWAGALPAGTSAQRAELIALTQALKMAEGKRLNVYTDSRYAFATAHIHGEIYRRRGWLTSEGREIKNKSEILALLKALFLPKRLSIIHCLGHQKGDSAEARGNRLADQAAREAAIKTPPDTSTLLAGKRTADGSEFEKRTADGSEFESPKKKAKVE

SEQ ID NO: 7234 - protein, 2096 aa, synthetic construct
MPAAKRVKLDGGDKKYSIGLDIGTNSVGWAVITDEYKVPSKKFKVLGNTDRHSIKKNLIGALLFDSGETAEATRLKRTARRRYTRRKNRICYLQEIFSNEMAKVDDSFFHRLEESFLVEEDKKHERHPIFGNIVDEVAYHEKYPTIYHLRKKLVDSTDKADLRLIYLALAHMIKFRGHFLIEGDLNPDNSDVDKLFIQLVQTYNQLFEENPINASGVDAKAILSARLSKSRRLENLIAQLPGEKKNGLFGNLIALSLGLTPNFKSNFDLAEDAKLQLSKDTYDDDLDNLLAQIGDQYADLFLAAKNLSDAILLSDILRVNTEITKAPLSASMIKRYDEHHQDLTLLKALVRQQLPEKYKEIFFDQSKNGYAGYIDGGASQEEFYKFIKPILEKMDGTEELLVKLNREDLLRKQRTFDNGSIPHQIHLGELHAILRRQEDFYPFLKDNREKIEKILTFRIPYYVGPLARGNSRFAWMTRKSEETITPWNFEEVVDKGASAQSFIERMTNFDKNLPNEKVLPKHSLLYEYFTVYNELTKVKYVTEGMRKPAFLSGEQKKAIVDLLFKTNRKVTVKQLKEDYFKKIECFDSVEISGVEDRFNASLGTYHDLLKIIKDKDFLDNEENEDILEDIVLTLTLFEDREMIEERLKTYAHLFDDKVMKQLKRRRYTGWGRLSRKLINGIRDKQSGKTILDFLKSDGFANRNFMQLIHDDSLTFKEDIQKAQVSGQGDSLHEHIANLAGSPAIKKGILQTVKVVDELVKVMGRHKPENIVIEMARENQTTQKGQKNSRERMKRIEEGIKELGSQILKEHPVENTQLQNEKLYLYYLQNGRDMYVDQELDINRLSDYDVDHIVPQSFLKDDSIDNKVLTRSDKARGKSDNVPSEEVVKKMKNYWRQLLNAKLITQRKFDNLTKAERGGLSELDKAGFIKRQLVETRQITKHVAQILDSRMNTKYDENDKLIREVKVITLKSKLVSDFRKDFQFYKVREINNYHHAHDAYLNAVVGTALIKKYPKLESEFVYGDYKVYDVRKMIAKSEQEIGKATAKYFFYSNIMNFFKTEITLANGEIRKRPLIETNGETGEIVWDKGRDFATVRKVLSMPQVNIVKKTEVQTGGFSKESILPKRNSDKLIARKKDWDPKKYGGFDSPTVAYSVLVVAKVEKGKSKKLKSVKELLGITIMERSSFEKNPIDFLEAKGYKEVKKDLIIKLPKYSLFELENGRKRMLASAGELQKGNELALPSKYVNFLYLASHYEKLKGSPEDNEQKQLFVEQHKHYLDEIIEQISEFSKRVILADANLDKVLSAYNKHRDKPIREQAENIIHLFTLTNLGAPAAFKYFDTTIDRKRYTSTKEVLDATLIHQSITGLYETRIDLSQLGGDGGEAAAKPAPGGSGGTLGIEDEYRLHETSTEPDVSLGSTWLSDFPQAWAETGGMGLAVRQAPLIIPLKATSTPVSIQQYPMSHEARLGIKPHIQRLLDQGILVPCQSPWNTPLLPVKKPGTNDYRPVQDLREVNKRVEDIHPTVPNPYNLLSGLPPSHQWYTVLDLKDAFFCLRLHPTSQPLFAFEWRDPGMGISGQLTWTRLPQGFKNSPTLFDEALHRDLADFRIQHPDLILLQYVDDILLAATSELDCQQGTRALLQTLGDLGYRASAKKAQICQKQVKYLGYLLREGQRWLTEARKETVMGQPVPKTPRQLREFLGTAGFCRLWIPGFAEMAAPLYPLTKTGTLFSWGPDQQKAYQEIKQALLTAPALGLPDLTKPFELFVDEKQGYAKGVLTQKLGPWRRPVAYLSKKLDPVAAGWPPCLRMVAAIAVLTKDAGKLTMGQPLVILAPHAVEALVKQPPDRWLSNARMTHYQAMLLDTDRVQFGPVVALNPATLLPLPEEGAPHDCLEILAETHGTRPDLTDQPIPDADHTWYTDGSSFLQEGQRKAGAAVTTETEVIWAGALPAGTSAQRAELIALTQALKMAEGKRLNVYTDSRYAFATAHIHGEIYRRRGLLTSEGREIKNKSEILALLKALFLPKRLSIIHCLGHQKGDSAEARGNRLADQAAREAAIKTPPDTSTLLAGKRTADGSEFEKRTADGSEFESPKKKAKVE

SEQ ID NO: 7235 - protein, 2096 aa, synthetic construct; identical to SEQ ID NO: 7233

SEQ ID NO: 7236 - protein, 2096 aa, synthetic construct
MPAAKRVKLDGGDKKYSIGLDIGTNSVGWAVITDEYKVPSKKFKVLGNTDRHSIKKNLIGALLFDSGETAEATRLKRTARRRYTRRKNRICYLQEIFSNEMAKVDDSFFHRLEESFLVEEDKKHERHPIFGNIVDEVAYHEKYPTIYHLRKKLVDSTDKADLRLIYLALAHMIKFRGHFLIEGDLNPDNSDVDKLFIQLVQTYNQLFEENPINASGVDAKAILSARLSKSRRLENLIAQLPGEKKNGLFGNLIALSLGLTPNFKSNFDLAEDAKLQLSKDTYDDDLDNLLAQIGDQYADLFLAAKNLSDAILLSDILRVNTEITKAPLSASMIKRYDEHHQDLTLLKALVRQQLPEKYKEIFFDQSKNGYAGYIDGGASQEEFYKFIKPILEKMDGTEELLVKLNREDLLRKQRTFDNGSIPHQIHLGELHAILRRQEDFYPFLKDNREKIEKILTFRIPYYVGPLARGNSRFAWMTRKSEETITPWNFEEVVDKGASAQSFIERMTNFDKNLPNEKVLPKHSLLYEYFTVYNELTKVKYVTEGMRKPAFLSGEQKKAIVDLLFKTNRKVTVKQLKEDYFKKIECFDSVEISGVEDRFNASLGTYHDLLKIIKDKDFLDNEENEDILEDIVLTLTLFEDREMIEERLKTYAHLFDDKVMKQLKRRRYTGWGRLSRKLINGIRDKQSGKTILDFLKSDGFANRNFMQLIHDDSLTFKEDIQKAQVSGQGDSLHEHIANLAGSPAIKKGILQTVKVVDELVKVMGRHKPENIVIEMARENQTTQKGQKNSRERMKRIEEGIKELGSQILKEHPVENTQLQNEKLYLYYLQNGRDMYVDQELDINRLSDYDVDHIVPQSFLKDDSIDNKVLTRSDKARGKSDNVPSEEVVKKMKNYWRQLLNAKLITQRKFDNLTKAERGGLSELDKAGFIKRQLVETRQITKHVAQILDSRMNTKYDENDKLIREVKVITLKSKLVSDFRKDFQFYKVREINNYHHAHDAYLNAVVGTALIKKYPKLESEFVYGDYKVYDVRKMIAKSEQEIGKATAKYFFYSNIMNFFKTEITLANGEIRKRPLIETNGETGEIVWDKGRDFATVRKVLSMPQVNIVKKTEVQTGGFSKESILPKRNSDKLIARKKDWDPKKYGGFDSPTVAYSVLVVAKVEKGKSKKLKSVKELLGITIMERSSFEKNPIDFLEAKGYKEVKKDLIIKLPKYSLFELENGRKRMLASAGELQKGNELALPSKYVNFLYLASHYEKLKGSPEDNEQKQLFVEQHKHYLDEIIEQISEFSKRVILADANLDKVLSAYNKHRDKPIREQAENIIHLFTLTNLGAPAAFKYFDTTIDRKRYTSTKEVLDATLIHQSITGLYETRIDLSQLGGDGGEAAAKPAPGGSGGTLNIEDEYRLHEISTEPDVSPGSTWLSDFPQAWAETGGMGLAVRQAPLIIPLKATSTPVSIKQYPMSQEAKLGIKPHIQRLLDQGILVPCQSPWNTPLLPVKKPGTNDYRPVQGLREVNKRVEDIHPTVPNPYNLLSGLPTSHRWYTVLDLKDAFFCLRLHPTSQPLFASEWRDPGMGISGQLTWTRLPQGFKNSPTLFNEALHRGLADFRIQHPDLILLQYVDDLLLAATSELDCQQGTRALLKTLGNLGYRASAKKAQICQKQVKYLGYLLREGQRWLTEARKETVMGQPTPKTPRQLREFLGKAGFCRLFIPRFAEMAAPLYPLTKPGTLFNWGPDQQKAYHEIKQALLTAPALGLPDLTKPFELFVDEKQGYAKGVLTQKLGPWRRPVAYLSKKLDPVAAGWPPCLRMVAAIAVLTKDAGKLTMGQPLVILAPHAVEALVKQPPDRWLSNARMTHYQAMLLDTDRVQFGPVVALNPATLLPLPEEGAPHDCLEILAETHGTEPDLTDQPIPDADHTWYTDGSSFLQEGQRKAGAAVTTETEVIWARALPAGTSAQRAELIALTQALKMAEGKRLNVYTDSRYAFATAHIHGEIYKRRGWLTSEGREIKNKSEILALLKALFLPKRLSIIHCLGHQKGDSAEARGNRLADQAAREAAIKTPPDTSTLLAGKRTADGSEFEKRTADGSEFESPKKKAKVE

SEQ ID NO: 7237 - protein, 2116 aa, synthetic construct
MPAAKRVKLDGGDKKYSIGLDIGTNSVGWAVITDEYKVPSKKFKVLGNTDRHSIKKNLIGALLFDSGETAEATRLKRTARRRYTRRKNRICYLQEIFSNEMAKVDDSFFHRLEESFLVEEDKKHERHPIFGNIVDEVAYHEKYPTIYHLRKKLVDSTDKADLRLIYLALAHMIKFRGHFLIEGDLNPDNSDVDKLFIQLVQTYNQLFEENPINASGVDAKAILSARLSKSRRLENLIAQLPGEKKNGLFGNLIALSLGLTPNFKSNFDLAEDAKLQLSKDTYDDDLDNLLAQIGDQYADLFLAAKNLSDAILLSDILRVNTEITKAPLSASMIKRYDEHHQDLTLLKALVRQQLPEKYKEIFFDQSKNGYAGYIDGGASQEEFYKFIKPILEKMDGTEELLVKLNREDLLRKQRTFDNGSIPHQIHLGELHAILRRQEDFYPFLKDNREKIEKILTFRIPYYVGPLARGNSRFAWMTRKSEETITPWNFEEVVDKGASAQSFIERMTNFDKNLPNEKVLPKHSLLYEYFTVYNELTKVKYVTEGMRKPAFLSGEQKKAIVDLLFKTNRKVTVKQLKEDYFKKIECFDSVEISGVEDRFNASLGTYHDLLKIIKDKDFLDNEENEDILEDIVLTLTLFEDREMIEERLKTYAHLFDDKVMKQLKRRRYTGWGRLSRKLINGIRDKQSGKTILDFLKSDGFANRNFMQLIHDDSLTFKEDIQKAQVSGQGDSLHEHIANLAGSPAIKKGILQTVKVVDELVKVMGRHKPENIVIEMARENQTTQKGQKNSRERMKRIEEGIKELGSQILKEHPVENTQLQNEKLYLYYLQNGRDMYVDQELDINRLSDYDVDHIVPQSFLKDDSIDNKVLTRSDKARGKSDNVPSEEVVKKMKNYWRQLLNAKLITQRKFDNLTKAERGGLSELDKAGFIKRQLVETRQITKHVAQILDSRMNTKYDENDKLIREVKVITLKSKLVSDFRKDFQFYKVREINNYHHAHDAYLNAVVGTALIKKYPKLESEFVYGDYKVYDVRKMIAKSEQEIGKATAKYFFYSNIMNFFKTEITLANGEIRKRPLIETNGETGEIVWDKGRDFATVRKVLSMPQVNIVKKTEVQTGGFSKESILPKRNSDKLIARKKDWDPKKYGGFDSPTVAYSVLVVAKVEKGKSKKLKSVKELLGITIMERSSFEKNPIDFLEAKGYKEVKKDLIIKLPKYSLFELENGRKRMLASAGELQKGNELALPSKYVNFLYLASHYEKLKGSPEDNEQKQLFVEQHKHYLDEIIEQISEFSKRVILADANLDKVLSAYNKHRDKPIREQAENIIHLFTLTNLGAPAAFKYFDTTIDRKRYTSTKEVLDATLIHQSITGLYETRIDLSQLGGDGGEAAAKPAPGGSGGVQEISDSRPMLHIYLNGRRFLGLLDTGADKTCIAGRDWPANWPIHQTESSLQGLGMACGVARSSQPLRWQHEDKSGIIHPFVIPTLPFTLWGRDIMKDIKVRLMTDSPDDSQDLMIGAIESNLFADQISWKSDQPVWLNQWPLKQEKLQALQQLVTEQLQLGHLEESNSPWNTPVFVIKKKSGKWRLLQDLRAVNATMHDMGALQPGLPSPVAVPKGWEIIIIDLQDCFFNIKLHPEDCKRFAFSVPSPNFKRPYQRFQWKVLPQGMKNSPTLCQKFVDKAILTVRDKYQDSYIVHYMDDILLAHPSRSIVDEILTSMIQALNKHGLVVSTEKIQKYDNLKYLGTHIQGDSVSYQKLQIRTDKLRTLNDFQKLLGNINWIRPFLKLTTGELKPLFEILNGDSNPISTRKLTPEACKALQLMNERLSTARVKRLDLSQPWSLCILKTEYTPTACLWQDGVVEWIHLPHISPKVITPYDIFCTQLIIKGRHRSKELFSKDPDYIVVPYTKVQFDLLLQEKEDWPISLLGFLGEVHFHLPKDPLLTFTLQTAIIFPHMTSTTPLEKGIVIFTDGSANGRSVTYIQGREPIIKENTQNTAQQAEIVAVITAFEEVSQPFNLYTDSKYVTGLFPEIETATLSPRTKIYTELKHLQRLIHKRQEKFYIGHIRGHTGLPGPLAQGNAYADSLTRILTAAGKRTADGSEFEKRTADGSEFESPKKKAKVE

SEQ ID NO: 7238 - protein, 2087 aa, synthetic construct
MPAAKRVKLDGGDKKYSIGLDIGTNSVGWAVITDEYKVPSKKFKVLGNTDRHSIKKNLIGALLFDSGETAEATRLKRTARRRYTRRKNRICYLQEIFSNEMAKVDDSFFHRLEESFLVEEDKKHERHPIFGNIVDEVAYHEKYPTIYHLRKKLVDSTDKADLRLIYLALAHMIKFRGHFLIEGDLNPDNSDVDKLFIQLVQTYNQLFEENPINASGVDAKAILSARLSKSRRLENLIAQLPGEKKNGLFGNLIALSLGLTPNFKSNFDLAEDAKLQLSKDTYDDDLDNLLAQIGDQYADLFLAAKNLSDAILLSDILRVNTEITKAPLSASMIKRYDEHHQDLTLLKALVRQQLPEKYKEIFFDQSKNGYAGYIDGGASQEEFYKFIKPILEKMDGTEELLVKLNREDLLRKQRTFDNGSIPHQIHLGELHAILRRQEDFYPFLKDNREKIEKILTFRIPYYVGPLARGNSRFAWMTRKSEETITPWNFEEVVDKGASAQSFIERMTNFDKNLPNEKVLPKHSLLYEYFTVYNELTKVKYVTEGMRKPAFLSGEQKKAIVDLLFKTNRKVTVKQLKEDYFKKIECFDSVEISGVEDRFNASLGTYHDLLKIIKDKDFLDNEENEDILEDIVLTLTLFEDREMIEERLKTYAHLFDDKVMKQLKRRRYTGWGRLSRKLINGIRDKQSGKTILDFLKSDGFANRNFMQLIHDDSLTFKEDIQKAQVSGQGDSLHEHIANLAGSPAIKKGILQTVKVVDELVKVMGRHKPENIVIEMARENQTTQKGQKNSRERMKRIEEGIKELGSQILKEHPVENTQLQNEKLYLYYLQNGRDMYVDQELDINRLSDYDVDHIVPQSFLKDDSIDNKVLTRSDKARGKSDNVPSEEVVKKMKNYWRQLLNAKLITQRKFDNLTKAERGGLSELDKAGFIKRQLVETRQITKHVAQILDSRMNTKYDENDKLIREVKVITLKSKLVSDFRKDFQFYKVREINNYHHAHDAYLNAVVGTALIKKYPKLESEFVYGDYKVYDVRKMIAKSEQEIGKATAKYFFYSNIMNFFKTEITLANGEIRKRPLIETNGETGEIVWDKGRDFATVRKVLSMPQVNIVKKTEVQTGGFSKESILPKRNSDKLIARKKDWDPKKYGGFDSPTVAYSVLVVAKVEKGKSKKLKSVKELLGITIMERSSFEKNPIDFLEAKGYKEVKKDLIIKLPKYSLFELENGRKRMLASAGELQKGNELALPSKYVNFLYLASHYEKLKGSPEDNEQKQLFVEQHKHYLDEIIEQISEFSKRVILADANLDKVLSAYNKHRDKPIREQAENIIHLFTLTNLGAPAAFKYFDTTIDRKRYTSTKEVLDATLIHQSITGLYETRIDLSQLGGDGGEAAAKPAPGGSGGIPWLMKKPLQLTTLVPLQEYEERLLKQTMLTGSYKEKLQSLFLKYDALWQHWENQVGHRRIKPHHIATGTVNPRPQKQYPINPKAKASIQTVINDLLKQGVLIQQNSIMNTPVYPVPKPDGKWRMVLDYREVNKTIPLIAAQNQHSAGILSSIFRGKYKTTLDLSNGFWAHSITPESYWLTAFTWLGQQYCWTRLPQGFLNSPALFNADVVDLLKEVPNVQVYVDDIYISHDDPREHLEQLEKVFSLLLNAGYVVSLKKSEIAQHEVEFLGFNITKEGRGLTETFKQKLLNITPPRDLKQLQSILGKLNFARNFIPNFSELVKPLYNIIATAPGKYITWTTDNSQQLQNIISMLNSAENLEERNPEVRLIMKVNTSPSAGYIRFYNEFAKRPIMYLNYVYTKAEVKFTNTEKLLTTIHKGLIKALDLGMGQEILVYSPIVSMTKIQKTPLPERKALPIRWITWMSYLEDPRIQFHYDKTLPELQQVPTVTDDIIAKIKHPSEFSMVFYTDGSAIKHPNVNKSHNAGMGIAQVQFKPEFTVINTWSIPLGDHTAQLAEVAAVEFACKKALKIDGPVLIVTDSFYVAESVNKELPYWQSNGFFNNKKKPLKHVSKWKSIADCIQLKPDIIIIHEKGHQPTASTFHTEGNNLADKLATQGSYVVNAGKRTADGSEFEKRTADGSEFESPKKKAKVE

SEQ ID NO: 7239 - protein, 2176 aa, synthetic construct
MPAAKRVKLDGGDKKYSIGLDIGTNSVGWAVITDEYKVPSKKFKVLGNTDRHSIKKNLIGALLFDSGETAEATRLKRTARRRYTRRKNRICYLQEIFSNEMAKVDDSFFHRLEESFLVEEDKKHERHPIFGNIVDEVAYHEKYPTIYHLRKKLVDSTDKADLRLIYLALAHMIKFRGHFLIEGDLNPDNSDVDKLFIQLVQTYNQLFEENPINASGVDAKAILSARLSKSRRLENLIAQLPGEKKNGLFGNLIALSLGLTPNFKSNFDLAEDAKLQLSKDTYDDDLDNLLAQIGDQYADLFLAAKNLSDAILLSDILRVNTEITKAPLSASMIKRYDEHHQDLTLLKALVRQQLPEKYKEIFFDQSKNGYAGYIDGGASQEEFYKFIKPILEKMDGTEELLVKLNREDLLRKQRTFDNGSIPHQIHLGELHAILRRQEDFYPFLKDNREKIEKILTFRIPYYVGPLARGNSRFAWMTRKSEETITPWNFEEVVDKGASAQSFIERMTNFDKNLPNEKVLPKHSLLYEYFTVYNELTKVKYVTEGMRKPAFLSGEQKKAIVDLLFKTNRKVTVKQLKEDYFKKIECFDSVEISGVEDRFNASLGTYHDLLKIIKDKDFLDNEENEDILEDIVLTLTLFEDREMIEERLKTYAHLFDDKVMKQLKRRRYTGWGRLSRKLINGIRDKQSGKTILDFLKSDGFANRNFMQLIHDDSLTFKEDIQKAQVSGQGDSLHEHIANLAGSPAIKKGILQTVKVVDELVKVMGRHKPENIVIEMARENQTTQKGQKNSRERMKRIEEGIKELGSQILKEHPVENTQLQNEKLYLYYLQNGRDMYVDQELDINRLSDYDVDHIVPQSFLKDDSIDNKVLTRSDKARGKSDNVPSEEVVKKMKNYWRQLLNAKLITQRKFDNLTKAERGGLSELDKAGFIKRQLVETRQITKHVAQILDSRMNTKYDENDKLIREVKVITLKSKLVSDFRKDFQFYKVREINNYHHAHDAYLNAVVGTALIKKYPKLESEFVYGDYKVYDVRKMIAKSEQEIGKATAKYFFYSNIMNFFKTEITLANGEIRKRPLIETNGETGEIVWDKGRDFATVRKVLSMPQVNIVKKTEVQTGGFSKESILPKRNSDKLIARKKDWDPKKYGGFDSPTVAYSVLVVAKVEKGKSKKLKSVKELLGITIMERSSFEKNPIDFLEAKGYKEVKKDLIIKLPKYSLFELENGRKRMLASAGELQKGNELALPSKYVNFLYLASHYEKLKGSPEDNEQKQLFVEQHKHYLDEIIEQISEFSKRVILADANLDKVLSAYNKHRDKPIREQAENIIHLFTLTNLGAPAAFKYFDTTIDRKRYTSTKEVLDATLIHQSITGLYETRIDLSQLGGDGGEAAAKPAPGGSGGMDPLQLLQPLEAEIKGTKLKAHWNSGATITCVPQAFLEEEVPIKNIWIKTIHGEKEQPVYYLTFKIQGRKVEAEVISSPYDYILVSPSDIPWLMKKPLQLTTLVPLQEYEERLLKQTMLTGSYKEKLQSLFLKYDALWQHWENQVGHRRIKPHHIATGTVNPRPQKQYPINPKAKASIQTVINDLLKQGVLIQQNSIMNTPVYPVPKPDGKWRMVLDYREVNKTIPLIAAQNQHSAGILSSIFRGKYKTTLDLSNGFWAHSITPESYWLTAFTWLGQQYCWTRLPQGFLNSPALFNADVVDLLKEVPNVQVYVDDIYISHDDPREHLEQLEKVFSLLLNAGYVVSLKKSEIAQHEVEFLGFNITKEGRGLTETFKQKLLNITPPRDLKQLQSILGLLNFARNFIPNFSELVKPLYNIIATAPGKYITWTTDNSQQLQNIISMLNSAENLEERNPEVRLIMKVNTSPSAGYIRFYNEFAKRPIMYLNYVYTKAEVKFTNTEKLLTTIHKGLIKALDLGMGQEILVYSPIVSMTKIQKTPLPERKALPIRWITWMSYLEDPRIQFHYDKTLPELQQVPTVTDDIIAKIKHPSEFSMVFYTDGSAIKHPNVNKSHNAGMGIAQVQFKPEFTVINTWSIPLGDHTAQLAEVAAVEFACKKALKIDGPVLIVTDSFYVAESVNKELPYWQSNGFFNNKKKPLKHVSKWKSIADCIQLKPDIIIIHEKGHQPTASTFHTEGNNLADKLATQGSYVVNAGKRTADGSEFEKRTADGSEFESPKKKAKVE

SEQ ID NO: 7240 - protein, 2094 aa, synthetic construct
MPAAKRVKLDGGDKKYSIGLDIGTNSVGWAVITDEYKVPSKKFKVLGNTDRHSIKKNLIGALLFDSGETAEATRLKRTARRRYTRRKNRICYLQEIFSNEMAKVDDSFFHRLEESFLVEEDKKHERHPIFGNIVDEVAYHEKYPTIYHLRKKLVDSTDKADLRLIYLALAHMIKFRGHFLIEGDLNPDNSDVDKLFIQLVQTYNQLFEENPINASGVDAKAILSARLSKSRRLENLIAQLPGEKKNGLFGNLIALSLGLTPNFKSNFDLAEDAKLQLSKDTYDDDLDNLLAQIGDQYADLFLAAKNLSDAILLSDILRVNTEITKAPLSASMIKRYDEHHQDLTLLKALVRQQLPEKYKEIFFDQSKNGYAGYIDGGASQEEFYKFIKPILEKMDGTEELLVKLNREDLLRKQRTFDNGSIPHQIHLGELHAILRRQEDFYPFLKDNREKIEKILTFRIPYYVGPLARGNSRFAWMTRKSEETITPWNFEEVVDKGASAQSFIERMTNFDKNLPNEKVLPKHSLLYEYFTVYNELTKVKYVTEGMRKPAFLSGEQKKAIVDLLFKTNRKVTVKQLKEDYFKKIECFDSVEISGVEDRFNASLGTYHDLLKIIKDKDFLDNEENEDILEDIVLTLTLFEDREMIEERLKTYAHLFDDKVMKQLKRRRYTGWGRLSRKLINGIRDKQSGKTILDFLKSDGFANRNFMQLIHDDSLTFKEDIQKAQVSGQGDSLHEHIANLAGSPAIKKGILQTVKVVDELVKVMGRHKPENIVIEMARENQTTQKGQKNSRERMKRIEEGIKELGSQILKEHPVENTQLQNEKLYLYYLQNGRDMYVDQELDINRLSDYDVDHIVPQSFLKDDSIDNKVLTRSDKARGKSDNVPSEEVVKKMKNYWRQLLNAKLITQRKFDNLTKAERGGLSELDKAGFIKRQLVETRQITKHVAQILDSRMNTKYDENDKLIREVKVITLKSKLVSDFRKDFQFYKVREINNYHHAHDAYLNAVVGTALIKKYPKLESEFVYGDYKVYDVRKMIAKSEQEIGKATAKYFFYSNIMNFFKTEITLANGEIRKRPLIETNGETGEIVWDKGRDFATVRKVLSMPQVNIVKKTEVQTGGFSKESILPKRNSDKLIARKKDWDPKKYGGFDSPTVAYSVLVVAKVEKGKSKKLKSVKELLGITIMERSSFEKNPIDFLEAKGYKEVKKDLIIKLPKYSLFELENGRKRMLASAGELQKGNELALPSKYVNFLYLASHYEKLKGSPEDNEQKQLFVEQHKHYLDEIIEQISEFSKRVILADANLDKVLSAYNKHRDKPIREQAENIIHLFTLTNLGAPAAFKYFDTTIDRKRYTSTKEVLDATLIHQSITGLYETRIDLSQLGGDGGEAAAKPAPGGSGGVLNLEEEYRLHEKPVPSSIDPSWLQLFPTVWAERAGMGLANQVPPVVVELRSGASPVAVRQYPMSKEAREGIRPHIQRFLDLGVLVPCQSPWNTPLLPVKKPGTNDYRPVQDLREINKRVQDIHPTVPNPYNLLSSLPPSHTWYSVLDLKDAFFCLKLHPNSQPLFAFEWRDPEKGNTGQLTWTRLPQGFKNSPTLFNEALHRDLAPFRALNPQVVLLQYVDDLLVAAPTYRDCKEGTQKLLQELSKLGYRVSAKKAQLCQKEVTYLGYLLKEGKRWLTPARKATVMKIPPPTTPRQVREFLGTAGFCRLWIPGFASLAAPLYPLTKPSIPFIWTEEHQKAFDRIKEALLSAPALALPDLTKPFTLYVDERAGVARGVLTQTLGPWRRPVAYLSKKLDPVASGWPTCLKAVAAVALLLKDADKLTLGQNVTVIASHSLESIVRQPPDRWMTNARMTHYQSLLLNERVSFAPPAVLNPATLLPVESEATPVHRCSEILAEETGTRRDLKDQPLPGVPAWYTDGSSFIAEGKRRAGAAIVDGKRTVWASSLPEGTSAQKAELVALTQALRLAEGKDINIYTDSRYAFATAHIHGAIYKQRGWLTSAGKDIKNKEEILALLEAIHLPKRVAIIHCPGHQKGNDPVATGNRRADEAAKQAALSTRVLAETTKPAGKRTADGSEFEKRTADGSEFESPKKKAKVE

SEQ ID NO: 7241 - protein, 2096 aa, synthetic construct
MPAAKRVKLDGGDKKYSIGLDIGTNSVGWAVITDEYKVPSKKFKVLGNTDRHSIKKNLIGALLFDSGETAEATRLKRTARRRYTRRKNRICYLQEIFSNEMAKVDDSFFHRLEESFLVEEDKKHERHPIFGNIVDEVAYHEKYPTIYHLRKKLVDSTDKADLRLIYLALAHMIKFRGHFLIEGDLNPDNSDVDKLFIQLVQTYNQLFEENPINASGVDAKAILSARLSKSRRLENLIAQLPGEKKNGLFGNLIALSLGLTPNFKSNFDLAEDAKLQLSKDTYDDDLDNLLAQIGDQYADLFLAAKNLSDAILLSDILRVNTEITKAPLSASMIKRYDEHHQDLTLLKALVRQQLPEKYKEIFFDQSKNGYAGYIDGGASQEEFYKFIKPILEKMDGTEELLVKLNREDLLRKQRTFDNGSIPHQIHLGELHAILRRQEDFYPFLKDNREKIEKILTFRIPYYVGPLARGNSRFAWMTRKSEETITPWNFEEVVDKGASAQSFIERMTNFDKNLPNEKVLPKHSLLYEYFTVYNELTKVKYVTEGMRKPAFLSGEQKKAIVDLLFKTNRKVTVKQLKEDYFKKIECFDSVEISGVEDRFNASLGTYHDLLKIIKDKDFLDNEENEDILEDIVLTLTLFEDREMIEERLKTYAHLFDDKVMKQLKRRRYTGWGRLSRKLINGIRDKQSGKTILDFLKSDGFANRNFMQLIHDDSLTFKEDIQKAQVSGQGDSLHEHIANLAGSPAIKKGILQTVKVVDELVKVMGRHKPENIVIEMARENQTTQKGQKNSRERMKRIEEGIKELGSQILKEHPVENTQLQNEKLYLYYLQNGRDMYVDQELDINRLSDYDVDHIVPQSFLKDDSIDNKVLTRSDKARGKSDNVPSEEVVKKMKNYWRQLLNAKLITQRKFDNLTKAERGGLSELDKAGFIKRQLVETRQITKHVAQILDSRMNTKYDENDKLIREVKVITLKSKLVSDFRKDFQFYKVREINNYHHAHDAYLNAVVGTALIKKYPKLESEFVYGDYKVYDVRKMIAKSEQEIGKATAKYFFYSNIMNFFKTEITLANGEIRKRPLIETNGETGEIVWDKGRDFATVRKVLSMPQVNIVKKTEVQTGGFSKESILPKRNSDKLIARKKDWDPKKYGGFDSPTVAYSVLVVAKVEKGKSKKLKSVKELLGITIMERSSFEKNPIDFLEAKGYKEVKKDLIIKLPKYSLFELENGRKRMLASAGELQKGNELALPSKYVNFLYLASHYEKLKGSPEDNEQKQLFVEQHKHYLDEIIEQISEFSKRVILADANLDKVLSAYNKHRDKPIREQAENIIHLFTLTNLGAPAAFKYFDTTIDRKRYTSTKEVLDATLIHQSITGLYETRIDLSQLGGDGGEAAAKPAPGGSGGTLNIEDEYRLHETSKEPDVPLGSTWLSDFPQAWAETGGMGLAVRQAPLIIPLKATSTPVSIKQYPMSQEARLGIKPHIQRLLDQGILVPCQSPWNTPLLPVKKPGTNDYRPVQDLREVNKRVEDIHPTVPNPYNLLSGLPPSHQWYTVLDLKDAFFCLRLHPTSQPLFAFEWRDPEMGISGQLTWTRLPQGFKNSPTLFDEALHRDLADFRIQHPDLILLQYVDDLLLAATSEQDCQRGTRALLQTLGNLGYRASAKKAQICQKQVKYLGYLLKEGQRWLTEARKETVMGQPTPKTPRQLREFLGTAGFCRLWIPGFAEMAAPLYPLTKTGTLFNWGPDQQKAYQEIKQALLTAPALGLPDLTKPFELFVDEKQGYAKGVLTQKLGPWRRPVAYLSKKLDPVAAGWPPCLRMVAAIAVLTKDAGKLTMGQPLVILAPHAVEALVKQPPDRWLSNARMTHYQAMLLDTDRVQFGPVVALNPATLLPLPEKEAPHDCLEILAETHGTRPDLTDQPIPDADYTWYTDGSSFLQEGQRRAGAAVTTETEVIWARALPAGTSAQRAELIALTQALKMAEGKKLNVYTDSRYAFATAHVHGEIYRRRGLLTSEGREIKNKNEILALLKALFLPKRLSIIHCPGHQKGNSAEARGNRMADQAAREAAMKAVLETSTLLAGKRTADGSEFEKRTADGSEFESPKKKAKVE

SEQ ID NO: 7242 - protein, 2096 aa, synthetic construct; identical to SEQ ID NO: 4527

SEQ ID NO: 7243 - protein, 2098 aa, synthetic construct
MPAAKRVKLDGGDKKYSIGLDIGTNSVGWAVITDEYKVPSKKFKVLGNTDRHSIKKNLIGALLFDSGETAEATRLKRTARRRYTRRKNRICYLQEIFSNEMAKVDDSFFHRLEESFLVEEDKKHERHPIFGNIVDEVAYHEKYPTIYHLRKKLVDSTDKADLRLIYLALAHMIKFRGHFLIEGDLNPDNSDVDKLFIQLVQTYNQLFEENPINASGVDAKAILSARLSKSRRLENLIAQLPGEKKNGLFGNLIALSLGLTPNFKSNFDLAEDAKLQLSKDTYDDDLDNLLAQIGDQYADLFLAAKNLSDAILLSDILRVNTEITKAPLSASMIKRYDEHHQDLTLLKALVRQQLPEKYKEIFFDQSKNGYAGYIDGGASQEEFYKFIKPILEKMDGTEELLVKLNREDLLRKQRTFDNGSIPHQIHLGELHAILRRQEDFYPFLKDNREKIEKILTFRIPYYVGPLARGNSRFAWMTRKSEETITPWNFEEVVDKGASAQSFIERMTNFDKNLPNEKVLPKHSLLYEYFTVYNELTKVKYVTEGMRKPAFLSGEQKKAIVDLLFKTNRKVTVKQLKEDYFKKIECFDSVEISGVEDRFNASLGTYHDLLKIIKDKDFLDNEENEDILEDIVLTLTLFEDREMIEERLKTYAHLFDDKVMKQLKRRRYTGWGRLSRKLINGIRDKQSGKTILDFLKSDGFANRNFMQLIHDDSLTFKEDIQKAQVSGQGDSLHEHIANLAGSPAIKKGILQTVKVVDELVKVMGRHKPENIVIEMARENQTTQKGQKNSRERMKRIEEGIKELGSQILKEHPVENTQLQNEKLYLYYLQNGRDMYVDQELDINRLSDYDVDHIVPQSFLKDDSIDNKVLTRSDKARGKSDNVPSEEVVKKMKNYWRQLLNAKLITQRKFDNLTKAERGGLSELDKAGFIKRQLVETRQITKHVAQILDSRMNTKYDENDKLIREVKVITLKSKLVSDFRKDFQFYKVREINNYHHAHDAYLNAVVGTALIKKYPKLESEFVYGDYKVYDVRKMIAKSEQEIGKATAKYFFYSNIMNFFKTEITLANGEIRKRPLIETNGETGEIVWDKGRDFATVRKVLSMPQVNIVKKTEVQTGGFSKESILPKRNSDKLIARKKDWDPKKYGGFDSPTVAYSVLVVAKVEKGKSKKLKSVKELLGITIMERSSFEKNPIDFLEAKGYKEVKKDLIIKLPKYSLFELENGRKRMLASAGELQKGNELALPSKYVNFLYLASHYEKLKGSPEDNEQKQLFVEQHKHYLDEIIEQISEFSKRVILADANLDKVLSAYNKHRDKPIREQAENIIHLFTLTNLGAPAAFKYFDTTIDRKRYTSTKEVLDATLIHQSITGLYETRIDLSQLGGDGGPAPGGSEAAAKGGTAPLEEEYRLFLEAPIQNVTLLEQWKREIPKVWAEINPPGLASTQAPIHVQLLSTALPVRVRQYPITLEAKRSLRETIRKFRAAGILRPVHSPWNTPLLPVRKSGTSEYRMVQDLREVNKRVETIHPTVPNPYTLLSLLPPDRIWYSVLDLKDAFFCIPLAPESQLIFAFEWADAEEGESGQLTWTRLPQGFKNSPTLFDEALNRDLQGFRLDHPSVSLLQYVDDLLIAADTQAACLSATRDLLMTLAELGYRVSGKKAQLCQEEVTYLGFKIHKGSRSLSNSRTQAILQIPVPKTKRQVREFLGTIGYCRLWIPGFAELAQPLYAATRGGNDPLVWGEKEEEAFQSLKLALTQPPALALPSLDKPFQLFVEETSGAAKGVLTQALGPWKRPVAYLSKRLDPVAAGWPRCLRAIAAAALLTREASKLTFGQDIEITSSHNLESLLRSPPDKWLTNARITQYQVLLLDPPRVRFKQTAALNPATLLPETDDTLPIHHCLDTLDSLTSTRPDLTDQPLAQAEATLFTDGSSYIRDGKRYAGAAVVTLDSVIWAEPLPIGTSAQKAELIALTKALEWSKDKSVNIYTDSRYAFATLHVHGMIYRERGLLTAGGKAIKNAPEILALLTAVWLPKRVAVMHCKGHQKDDAPTSTGNRRADEVAREVAIRPLSTQATISAGKRTADGSEFEKRTADGSEFESPKKKAKVE

SEQ ID NO: 7244 - protein, 2098 aa, synthetic construct
MPAAKRVKLDGGDKKYSIGLDIGTNSVGWAVITDEYKVPSKKFKVLGNTDRHSIKKNLIGALLFDSGETAEATRLKRTARRRYTRRKNRICYLQEIFSNEMAKVDDSFFHRLEESFLVEEDKKHERHPIFGNIVDEVAYHEKYPTIYHLRKKLVDSTDKADLRLIYLALAHMIKFRGHFLIEGDLNPDNSDVDKLFIQLVQTYNQLFEENPINASGVDAKAILSARLSKSRRLENLIAQLPGEKKNGLFGNLIALSLGLTPNFKSNFDLAEDAKLQLSKDTYDDDLDNLLAQIGDQYADLFLAAKNLSDAILLSDILRVNTEITKAPLSASMIKRYDEHHQDLTLLKALVRQQLPEKYKEIFFDQSKNGYAGYIDGGASQEEFYKFIKPILEKMDGTEELLVKLNREDLLRKQRTFDNGSIPHQIHLGELHAILRRQEDFYPFLKDNREKIEKILTFRIPYYVGPLARGNSRFAWMTRKSEETITPWNFEEVVDKGASAQSFIERMTNFDKNLPNEKVLPKHSLLYEYFTVYNELTKVKYVTEGMRKPAFLSGEQKKAIVDLLFKTNRKVTVKQLKEDYFKKIECFDSVEISGVEDRFNASLGTYHDLLKIIKDKDFLDNEENEDILEDIVLTLTLFEDREMIEERLKTYAHLFDDKVMKQLKRRRYTGWGRLSRKLINGIRDKQSGKTILDFLKSDGFANRNFMQLIHDDSLTFKEDIQKAQVSGQGDSLHEHIANLAGSPAIKKGILQTVKVVDELVKVMGRHKPENIVIEMARENQTTQKGQKNSRERMKRIEEGIKELGSQILKEHPVENTQLQNEKLYLYYLQNGRDMYVDQELDINRLSDYDVDHIVPQSFLKDDSIDNKVLTRSDKARGKSDNVPSEEVVKKMKNYWRQLLNAKLITQRKFDNLTKAERGGLSELDKAGFIKRQLVETRQITKHVAQILDSRMNTKYDENDKLIREVKVITLKSKLVSDFRKDFQFYKVREINNYHHAHDAYLNAVVGTALIKKYPKLESEFVYGDYKVYDVRKMIAKSEQEIGKATAKYFFYSNIMNFFKTEITLANGEIRKRPLIETNGETGEIVWDKGRDFATVRKVLSMPQVNIVKKTEVQTGGFSKESILPKRNSDKLIARKKDWDPKKYGGFDSPTVAYSVLVVAKVEKGKSKKLKSVKELLGITIMERSSFEKNPIDFLEAKGYKEVKKDLIIKLPKYSLFELENGRKRMLASAGELQKGNELALPSKYVNFLYLASHYEKLKGSPEDNEQKQLFVEQHKHYLDEIIEQISEFSKRVILADANLDKVLSAYNKHRDKPIREQAENIIHLFTLTNLGAPAAFKYFDTTIDRKRYTSTKEVLDATLIHQSITGLYETRIDLSQLGGDGGPAPGGSEAAAKGGTAPLEEEYRLFLEAPIQNVTLLEQWKREIPKVWAEINPPGLASTQAPIHVQLLSTALPVRVRQYPITLEAKRSLRETIRKFRAAGILRPVHSPWNTPLLPVRKSGTSEYRMVQDLREVNKRVETIHPTVPNPYTLLSLLPPDRIWYSVLDLKDAFFCIPLAPESQLIFAFEWADAEEGESGQLTWTRLPQGFKNSPTLFNEALNRDLQGFRLDHPSVSLLQYVDDLLIAADTQAACLSATRDLLMTLAELGYRVSGKKAQLCQEEVTYLGFKIHKGSRSLSNSRTQAILQIPVPKTKRQVREFLGTIGYCRLWIPGFAELAQPLYAATRPGNDPLVWGEKEEEAFQSLKLALTQPPALALPSLDKPFQLFVEETSGAAKGVLTQALGPWKRPVAYLSKRLDPVAAGWPRCLRAIAAAALLTREASKLTFGQDIEITSSHNLESLLRSPPDKWLTNARITQYQVLLLDPPRVRFKQTAALNPATLLPETDDTLPIHHCLDTLDSLTSTRPDLTDQPLAQAEATLFTDGSSYIRDGKRYAGAAVVTLDSVIWAEPLPIGTSAQKAELIALTKALEWSKDKSVNIYTDSRYAFATLHVHGMIYRERGWLTAGGKAIKNAPEILALLTAVWLPKRVAVMHCKGHQKDDAPTSTGNRRADEVAREVAIRPLSTQATISAGKRTADGSEFEKRTADGSEFESPKKKAKVE

SEQ ID NO: 7245 - protein, 2095 aa, synthetic construct
MPAAKRVKLDGGDKKYSIGLDIGTNSVGWAVITDEYKVPSKKFKVLGNTDRHSIKKNLIGALLFDSGETAEATRLKRTARRRYTRRKNRICYLQEIFSNEMAKVDDSFFHRLEESFLVEEDKKHERHPIFGNIVDEVAYHEKYPTIYHLRKKLVDSTDKADLRLIYLALAHMIKFRGHFLIEGDLNPDNSDVDKLFIQLVQTYNQLFEENPINASGVDAKAILSARLSKSRRLENLIAQLPGEKKNGLFGNLIALSLGLTPNFKSNFDLAEDAKLQLSKDTYDDDLDNLLAQIGDQYADLFLAAKNLSDAILLSDILRVNTEITKAPLSASMIKRYDEHHQDLTLLKALVRQQLPEKYKEIFFDQSKNGYAGYIDGGASQEEFYKFIKPILEKMDGTEELLVKLNREDLLRKQRTFDNGSIPHQIHLGELHAILRRQEDFYPFLKDNREKIEKILTFRIPYYVGPLARGNSRFAWMTRKSEETITPWNFEEVVDKGASAQSFIERMTNFDKNLPNEKVLPKHSLLYEYFTVYNELTKVKYVTEGMRKPAFLSGEQKKAIVDLLFKTNRKVTVKQLKEDYFKKIECFDSVEISGVEDRFNASLGTYHDLLKIIKDKDFLDNEENEDILEDIVLTLTLFEDREMIEERLKTYAHLFDDKVMKQLKRRRYTGWGRLSRKLINGIRDKQSGKTILDFLKSDGFANRNFMQLIHDDSLTFKEDIQKAQVSGQGDSLHEHIANLAGSPAIKKGILQTVKVVDELVKVMGRHKPENIVIEMARENQTTQKGQKNSRERMKRIEEGIKELGSQILKEHPVENTQLQNEKLYLYYLQNGRDMYVDQELDINRLSDYDVDHIVPQSFLKDDSIDNKVLTRSDKARGKSDNVPSEEVVKKMKNYWRQLLNAKLITQRKFDNLTKAERGGLSELDKAGFIKRQLVETRQITKHVAQILDSRMNTKYDENDKLIREVKVITLKSKLVSDFRKDFQFYKVREINNYHHAHDAYLNAVVGTALIKKYPKLESEFVYGDYKVYDVRKMIAKSEQEIGKATAKYFFYSNIMNFFKTEITLANGEIRKRPLIETNGETGEIVWDKGRDFATVRKVLSMPQVNIVKKTEVQTGGFSKESILPKRNSDKLIARKKDWDPKKYGGFDSPTVAYSVLVVAKVEKGKSKKLKSVKELLGITIMERSSFEKNPIDFLEAKGYKEVKKDLIIKLPKYSLFELENGRKRMLASAGELQKGNELALPSKYVNFLYLASHYEKLKGSPEDNEQKQLFVEQHKHYLDEIIEQISEFSKRVILADANLDKVLSAYNKHRDKPIREQAENIIHLFTLTNLGAPAAFKYFDTTIDRKRYTSTKEVLDATLIHQSITGLYETRIDLSQLGGDGGPAPGGSEAAAKGGTLQLEEEYRLFEPESTQKQEMDIWLKNFPQAWAETGGMGTAHCQAPVLIQLKATATPISIRQYPMPHEAYQGIKPHIRRMLDQGILKPCQSPWNTPLLPVKKPGTEDYRPVQDLREVNKRVEDIHPTVPNPYNLLSTLPPSHPWYTVLDLKDAFFCLRLHSESQLLFAFEWRDPEIGLSGQLTWTRLPQGFKNSPTLFNEALHSDLADFRVRYPALVLLQYVDDLLLAAATRTECLEGTKALLETLGNKGYRASAKKAQICLQEVTYLGYSLKDGQRWLTKARKEAILSIPVPKNSRQVREFLGTAGYCRLWIPGFAELAAPLYPLTRPGTLFQWGTEQQLAFEDIKKALLSSPALGLPDITKPFELFIDENSGFAKGVLVQKLGPWKRPVAYLSKKLDTVASGWPPCLRMVAAIAILVKDAGKLTLGQPLTILTSHPVEALVRQPPNKWLSNARMTHYQAMLLDAERVHFGPTVSLNPATLLPLPSGGNHHDCLQILAETHGTRPDLTDQPLPDADLTWYTDGSSFIRNGEREAGAAVTTESEVIWAAPLPPGTSAQRAELIALTQALKMAEGKKLTVYTDSRYAFATTHVHGEIYRRRGWLTSEGKEIKNKNEILALLEALFLPKRLSIIHCPGHQKGDSPQAKGNRLADDTAKKAATETHSSLTVLPAGKRTADGSEFEKRTADGSEFESPKKKAKVE

SEQ ID NO: 7246 - protein, 2096 aa, synthetic construct
MPAAKRVKLDGGDKKYSIGLDIGTNSVGWAVITDEYKVPSKKFKVLGNTDRHSIKKNLIGALLFDSGETAEATRLKRTARRRYTRRKNRICYLQEIFSNEMAKVDDSFFHRLEESFLVEEDKKHERHPIFGNIVDEVAYHEKYPTIYHLRKKLVDSTDKADLRLIYLALAHMIKFRGHFLIEGDLNPDNSDVDKLFIQLVQTYNQLFEENPINASGVDAKAILSARLSKSRRLENLIAQLPGEKKNGLFGNLIALSLGLTPNFKSNFDLAEDAKLQLSKDTYDDDLDNLLAQIGDQYADLFLAAKNLSDAILLSDILRVNTEITKAPLSASMIKRYDEHHQDLTLLKALVRQQLPEKYKEIFFDQSKNGYAGYIDGGASQEEFYKFIKPILEKMDGTEELLVKLNREDLLRKQRTFDNGSIPHQIHLGELHAILRRQEDFYPFLKDNREKIEKILTFRIPYYVGPLARGNSRFAWMTRKSEETITPWNFEEVVDKGASAQSFIERMTNFDKNLPNEKVLPKHSLLYEYFTVYNELTKVKYVTEGMRKPAFLSGEQKKAIVDLLFKTNRKVTVKQLKEDYFKKIECFDSVEISGVEDRFNASLGTYHDLLKIIKDKDFLDNEENEDILEDIVLTLTLFEDREMIEERLKTYAHLFDDKVMKQLKRRRYTGWGRLSRKLINGIRDKQSGKTILDFLKSDGFANRNFMQLIHDDSLTFKEDIQKAQVSGQGDSLHEHIANLAGSPAIKKGILQTVKVVDELVKVMGRHKPENIVIEMARENQTTQKGQKNSRERMKRIEEGIKELGSQILKEHPVENTQLQNEKLYLYYLQNGRDMYVDQELDINRLSDYDVDHIVPQSFLKDDSIDNKVLTRSDKARGKSDNVPSEEVVKKMKNYWRQLLNAKLITQRKFDNLTKAERGGLSELDKAGFIKRQLVETRQITKHVAQILDSRMNTKYDENDKLIREVKVITLKSKLVSDFRKDFQFYKVREINNYHHAHDAYLNAVVGTALIKKYPKLESEFVYGDYKVYDVRKMIAKSEQEIGKATAKYFFYSNIMNFFKTEITLANGEIRKRPLIETNGETGEIVWDKGRDFATVRKVLSMPQVNIVKKTEVQTGGFSKESILPKRNSDKLIARKKDWDPKKYGGFDSPTVAYSVLVVAKVEKGKSKKLKSVKELLGITIMERSSFEKNPIDFLEAKGYKEVKKDLIIKLPKYSLFELENGRKRMLASAGELQKGNELALPSKYVNFLYLASHYEKLKGSPEDNEQKQLFVEQHKHYLDEIIEQISEFSKRVILADANLDKVLSAYNKHRDKPIREQAENIIHLFTLTNLGAPAAFKYFDTTIDRKRYTSTKEVLDATLIHQSITGLYETRIDLSQLGGDGGPAPGGSEAAAKGGTLGIEDEYRLHETSTEPDVSLGSTWLSDFPQAWAETGGMGLAVRQAPLIIPLKATSTPVSIQQYPMSHEARLGIKPHIQRLLDQGILVPCQSPWNTPLLPVKKPGTNDYRPVQDLREVNKRVEDIHPTVPNPYNLLSGLPPSHQWYTVLDLKDAFFCLRLHPTSQPLFAFEWRDPGMGISGQLTWTRLPQGFKNSPTLFNEALHRDLADFRIQHPDLILLQYVDDILLAATSELDCQQGTRALLQTLGDLGYRASAKKAQICQKQVKYLGYLLREGQRWLTEARKETVMGQPVPKTPRQLREFLGTAGFCRLWIPGFAEMAAPLYPLTKPGTLFSWGPDQQKAYQEIKQALLTAPALGLPDLTKPFELFVDEKQGYAKGVLTQKLGPWRRPVAYLSKKLDPVAAGWPPCLRMVAAIAVLTKDAGKLTMGQPLVILAPHAVEALVKQPPDRWLSNARMTHYQAMLLDTDRVQFGPVVALNPATLLPLPEEGAPHDCLEILAETHGTRPDLTDQPIPDADHTWYTDGSSFLQEGQRKAGAAVTTETEVIWAGALPAGTSAQRAELIALTQALKMAEGKRLNVYTDSRYAFATAHIHGEIYRRRGWLTSEGREIKNKSEILALLKALFLPKRLSIIHCLGHQKGDSAEARGNRLADQAAREAAIKTPPDTSTLLAGKRTADGSEFEKRTADGSEFESPKKKAKVE

SEQ ID NO: 7247 - protein, 2096 aa, synthetic construct
MPAAKRVKLDGGDKKYSIGLDIGTNSVGWAVITDEYKVPSKKFKVLGNTDRHSIKKNLIGALLFDSGETAEATRLKRTARRRYTRRKNRICYLQEIFSNEMAKVDDSFFHRLEESFLVEEDKKHERHPIFGNIVDEVAYHEKYPTIYHLRKKLVDSTDKADLRLIYLALAHMIKFRGHFLIEGDLNPDNSDVDKLFIQLVQTYNQLFEENPINASGVDAKAILSARLSKSRRLENLIAQLPGEKKNGLFGNLIALSLGLTPNFKSNFDLAEDAKLQLSKDTYDDDLDNLLAQIGDQYADLFLAAKNLSDAILLSDILRVNTEITKAPLSASMIKRYDEHHQDLTLLKALVRQQLPEKYKEIFFDQSKNGYAGYIDGGASQEEFYKFIKPILEKMDGTEELLVKLNREDLLRKQRTFDNGSIPHQIHLGELHAILRRQEDFYPFLKDNREKIEKILTFRIPYYVGPLARGNSRFAWMTRKSEETITPWNFEEVVDKGASAQSFIERMTNFDKNLPNEKVLPKHSLLYEYFTVYNELTKVKYVTEGMRKPAFLSGEQKKAIVDLLFKTNRKVTVKQLKEDYFKKIECFDSVEISGVEDRFNASLGTYHDLLKIIKDKDFLDNEENEDILEDIVLTLTLFEDREMIEERLKTYAHLFDDKVMKQLKRRRYTGWGRLSRKLINGIRDKQSGKTILDFLKSDGFANRNFMQLIHDDSLTFKEDIQKAQVSGQGDSLHEHIANLAGSPAIKKGILQTVKVVDELVKVMGRHKPENIVIEMARENQTTQKGQKNSRERMKRIEEGIKELGSQILKEHPVENTQLQNEKLYLYYLQNGRDMYVDQELDINRLSDYDVDHIVPQSFLKDDSIDNKVLTRSDKARGKSDNVPSEEVVKKMKNYWRQLLNAKLITQRKFDNLTKAERGGLSELDKAGFIKRQLVETRQITKHVAQILDSRMNTKYDENDKLIREVKVITLKSKLVSDFRKDFQFYKVREINNYHHAHDAYLNAVVGTALIKKYPKLESEFVYGDYKVYDVRKMIAKSEQEIGKATAKYFFYSNIMNFFKTEITLANGEIRKRPLIETNGETGEIVWDKGRDFATVRKVLSMPQVNIVKKTEVQTGGFSKESILPKRNSDKLIARKKDWDPKKYGGFDSPTVAYSVLVVAKVEKGKSKKLKSVKELLGITIMERSSFEKNPIDFLEAKGYKEVKKDLIIKLPKYSLFELENGRKRMLASAGELQKGNELALPSKYVNFLYLASHYEKLKGSPEDNEQKQLFVEQHKHYLDEIIEQISEFSKRVILADANLDKVLSAYNKHRDKPIREQAENIIHLFTLTNLGAPAAFKYFDTTIDRKRYTSTKEVLDATLIHQSITGLYETRIDLSQLGGDGGPAPGGSEAAAKGGTLNIEDEYRLHETSKGPDVPLGSTWLSDFPQAWAETGGMGLAVRQAPLIIPLKATSTPVSIKQYPMSQEARLGIKPHIQRLLDQGILVPCQSPWNTPLLPVKKPGTNDYRPVQDLREVNKRVEDIHPTVPNPYNLLSGLPPSHQWYTVLDLKDAFFCLRLHPTSQSLFAFEWRDPEMGISGQLTWTRLPQGFKNSPTLFDEALHRDLADFRIQHPDLILLQYVDDLLLAATSELDCQQGTRALLQTLGDLGYRASAKKAQICQKQVKYLGYLLKEGQRWLTEARKETVMGQPTPKTPRQLREFLGTAGFCRLWIPGFAEMAAPLYPLTKTGTLFEWGPDQQKAYQEIKQALLTAPALGLPDLTKPFELFVDEKQGYAKGVLTQKLGPWRRPVAYLSKKLDPVAAGWPPCLRMVAAIAVLTKDAGKLTMGQPLVILAPHAVEALVKQPPDRWLSNARMTHYQALLLDTDRVQFGPIVALNPATLLPLPEEGLQHDCLDILAEAHGTRPDLTDQPLPDADHTWYTDGSSFLQEGQRKAGAAVTTETEVVWAKALPAGTSAQRAELIALTQALKMAEGKKLNVYTDSRYAFATAHIHGEIYRRRGLLTSEGKEIKNKDEILALLKALFLPKRLSIIHCPGHQKGNRAEARGNRMADQAAREVATRETPETSTLLAGKRTADGSEFEKRTADGSEFESPKKKAKVE

SEQ ID NO: 7248 - protein, 2090 aa, synthetic construct
MPAAKRVKLDGGDKKYSIGLDIGTNSVGWAVITDEYKVPSKKFKVLGNTDRHSIKKNLIGALLFDSGETAEATRLKRTARRRYTRRKNRICYLQEIFSNEMAKVDDSFFHRLEESFLVEEDKKHERHPIFGNIVDEVAYHEKYPTIYHLRKKLVDSTDKADLRLIYLALAHMIKFRGHFLIEGDLNPDNSDVDKLFIQLVQTYNQLFEENPINASGVDAKAILSARLSKSRRLENLIAQLPGEKKNGLFGNLIALSLGLTPNFKSNFDLAEDAKLQLSKDTYDDDLDNLLAQIGDQYADLFLAAKNLSDAILLSDILRVNTEITKAPLSASMIKRYDEHHQDLTLLKALVRQQLPEKYKEIFFDQSKNGYAGYIDGGASQEEFYKFIKPILEKMDGTEELLVKLNREDLLRKQRTFDNGSIPHQIHLGELHAILRRQEDFYPFLKDNREKIEKILTFRIPYYVGPLARGNSRFAWMTRKSEETITPWNFEEVVDKGASAQSFIERMTNFDKNLPNEKVLPKHSLLYEYFTVYNELTKVKYVTEGMRKPAFLSGEQKKAIVDLLFKTNRKVTVKQLKEDYFKKIECFDSVEISGVEDRFNASLGTYHDLLKIIKDKDFLDNEENEDILEDIVLTLTLFEDREMIEERLKTYAHLFDDKVMKQLKRRRYTGWGRLSRKLINGIRDKQSGKTILDFLKSDGFANRNFMQLIHDDSLTFKEDIQKAQVSGQGDSLHEHIANLAGSPAIKKGILQTVKVVDELVKVMGRHKPENIVIEMARENQTTQKGQKNSRERMKRIEEGIKELGSQILKEHPVENTQLQNEKLYLYYLQNGRDMYVDQELDINRLSDYDVDHIVPQSFLKDDSIDNKVLTRSDKARGKSDNVPSEEVVKKMKNYWRQLLNAKLITQRKFDNLTKAERGGLSELDKAGFIKRQLVETRQITKHVAQILDSRMNTKYDENDKLIREVKVITLKSKLVSDFRKDFQFYKVREINNYHHAHDAYLNAVVGTALIKKYPKLESEFVYGDYKVYDVRKMIAKSEQEIGKATAKYFFYSNIMNFFKTEITLANGEIRKRPLIETNGETGEIVWDKGRDFATVRKVLSMPQVNIVKKTEVQTGGFSKESILPKRNSDKLIARKKDWDPKKYGGFDSPTVAYSVLVVAKVEKGKSKKLKSVKELLGITIMERSSFEKNPIDFLEAKGYKEVKKDLIIKLPKYSLFELENGRKRMLASAGELQKGNELALPSKYVNFLYLASHYEKLKGSPEDNEQKQLFVEQHKHYLDEIIEQISEFSKRVILADANLDKVLSAYNKHRDKPIREQAENIIHLFTLTNLGAPAAFKYFDTTIDRKRYTSTKEVLDATLIHQSITGLYETRIDLSQLGGDGGPAPGGSEAAAKGGTLQLDDEYRLYSPLVKPDQNIQFWLEQFPQAWAETAGMGLAKQVPPQVIQLKASATPVSVRQYPLSKEAQEGIRPHVQRLIQQGILVPVQSPWNTPLLPVRKPGTNDYRPVQDLREVNKRVQDIHPTVPNPYNLLCALPPQRSWYTVLDLKDAFFCLRLHPTSQPLFAFEWRDPGTGRTGQLTWTRLPQGFKNSPTIFDEALHRDLANFRIQHPQVTLLQYVDDLLLAGATKQDCLEGTKALLLELSDLGYRASAKKAQICRREVTYLGYSLRDGQRWLTEARKKTVVQIPAPTTAKQVREFLGTAGFCRLWIPGFATLAAPLYPLTKEKGEFSWAPEHQKAFDAIKKALLSAPALALPDVTKPFTLYVDERKGVARGVLTQTLGPWRRPVAYLSKKLDPVASGWPVCLKAIAAVAILVKDADKLTLGQNITVIAPHALENIVRQPPDRWMTNARMTHYQSLLLTERVTFAPPAALNPATLLPEETDEPVTHDCHQLLIEETGVRKDLTDIPLTGEVLTWFTDGSSYVVEGKRMAGAAVVDGTRTIWASSLPEGTSAQKAELMALTQALRLAEGKSINIYTDSRYAFATAHVHGAIYKQRGLLTSAGREIKNKEEILSLLEALHLPKRLAIIHCPGHQKAKDPISRGNQMADRVAKQAAQGVNLLAGKRTADGSEFEKRTADGSEFESPKKKAKVE

SEQ ID NO: 7249 - protein, 2176 aa, synthetic construct
MPAAKRVKLDGGDKKYSIGLDIGTNSVGWAVITDEYKVPSKKFKVLGNTDRHSIKKNLIGALLFDSGETAEATRLKRTARRRYTRRKNRICYLQEIFSNEMAKVDDSFFHRLEESFLVEEDKKHERHPIFGNIVDEVAYHEKYPTIYHLRKKLVDSTDKADLRLIYLALAHMIKFRGHFLIEGDLNPDNSDVDKLFIQLVQTYNQLFEENPINASGVDAKAILSARLSKSRRLENLIAQLPGEKKNGLFGNLIALSLGLTPNFKSNFDLAEDAKLQLSKDTYDDDLDNLLAQIGDQYADLFLAAKNLSDAILLSDILRVNTEITKAPLSASMIKRYDEHHQDLTLLKALVRQQLPEKYKEIFFDQSKNGYAGYIDGGASQEEFYKFIKPILEKMDGTEELLVKLNREDLLRKQRTFDNGSIPHQIHLGELHAILRRQEDFYPFLKDNREKIEKILTFRIPYYVGPLARGNSRFAWMTRKSEETITPWNFEEVVDKGASAQSFIERMTNFDKNLPNEKVLPKHSLLYEYFTVYNELTKVKYVTEGMRKPAFLSGEQKKAIVDLLFKTNRKVTVKQLKEDYFKKIECFDSVEISGVEDRFNASLGTYHDLLKIIKDKDFLDNEENEDILEDIVLTLTLFEDREMIEERLKTYAHLFDDKVMKQLKRRRYTGWGRLSRKLINGIRDKQSGKTILDFLKSDGFANRNFMQLIHDDSLTFKEDIQKAQVSGQGDSLHEHIANLAGSPAIKKGILQTVKVVDELVKVMGRHKPENIVIEMARENQTTQKGQKNSRERMKRIEEGIKELGSQILKEHPVENTQLQNEKLYLYYLQNGRDMYVDQELDINRLSDYDVDHIVPQSFLKDDSIDNKVLTRSDKARGKSDNVPSEEVVKKMKNYWRQLLNAKLITQRKFDNLTKAERGGLSELDKAGFIKRQLVETRQITKHVAQILDSRMNTKYDENDKLIREVKVITLKSKLVSDFRKDFQFYKVREINNYHHAHDAYLNAVVGTALIKKYPKLESEFVYGDYKVYDVRKMIAKSEQEIGKATAKYFFYSNIMNFFKTEITLANGEIRKRPLIETNGETGEIVWDKGRDFATVRKVLSMPQVNIVKKTEVQTGGFSKESILPKRNSDKLIARKKDWDPKKYGGFDSPTVAYSVLVVAKVEKGKSKKLKSVKELLGITIMERSSFEKNPIDFLEAKGYKEVKKDLIIKLPKYSLFELENGRKRMLASAGELQKGNELALPSKYVNFLYLASHYEKLKGSPEDNEQKQLFVEQHKHYLDEIIEQISEFSKRVILADANLDKVLSAYNKHRDKPIREQAENIIHLFTLTNLGAPAAFKYFDTTIDRKRYTSTKEVLDATLIHQSITGLYETRIDLSQLGGDGGPAPGGSEAAAKGGMDPLQLLQPLEAEIKGTKLKAHWNSGATITCVPEAFLEDERPIQTMLIKTIHGEKQQDVYYLTFKVQGRKVEAEVLASPYDYILLNPSDVPWLMKKPLQLTVLVPLHEYQERLLQQTALPKEQKELLQKLFLKYDALWQHWENQVGHRRIKPHNIATGTLAPRPQKQYPINPKAKPSIQIVIDDLLKQGVLIQQNSTMNTPVYPVPKPDGKWRMVLDYREVNKTIPLIAAQNQHSAGILSSIYRGKYKTTLDLTNGFWAHPITPESYWLTAFTWQGKQYCWTRLPQGFLNSPALFTADVVDLLKEIPNVQAYVDDIYISHDDPQEHLEQLEKIFSILLNAGYVVSLKKSEIAQREVEFLGFNITKEGRGLTDTFKQKLLNITPPKDLKQLQSILGLLNFARNFIPNYSELVKPLYTIVANANGKFISWTEDNSNQLQHIISVLNQADNLEERNPETRLIIKVNSSPSAGYIRYYNEGSKRPIMYVNYIFSKAEAKFTQTEKLLTTMHKGLIKAMDLAMGQEILVYSPIVSMTKIQRTPLPERKALPVRWITWMTYLEDPRIQFHYDKSLPELQQIPNVTEDVIAKTKHPSEFAMVFYTDGSAIKHPDVNKSHSAGMGIAQVQFIPEYKIVHQWSIPLGDHTAQLAEIAAVEFACKKALKISGPVLIVTDSFYVAESANKELPYWKSNGFLNNKKKPLRHVSKWKSIAECLQLKPDIIIMHEKGHQQPMTTLHTEGNNLADKLATQGSYVVHAGKRTADGSEFEKRTADGSEFESPKKKAKVE

SEQ ID NO: 7250 - protein, 2094 aa, synthetic construct
MPAAKRVKLDGGDKKYSIGLDIGTNSVGWAVITDEYKVPSKKFKVLGNTDRHSIKKNLIGALLFDSGETAEATRLKRTARRRYTRRKNRICYLQEIFSNEMAKVDDSFFHRLEESFLVEEDKKHERHPIFGNIVDEVAYHEKYPTIYHLRKKLVDSTDKADLRLIYLALAHMIKFRGHFLIEGDLNPDNSDVDKLFIQLVQTYNQLFEENPINASGVDAKAILSARLSKSRRLENLIAQLPGEKKNGLFGNLIALSLGLTPNFKSNFDLAEDAKLQLSKDTYDDDLDNLLAQIGDQYADLFLAAKNLSDAILLSDILRVNTEITKAPLSASMIKRYDEHHQDLTLLKALVRQQLPEKYKEIFFDQSKNGYAGYIDGGASQEEFYKFIKPILEKMDGTEELLVKLNREDLLRKQRTFDNGSIPHQIHLGELHAILRRQEDFYPFLKDNREKIEKILTFRIPYYVGPLARGNSRFAWMTRKSEETITPWNFEEVVDKGASAQSFIERMTNFDKNLPNEKVLPKHSLLYEYFTVYNELTKVKYVTEGMRKPAFLSGEQKKAIVDLLFKTNRKVTVKQLKEDYFKKIECFDSVEISGVEDRFNASLGTYHDLLKIIKDKDFLDNEENEDILEDIVLTLTLFEDREMIEERLKTYAHLFDDKVMKQLKRRRYTGWGRLSRKLINGIRDKQSGKTILDFLKSDGFANRNFMQLIHDDSLTFKEDIQKAQVSGQGDSLHEHIANLAGSPAIKKGILQTVKVVDELVKVMGRHKPENIVIEMARENQTTQKGQKNSRERMKRIEEGIKELGSQILKEHPVENTQLQNEKLYLYYLQNGRDMYVDQELDINRLSDYDVDHIVPQSFLKDDSIDNKVLTRSDKARGKSDNVPSEEVVKKMKNYWRQLLNAKLITQRKFDNLTKAERGGLSELDKAGFIKRQLVETRQITKHVAQILDSRMNTKYDENDKLIREVKVITLKSKLVSDFRKDFQFYKVREINNYHHAHDAYLNAVVGTALIKKYPKLESEFVYGDYKVYDVRKMIAKSEQEIGKATAKYFFYSNIMNFFKTEITLANGEIRKRPLIETNGETGEIVWDKGRDFATVRKVLSMPQVNIVKKTEVQTGGFSKESILPKRNSDKLIARKKDWDPKKYGGFDSPTVAYSVLVVAKVEKGKSKKLKSVKELLGITIMERSSFEKNPIDFLEAKGYKEVKKDLIIKLPKYSLFELENGRKRMLASAGELQKGNELALPSKYVNFLYLASHYEKLKGSPEDNEQKQLFVEQHKHYLDEIIEQISEFSKRVILADANLDKVLSAYNKHRDKPIREQAENIIHLFTLTNLGAPAAFKYFDTTIDRKRYTSTKEVLDATLIHQSITGLYETRIDLSQLGGDGGPAPGGSEAAAKGGVLNLEEEYRLHEKPVPSSIDPSWLQLFPTVWAERAGMGLANQVPPVVVELRSGASPVAVRQYPMSKEAREGIRPHIQRFLDLGVLVPCQSPWNTPLLPVKKPGTNDYRPVQDLREINKRVQDIHPTVPNPYNLLSSLPPSHTWYSVLDLKDAFFCLKLHPNSQPLFAFEWRDPEKGNTGQLTWTRLPQGFKNSPTLFNEALHRDLAPFRALNPQVVLLQYVDDLLVAAPTYRDCKEGTQKLLQELSKLGYRVSAKKAQLCQKEVTYLGYLLKEGKRWLTPARKATVMKIPPPTTPRQVREFLGKAGFCRLFIPGFASLAAPLYPLTKPSIPFIWTEEHQKAFDRIKEALLSAPALALPDLTKPFTLYVDERAGVARGVLTQTLGPWRRPVAYLSKKLDPVASGWPTCLKAVAAVALLLKDADKLTLGQNVTVIASHSLESIVRQPPDRWMTNARMTHYQSLLLNERVSFAPPAVLNPATLLPVESEATPVHRCSEILAEETGTRRDLKDQPLPGVPAWYTDGSSFIAEGKRRAGAAIVDGKRTVWASSLPEGTSAQKAELVALTQALRLAEGKDINIYTDSRYAFATAHIHGAIYKQRGWLTSAGKDIKNKEEILALLEAIHLPKRVAIIHCPGHQKGNDPVATGNRRADEAAKQAALSTRVLAETTKPAGKRTADGSEFEKRTADGSEFESPKKKAKVE

SEQ ID NO: 7251 - protein, 2096 aa, synthetic construct
MPAAKRVKLDGGDKKYSIGLDIGTNSVGWAVITDEYKVPSKKFKVLGNTDRHSIKKNLIGALLFDSGETAEATRLKRTARRRYTRRKNRICYLQEIFSNEMAKVDDSFFHRLEESFLVEEDKKHERHPIFGNIVDEVAYHEKYPTIYHLRKKLVDSTDKADLRLIYLALAHMIKFRGHFLIEGDLNPDNSDVDKLFIQLVQTYNQLFEENPINASGVDAKAILSARLSKSRRLENLIAQLPGEKKNGLFGNLIALSLGLTPNFKSNFDLAEDAKLQLSKDTYDDDLDNLLAQIGDQYADLFLAAKNLSDAILLSDILRVNTEITKAPLSASMIKRYDEHHQDLTLLKALVRQQLPEKYKEIFFDQSKNGYAGYIDGGASQEEFYKFIKPILEKMDGTEELLVKLNREDLLRKQRTFDNGSIPHQIHLGELHAILRRQEDFYPFLKDNREKIEKILTFRIPYYVGPLARGNSRFAWMTRKSEETITPWNFEEVVDKGASAQSFIERMTNFDKNLPNEKVLPKHSLLYEYFTVYNELTKVKYVTEGMRKPAFLSGEQKKAIVDLLFKTNRKVTVKQLKEDYFKKIECFDSVEISGVEDRFNASLGTYHDLLKIIKDKDFLDNEENEDILEDIVLTLTLFEDREMIEERLKTYAHLFDDKVMKQLKRRRYTGWGRLSRKLINGIRDKQSGKTILDFLKSDGFANRNFMQLIHDDSLTFKEDIQKAQVSGQGDSLHEHIANLAGSPAIKKGILQTVKVVDELVKVMGRHKPENIVIEMARENQTTQKGQKNSRERMKRIEEGIKELGSQILKEHPVENTQLQNEKLYLYYLQNGRDMYVDQELDINRLSDYDVDHIVPQSFLKDDSIDNKVLTRSDKARGKSDNVPSEEVVKKMKNYWRQLLNAKLITQRKFDNLTKAERGGLSELDKAGFIKRQLVETRQITKHVAQILDSRMNTKYDENDKLIREVKVITLKSKLVSDFRKDFQFYKVREINNYHHAHDAYLNAVVGTALIKKYPKLESEFVYGDYKVYDVRKMIAKSEQEIGKATAKYFFYSNIMNFFKTEITLANGEIRKRPLIETNGETGEIVWDKGRDFATVRKVLSMPQVNIVKKTEVQTGGFSKESILPKRNSDKLIARKKDWDPKKYGGFDSPTVAYSVLVVAKVEKGKSKKLKSVKELLGITIMERSSFEKNPIDFLEAKGYKEVKKDLIIKLPKYSLFELENGRKRMLASAGELQKGNELALPSKYVNFLYLASHYEKLKGSPEDNEQKQLFVEQHKHYLDEIIEQISEFSKRVILADANLDKVLSAYNKHRDKPIREQAENIIHLFTLTNLGAPAAFKYFDTTIDRKRYTSTKEVLDATLIHQSITGLYETRIDLSQLGGDGGPAPGGSEAAAKGGTLNIEDEYRLHETSKEPDVPLGSTWLSDFPQAWAETGGMGLAVRQAPLIIPLKATSTPVSIKQYPMSQEARLGIKPHIQRLLDQGILVPCQSPWNTPLLPVKKPGTNDYRPVQDLREVNKRVEDIHPTVPNPYNLLSGLPPSHQWYTVLDLKDAFFCLRLHPTSQPLFAFEWRDPEMGISGQLTWTRLPQGFKNSPTLFDEALHRDLADFRIQHPDLILLQYVDDLLLAATSEQDCQRGTRALLQTLGNLGYRASAKKAQICQKQVKYLGYLLKEGQRWLTEARKETVMGQPTPKTPRQLREFLGTAGFCRLWIPGFAEMAAPLYPLTKTGTLFNWGPDQQKAYQEIKQALLTAPALGLPDLTKPFELFVDEKQGYAKGVLTQKLGPWRRPVAYLSKKLDPVAAGWPPCLRMVAAIAVLTKDAGKLTMGQPLVILAPHAVEALVKQPPDRWLSNARMTHYQAMLLDTDRVQFGPVVALNPATLLPLPEKEAPHDCLEILAETHGTRPDLTDQPIPDADYTWYTDGSSFLQEGQRRAGAAVTTETEVIWARALPAGTSAQRAELIALTQALKMAEGKKLNVYTDSRYAFATAHVHGEIYRRRGLLTSEGREIKNKNEILALLKALFLPKRLSIIHCPGHQKGNSAEARGNRMADQAAREAAMKAVLETSTLLAGKRTADGSEFEKRTADGSEFESPKKKAKVE

SEQ ID NO: 7252 - protein, 2096 aa, synthetic construct
MPAAKRVKLDGGDKKYSIGLDIGTNSVGWAVITDEYKVPSKKFKVLGNTDRHSIKKNLIGALLFDSGETAEATRLKRTARRRYTRRKNRICYLQEIFSNEMAKVDDSFFHRLEESFLVEEDKKHERHPIFGNIVDEVAYHEKYPTIYHLRKKLVDSTDKADLRLIYLALAHMIKFRGHFLIEGDLNPDNSDVDKLFIQLVQTYNQLFEENPINASGVDAKAILSARLSKSRRLENLIAQLPGEKKNGLFGNLIALSLGLTPNFKSNFDLAEDAKLQLSKDTYDDDLDNLLAQIGDQYADLFLAAKNLSDAILLSDILRVNTEITKAPLSASMIKRYDEHHQDLTLLKALVRQQLPEKYKEIFFDQSKNGYAGYIDGGASQEEFYKFIKPILEKMDGTEELLVKLNREDLLRKQRTFDNGSIPHQIHLGELHAILRRQEDFYPFLKDNREKIEKILTFRIPYYVGPLARGNSRFAWMTRKSEETITPWNFEEVVDKGASAQSFIERMTNFDKNLPNEKVLPKHSLLYEYFTVYNELTKVKYVTEGMRKPAFLSGEQKKAIVDLLFKTNRKVTVKQLKEDYFKKIECFDSVEISGVEDRFNASLGTYHDLLKIIKDKDFLDNEENEDILEDIVLTLTLFEDREMIEERLKTYAHLFDDKVMKQLKRRRYTGWGRLSRKLINGIRDKQSGKTILDFLKSDGFANRNFMQLIHDDSLTFKEDIQKAQVSGQGDSLHEHIANLAGSPAIKKGILQTVKVVDELVKVMGRHKPENIVIEMARENQTTQKGQKNSRERMKRIEEGIKELGSQILKEHPVENTQLQNEKLYLYYLQNGRDMYVDQELDINRLSDYDVDHIVPQSFLKDDSIDNKVLTRSDKARGKSDNVPSEEVVKKMKNYWRQLLNAKLITQRKFDNLTKAERGGLSELDKAGFIKRQLVETRQITKHVAQILDSRMNTKYDENDKLIREVKVITLKSKLVSDFRKDFQFYKVREINNYHHAHDAYLNAVVGTALIKKYPKLESEFVYGDYKVYDVRKMIAKSEQEIGKATAKYFFYSNIMNFFKTEITLANGEIRKRPLIETNGETGEIVWDKGRDFATVRKVLSMPQVNIVKKTEVQTGGFSKESILPKRNSDKLIARKKDWDPKKYGGFDSPTVAYSVLVVAKVEKGKSKKLKSVKELLGITIMERSSFEKNPIDFLEAKGYKEVKKDLIIKLPKYSLFELENGRKRMLASAGELQKGNELALPSKYVNFLYLASHYEKLKGSPEDNEQKQLFVEQHKHYLDEIIEQISEFSKRVILADANLDKVLSAYNKHRDKPIREQAENIIHLFTLTNLGAPAAFKYFDTTIDRKRYTSTKEVLDATLIHQSITGLYETRIDLSQLGGDGGPAPGGSEAAAKGGTLNIEDEYRLHETSKEPDVPLGSTWLSDFPQAWAETGGMGLAVRQAPLIIPLKATSTPVSIKQYPMSQEARLGIKPHIQRLLDQGILVPCQSPWNTPLLPVKKPGTNDYRPVQDLREVNKRVEDIHPTVPNPYNLLSGLPPSHQWYTVLDLKDAFFCLRLHPTSQPLFAFEWRDPEMGISGQLTWTRLPQGFKNSPTLFNEALHRDLADFRIQHPDLILLQYVDDLLLAATSEQDCQRGTRALLQTLGNLGYRASAKKAQICQKQVKYLGYLLKEGQRWLTEARKETVMGQPTPKTPRQLREFLGTAGFCRLWIPGFAEMAAPLYPLTKPGTLFNWGPDQQKAYQEIKQALLTAPALGLPDLTKPFELFVDEKQGYAKGVLTQKLGPWRRPVAYLSKKLDPVAAGWPPCLRMVAAIAVLTKDAGKLTMGQPLVILAPHAVEALVKQPPDRWLSNARMTHYQAMLLDTDRVQFGPVVALNPATLLPLPEKEAPHDCLEILAETHGTRPDLTDQPIPDADYTWYTDGSSFLQEGQRRAGAAVTTETEVIWARALPAGTSAQRAELIALTQALKMAEGKKLNVYTDSRYAFATAHVHGEIYRRRGWLTSEGREIKNKNEILALLKALFLPKRLSIIHCPGHQKGNSAEARGNRMADQAAREAAMKAVLETSTLLAGKRTADGSEFEKRTADGSEFESPKKKAKVE

SEQ ID NO: 7253 - protein, 2098 aa, synthetic construct
MPAAKRVKLDGGDKKYSIGLDIGTNSVGWAVITDEYKVPSKKFKVLGNTDRHSIKKNLIGALLFDSGETAEATRLKRTARRRYTRRKNRICYLQEIFSNEMAKVDDSFFHRLEESFLVEEDKKHERHPIFGNIVDEVAYHEKYPTIYHLRKKLVDSTDKADLRLIYLALAHMIKFRGHFLIEGDLNPDNSDVDKLFIQLVQTYNQLFEENPINASGVDAKAILSARLSKSRRLENLIAQLPGEKKNGLFGNLIALSLGLTPNFKSNFDLAEDAKLQLSKDTYDDDLDNLLAQIGDQYADLFLAAKNLSDAILLSDILRVNTEITKAPLSASMIKRYDEHHQDLTLLKALVRQQLPEKYKEIFFDQSKNGYAGYIDGGASQEEFYKFIKPILEKMDGTEELLVKLNREDLLRKQRTFDNGSIPHQIHLGELHAILRRQEDFYPFLKDNREKIEKILTFRIPYYVGPLARGNSRFAWMTRKSEETITPWNFEEVVDKGASAQSFIERMTNFDKNLPNEKVLPKHSLLYEYFTVYNELTKVKYVTEGMRKPAFLSGEQKKAIVDLLFKTNRKVTVKQLKEDYFKKIECFDSVEISGVEDRFNASLGTYHDLLKIIKDKDFLDNEENEDILEDIVLTLTLFEDREMIEERLKTYAHLFDDKVMKQLKRRRYTGWGRLSRKLINGIRDKQSGKTILDFLKSDGFANRNFMQLIHDDSLTFKEDIQKAQVSGQGDSLHEHIANLAGSPAIKKGILQTVKVVDELVKVMGRHKPENIVIEMARENQTTQKGQKNSRERMKRIEEGIKELGSQILKEHPVENTQLQNEKLYLYYLQNGRDMYVDQELDINRLSDYDVDHIVPQSFLKDDSIDNKVLTRSDKARGKSDNVPSEEVVKKMKNYWRQLLNAKLITQRKFDNLTKAERGGLSELDKAGFIKRQLVETRQITKHVAQILDSRMNTKYDENDKLIREVKVITLKSKLVSDFRKDFQFYKVREINNYHHAHDAYLNAVVGTALIKKYPKLESEFVYGDYKVYDVRKMIAKSEQEIGKATAKYFFYSNIMNFFKTEITLANGEIRKRPLIETNGETGEIVWDKGRDFATVRKVLSMPQVNIVKKTEVQTGGFSKESILPKRNSDKLIARKKDWDPKKYGGFDSPTVAYSVLVVAKVEKGKSKKLKSVKELLGITIMERSSFEKNPIDFLEAKGYKEVKKDLIIKLPKYSLFELENGRKRMLASAGELQKGNELALPSKYVNFLYLASHYEKLKGSPEDNEQKQLFVEQHKHYLDEIIEQISEFSKRVILADANLDKVLSAYNKHRDKPIREQAENIIHLFTLTNLGAPAAFKYFDTTIDRKRYTSTKEVLDATLIHQSITGLYETRIDLSQLGGDGGPAPEAAAKGGSGGTAPLEEEYRLFLEAPIQNVTLLEQWKREIPKVWAEINPPGLASTQAPIHVQLLSTALPVRVRQYPITLEAKRSLRETIRKFRAAGILRPVHSPWNTPLLPVRKSGTSEYRMVQDLREVNKRVETIHPTVPNPYTLLSLLPPDRIWYSVLDLKDAFFCIPLAPESQLIFAFEWADAEEGESGQLTWTRLPQGFKNSPTLFDEALNRDLQGFRLDHPSVSLLQYVDDLLIAADTQAACLSATRDLLMTLAELGYRVSGKKAQLCQEEVTYLGFKIHKGSRSLSNSRTQAILQIPVPKTKRQVREFLGTIGYCRLWIPGFAELAQPLYAATRGGNDPLVWGEKEEEAFQSLKLALTQPPALALPSLDKPFQLFVEETSGAAKGVLTQALGPWKRPVAYLSKRLDPVAAGWPRCLRAIAAAALLTREASKLTFGQDIEITSSHNLESLLRSPPDKWLTNARITQYQVLLLDPPRVRFKQTAALNPATLLPETDDTLPIHHCLDTLDSLTSTRPDLTDQPLAQAEATLFTDGSSYIRDGKRYAGAAVVTLDSVIWAEPLPIGTSAQKAELIALTKALEWSKDKSVNIYTDSRYAFATLHVHGMIYRERGLLTAGGKAIKNAPEILALLTAVWLPKRVAVMHCKGHQKDDAPTSTGNRRADEVAREVAIRPLSTQATISAGKRTADGSEFEKRTADGSEFESPKKKAKVE

SEQ ID NO: 7254 - protein, 2173 aa, synthetic construct
MPAAKRVKLDGGDKKYSIGLDIGTNSVGWAVITDEYKVPSKKFKVLGNTDRHSIKKNLIGALLFDSGETAEATRLKRTARRRYTRRKNRICYLQEIFSNEMAKVDDSFFHRLEESFLVEEDKKHERHPIFGNIVDEVAYHEKYPTIYHLRKKLVDSTDKADLRLIYLALAHMIKFRGHFLIEGDLNPDNSDVDKLFIQLVQTYNQLFEENPINASGVDAKAILSARLSKSRRLENLIAQLPGEKKNGLFGNLIALSLGLTPNFKSNFDLAEDAKLQLSKDTYDDDLDNLLAQIGDQYADLFLAAKNLSDAILLSDILRVNTEITKAPLSASMIKRYDEHHQDLTLLKALVRQQLPEKYKEIFFDQSKNGYAGYIDGGASQEEFYKFIKPILEKMDGTEELLVKLNREDLLRKQRTFDNGSIPHQIHLGELHAILRRQEDFYPFLKDNREKIEKILTFRIPYYVGPLARGNSRFAWMTRKSEETITPWNFEEVVDKGASAQSFIERMTNFDKNLPNEKVLPKHSLLYEYFTVYNELTKVKYVTEGMRKPAFLSGEQKKAIVDLLFKTNRKVTVKQLKEDYFKKIECFDSVEISGVEDRFNASLGTYHDLLKIIKDKDFLDNEENEDILEDIVLTLTLFEDREMIEERLKTYAHLFDDKVMKQLKRRRYTGWGRLSRKLINGIRDKQSGKTILDFLKSDGFANRNFMQLIHDDSLTFKEDIQKAQVSGQGDSLHEHIANLAGSPAIKKGILQTVKVVDELVKVMGRHKPENIVIEMARENQTTQKGQKNSRERMKRIEEGIKELGSQILKEHPVENTQLQNEKLYLYYLQNGRDMYVDQELDINRLSDYDVDHIVPQSFLKDDSIDNKVLTRSDKARGKSDNVPSEEVVKKMKNYWRQLLNAKLITQRKFDNLTKAERGGLSELDKAGFIKRQLVETRQITKHVAQILDSRMNTKYDENDKLIREVKVITLKSKLVSDFRKDFQFYKVREINNYHHAHDAYLNAVVGTALIKKYPKLESEFVYGDYKVYDVRKMIAKSEQEIGKATAKYFFYSNIMNFFKTEITLANGEIRKRPLIETNGETGEIVWDKGRDFATVRKVLSMPQVNIVKKTEVQTGGFSKESILPKRNSDKLIARKKDWDPKKYGGFDSPTVAYSVLVVAKVEKGKSKKLKSVKELLGITIMERSSFEKNPIDFLEAKGYKEVKKDLIIKLPKYSLFELENGRKRMLASAGELQKGNELALPSKYVNFLYLASHYEKLKGSPEDNEQKQLFVEQHKHYLDEIIEQISEFSKRVILADANLDKVLSAYNKHRDKPIREQAENIIHLFTLTNLGAPAAFKYFDTTIDRKRYTSTKEVLDATLIHQSITGLYETRIDLSQLGGDGGPAPEAAAKGGSGGMDLLKPLTVERKGVKIKGYWNSQADITCVPKDLLQGEEPVRQQNVTTIHGTQEGDVYYVNLKIDGRRINTEVIGTTLDYAIITPGDVPWILKKPLELTIKLDLEEQQGTLLNNSILSKKGKEELKQLFEKYSALWQSWENQVGHRRIRPHKIATGTVKPTPQKQYHINPKAKPDIQIVINDLLKQGVLIQKESTMNTPVYPVPKPNGRWRMVLDYRAVNKVTPLIAVQNQHSYGILGSLFKGRYKTTIDLSNGFWAHPIVPEDYWITAFTWQGKQYCWTVLPQGFLNSPGLFTGDVVDLLQGIPNVEVYVDDVYISHDSEKEHLEYLDILFNRLKEAGYIISLKKSNIANSIVDFLGFQITNEGRGLTDTFKEKLENITAPTTLKQLQSILGLLNFARNFIPDFTELIAPLYALIPKSTKNYVPWQIEHSTTLETLITKLNGAEYLQGRKGDKTLIMKVNASYTTGYIRYYNEGEKKPISYVSIVFSKTELKFTELEKLLTTVHKGLLKALDLSMGQNIHVYSPIVSMQNIQKTPQTAKKALASRWLSWLSYLEDPRIRFFYDPQMPALKDLPAVDTGKDNKKHPSNFQHIFYTDGSAITSPTKEGHLNAGMGIVYFINKDGNLQKQQEWSISLGNHTAQFAEIAAFEFALKKCLPLGGNILVVTDSNYVAKAYNEELDVWASNGFVNNRKKPLKHISKWKSVADLKRLRPDVVVTHEPGHQKLDSSPHAYGNNLADQLATQASFKVHAGKRTADGSEFEKRTADGSEFESPKKKAKVE

SEQ ID NO: 7255 - protein, 2087 aa, synthetic construct
MPAAKRVKLDGGDKKYSIGLDIGTNSVGWAVITDEYKVPSKKFKVLGNTDRHSIKKNLIGALLFDSGETAEATRLKRTARRRYTRRKNRICYLQEIFSNEMAKVDDSFFHRLEESFLVEEDKKHERHPIFGNIVDEVAYHEKYPTIYHLRKKLVDSTDKADLRLIYLALAHMIKFRGHFLIEGDLNPDNSDVDKLFIQLVQTYNQLFEENPINASGVDAKAILSARLSKSRRLENLIAQLPGEKKNGLFGNLIALSLGLTPNFKSNFDLAEDAKLQLSKDTYDDDLDNLLAQIGDQYADLFLAAKNLSDAILLSDILRVNTEITKAPLSASMIKRYDEHHQDLTLLKALVRQQLPEKYKEIFFDQSKNGYAGYIDGGASQEEFYKFIKPILEKMDGTEELLVKLNREDLLRKQRTFDNGSIPHQIHLGELHAILRRQEDFYPFLKDNREKIEKILTFRIPYYVGPLARGNSRFAWMTRKSEETITPWNFEEVVDKGASAQSFIERMTNFDKNLPNEKVLPKHSLLYEYFTVYNELTKVKYVTEGMRKPAFLSGEQKKAIVDLLFKTNRKVTVKQLKEDYFKKIECFDSVEISGVEDRFNASLGTYHDLLKIIKDKDFLDNEENEDILEDIVLTLTLFEDREMIEERLKTYAHLFDDKVMKQLKRRRYTGWGRLSRKLINGIRDKQSGKTILDFLKSDGFANRNFMQLIHDDSLTFKEDIQKAQVSGQGDSLHEHIANLAGSPAIKKGILQTVKVVDELVKVMGRHKPENIVIEMARENQTTQKGQKNSRERMKRIEEGIKELGSQILKEHPVENTQLQNEKLYLYYLQNGRDMYVDQELDINRLSDYDVDHIVPQSFLKDDSIDNKVLTRSDKARGKSDNVPSEEVVKKMKNYWRQLLNAKLITQRKFDNLTKAERGGLSELDKAGFIKRQLVETRQITKHVAQILDSRMNTKYDENDKLIREVKVITLKSKLVSDFRKDFQFYKVREINNYHHAHDAYLNAVVGTALIKKYPKLESEFVYGDYKVYDVRKMIAKSEQEIGKATAKYFFYSNIMNFFKTEITLANGEIRKRPLIETNGETGEIVWDKGRDFATVRKVLSMPQVNIVKKTEVQTGGFSKESILPKRNSDKLIARKKDWDPKKYGGFDSPTVAYSVLVVAKVEKGKSKKLKSVKELLGITIMERSSFEKNPIDFLEAKGYKEVKKDLIIKLPKYSLFELENGRKRMLASAGELQKGNELALPSKYVNFLYLASHYEKLKGSPEDNEQKQLFVEQHKHYLDEIIEQISEFSKRVILADANLDKVLSAYNKHRDKPIREQAENIIHLFTLTNLGAPAAFKYFDTTIDRKRYTSTKEVLDATLIHQSITGLYETRIDLSQLGGDGGPAPEAAAKGGSGGVPWILKKPLELTIKLDLEEQQGTLLNNSILSKKGKEELKQLFEKYSALWQSWENQVGHRRIRPHKIATGTVKPTPQKQYHINPKAKPDIQIVINDLLKQGVLIQKESTMNTPVYPVPKPNGRWRMVLDYRAVNKVTPLIAVQNQHSYGILGSLFKGRYKTTIDLSNGFWAHPIVPEDYWITAFTWQGKQYCWTVLPQGFLNSPGLFTGDVVDLLQGIPNVEVYVDDVYISHDSEKEHLEYLDILFNRLKEAGYIISLKKSNIANSIVDFLGFQITNEGRGLTDTFKEKLENITAPTTLKQLQSILGLLNFARNFIPDFTELIAPLYALIPKSTKNYVPWQIEHSTTLETLITKLNGAEYLQGRKGDKTLIMKVNASYTTGYIRYYNEGEKKPISYVSIVFSKTELKFTELEKLLTTVHKGLLKALDLSMGQNIHVYSPIVSMQNIQKTPQTAKKALASRWLSWLSYLEDPRIRFFYDPQMPALKDLPAVDTGKDNKKHPSNFQHIFYTDGSAITSPTKEGHLNAGMGIVYFINKDGNLQKQQEWSISLGNHTAQFAEIAAFEFALKKCLPLGGNILVVTDSNYVAKAYNEELDVWASNGFVNNRKKPLKHISKWKSVADLKRLRPDVVVTHEPGHQKLDSSPHAYGNNLADQLATQASFKVHAGKRTADGSEFEKRTADGSEFESPKKKAKVE

SEQ ID NO: 7256 - protein, 2095 aa, synthetic construct
MPAAKRVKLDGGDKKYSIGLDIGTNSVGWAVITDEYKVPSKKFKVLGNTDRHSIKKNLIGALLFDSGETAEATRLKRTARRRYTRRKNRICYLQEIFSNEMAKVDDSFFHRLEESFLVEEDKKHERHPIFGNIVDEVAYHEKYPTIYHLRKKLVDSTDKADLRLIYLALAHMIKFRGHFLIEGDLNPDNSDVDKLFIQLVQTYNQLFEENPINASGVDAKAILSARLSKSRRLENLIAQLPGEKKNGLFGNLIALSLGLTPNFKSNFDLAEDAKLQLSKDTYDDDLDNLLAQIGDQYADLFLAAKNLSDAILLSDILRVNTEITKAPLSASMIKRYDEHHQDLTLLKALVRQQLPEKYKEIFFDQSKNGYAGYIDGGASQEEFYKFIKPILEKMDGTEELLVKLNREDLLRKQRTFDNGSIPHQIHLGELHAILRRQEDFYPFLKDNREKIEKILTFRIPYYVGPLARGNSRFAWMTRKSEETITPWNFEEVVDKGASAQSFIERMTNFDKNLPNEKVLPKHSLLYEYFTVYNELTKVKYVTEGMRKPAFLSGEQKKAIVDLLFKTNRKVTVKQLKEDYFKKIECFDSVEISGVEDRFNASLGTYHDLLKIIKDKDFLDNEENEDILEDIVLTLTLFEDREMIEERLKTYAHLFDDKVMKQLKRRRYTGWGRLSRKLINGIRDKQSGKTILDFLKSDGFANRNFMQLIHDDSLTFKEDIQKAQVSGQGDSLHEHIANLAGSPAIKKGILQTVKVVDELVKVMGRHKPENIVIEMARENQTTQKGQKNSRERMKRIEEGIKELGSQILKEHPVENTQLQNEKLYLYYLQNGRDMYVDQELDINRLSDYDVDHIVPQSFLKDDSIDNKVLTRSDKARGKSDNVPSEEVVKKMKNYWRQLLNAKLITQRKFDNLTKAERGGLSELDKAGFIKRQLVETRQITKHVAQILDSRMNTKYDENDKLIREVKVITLKSKLVSDFRKDFQFYKVREINNYHHAHDAYLNAVVGTALIKKYPKLESEFVYGDYKVYDVRKMIAKSEQEIGKATAKYFFYSNIMNFFKTEITLANGEIRKRPLIETNGETGEIVWDKGRDFATVRKVLSMPQVNIVKKTEVQTGGFSKESILPKRNSDKLIARKKDWDPKKYGGFDSPTVAYSVLVVAKVEKGKSKKLKSVKELLGITIMERSSFEKNPIDFLEAKGYKEVKKDLIIKLPKYSLFELENGRKRMLASAGELQKGNELALPSKYVNFLYLASHYEKLKGSPEDNEQKQLFVEQHKHYLDEIIEQISEFSKRVILADANLDKVLSAYNKHRDKPIREQAENIIHLFTLTNLGAPAAFKYFDTTIDRKRYTSTKEVLDATLIHQSITGLYETRIDLSQLGGDGGPAPEAAAKGGSGGTLQLEEEYRLFEPESTQKQEMDIWLKNFPQAWAETGGMGTAHCQAPVLIQLKATATPISIRQYPMPHEAYQGIKPHIRRMLDQGILKPCQSPWNTPLLPVKKPGTEDYRPVQDLREVNKRVEDIHPTVPNPYNLLSTLPPSHPWYTVLDLKDAFFCLRLHSESQLLFAFEWRDPEIGLSGQLTWTRLPQGFKNSPTLFNEALHSDLADFRVRYPALVLLQYVDDLLLAAATRTECLEGTKALLETLGNKGYRASAKKAQICLQEVTYLGYSLKDGQRWLTKARKEAILSIPVPKNSRQVREFLGTAGYCRLWIPGFAELAAPLYPLTRPGTLFQWGTEQQLAFEDIKKALLSSPALGLPDITKPFELFIDENSGFAKGVLVQKLGPWKRPVAYLSKKLDTVASGWPPCLRMVAAIAILVKDAGKLTLGQPLTILTSHPVEALVRQPPNKWLSNARMTHYQAMLLDAERVHFGPTVSLNPATLLPLPSGGNHHDCLQILAETHGTRPDLTDQPLPDADLTWYTDGSSFIRNGEREAGAAVTTESEVIWAAPLPPGTSAQRAELIALTQALKMAEGKKLTVYTDSRYAFATTHVHGEIYRRRGWLTSEGKEIKNKNEILALLEALFLPKRLSIIHCPGHQKGDSPQAKGNRLADDTAKKAATETHSSLTVLPAGKRTADGSEFEKRTADGSEFESPKKKAKVE

SEQ ID NO: 7257 - protein, 2094 aa, synthetic construct
MPAAKRVKLDGGDKKYSIGLDIGTNSVGWAVITDEYKVPSKKFKVLGNTDRHSIKKNLIGALLFDSGETAEATRLKRTARRRYTRRKNRICYLQEIFSNEMAKVDDSFFHRLEESFLVEEDKKHERHPIFGNIVDEVAYHEKYPTIYHLRKKLVDSTDKADLRLIYLALAHMIKFRGHFLIEGDLNPDNSDVDKLFIQLVQTYNQLFEENPINASGVDAKAILSARLSKSRRLENLIAQLPGEKKNGLFGNLIALSLGLTPNFKSNFDLAEDAKLQLSKDTYDDDLDNLLAQIGDQYADLFLAAKNLSDAILLSDILRVNTEITKAPLSASMIKRYDEHHQDLTLLKALVRQQLPEKYKEIFFDQSKNGYAGYIDGGASQEEFYKFIKPILEKMDGTEELLVKLNREDLLRKQRTFDNGSIPHQIHLGELHAILRRQEDFYPFLKDNREKIEKILTFRIPYYVGPLARGNSRFAWMTRKSEETITPWNFEEVVDKGASAQSFIERMTNFDKNLPNEKVLPKHSLLYEYFTVYNELTKVKYVTEGMRKPAFLSGEQKKAIVDLLFKTNRKVTVKQLKEDYFKKIECFDSVEISGVEDRFNASLGTYHDLLKIIKDKDFLDNEENEDILEDIVLTLTLFEDREMIEERLKTYAHLFDDKVMKQLKRRRYTGWGRLSRKLINGIRDKQSGKTILDFLKSDGFANRNFMQLIHDDSLTFKEDIQKAQVSGQGDSLHEHIANLAGSPAIKKGILQTVKVVDELVKVMGRHKPENIVIEMARENQTTQKGQKNSRERMKRIEEGIKELGSQILKEHPVENTQLQNEKLYLYYLQNGRDMYVDQELDINRLSDYDVDHIVPQSFLKDDSIDNKVLTRSDKARGKSDNVPSEEVVKKMKNYWRQLLNAKLITQRKFDNLTKAERGGLSELDKAGFIKRQLVETRQITKHVAQILDSRMNTKYDENDKLIREVKVITLKSKLVSDFRKDFQFYKVREINNYHHAHDAYLNAVVGTALIKKYPKLESEFVYGDYKVYDVRKMIAKSEQEIGKATAKYFFYSNIMNFFKTEITLANGEIRKRPLIETNGETGEIVWDKGRDFATVRKVLSMPQVNIVKKTEVQTGGFSKESILPKRNSDKLIARKKDWDPKKYGGFDSPTVAYSVLVVAKVEKGKSKKLKSVKELLGITIMERSSFEKNPIDFLEAKGYKEVKKDLIIKLPKYSLFELENGRKRMLASAGELQKGNELALPSKYVNFLYLASHYEKLKGSPEDNEQKQLFVEQHKHYLDEIIEQISEFSKRVILADANLDKVLSAYNKHRDKPIREQAENIIHLFTLTNLGAPAAFKYFDTTIDRKRYTSTKEVLDATLIHQSITGLYETRIDLSQLGGDGGPAPEAAAKGGSGGVLNLEEEYRLHEKPVPSSIDPSWLQLFPTVWAERAGMGLANQVPPVVVELRSGASPVAVRQYPMSKEAREGIRPHIQKFLDLGVLVPCRSPWNTPLLPVKKPGTNDYRPVQDLREINKRVQDIHPTVPNPYNLLSSLPPSYTWYSVLDLKDAFFCLRLHPNSQPLFAFEWKDPEKGNTGQLTWTRLPQGFKNSPTLFNEALHRDLAPFRALNPQVVLLQYVDDLLVAAPTYEDCKKGTQKLLQELSKLGYRVSAKKAQLCQREVTYLGYLLKEGKRWLTPARKATVMKIPVPTTPRQVREFLGKAGFCRLFIPGFASLAAPLYPLTKPSIPFIWTEEHQQAFDHIKKALLSAPALALPDLTKPFTLYIDERAGVARGVLTQTLGPWRRPVAYLSKKLDPVASGWPTCLKAVAAVALLLKDADKLTLGQNVTVIASHSLESIVRQPPDRWMTNARMTHYQSLLLNERVSFAPPAVLNPATLLPVESEATPVHRCSEILAEETGTRRDLEDQPLPGVPTWYTDGSSFITEGKRRAGAPIVDGKRTVWASSLPEGTSAQKAELVALTQALRLAEGKNINIYTDSRYAFATAHIHGAIYKQRGWLTSAGKDIKNKEEILALLEAIHLPRRVAIIHCPGHQRGSNPVATGNRRADEAAKQAALSTRVLAGTTKPAGKRTADGSEFEKRTADGSEFESPKKKAKVE

SEQ ID NO: 7258 - protein, 2127 aa, synthetic construct
MPAAKRVKLDGGDKKYSIGLDIGTNSVGWAVITDEYKVPSKKFKVLGNTDRHSIKKNLIGALLFDSGETAEATRLKRTARRRYTRRKNRICYLQEIFSNEMAKVDDSFFHRLEESFLVEEDKKHERHPIFGNIVDEVAYHEKYPTIYHLRKKLVDSTDKADLRLIYLALAHMIKFRGHFLIEGDLNPDNSDVDKLFIQLVQTYNQLFEENPINASGVDAKAILSARLSKSRRLENLIAQLPGEKKNGLFGNLIALSLGLTPNFKSNFDLAEDAKLQLSKDTYDDDLDNLLAQIGDQYADLFLAAKNLSDAILLSDILRVNTEITKAPLSASMIKRYDEHHQDLTLLKALVRQQLPEKYKEIFFDQSKNGYAGYIDGGASQEEFYKFIKPILEKMDGTEELLVKLNREDLLRKQRTFDNGSIPHQIHLGELHAILRRQEDFYPFLKDNREKIEKILTFRIPYYVGPLARGNSRFAWMTRKSEETITPWNFEEVVDKGASAQSFIERMTNFDKNLPNEKVLPKHSLLYEYFTVYNELTKVKYVTEGMRKPAFLSGEQKKAIVDLLFKTNRKVTVKQLKEDYFKKIECFDSVEISGVEDRFNASLGTYHDLLKIIKDKDFLDNEENEDILEDIVLTLTLFEDREMIEERLKTYAHLFDDKVMKQLKRRRYTGWGRLSRKLINGIRDKQSGKTILDFLKSDGFANRNFMQLIHDDSLTFKEDIQKAQVSGQGDSLHEHIANLAGSPAIKKGILQTVKVVDELVKVMGRHKPENIVIEMARENQTTQKGQKNSRERMKRIEEGIKELGSQILKEHPVENTQLQNEKLYLYYLQNGRDMYVDQELDINRLSDYDVDHIVPQSFLKDDSIDNKVLTRSDKARGKSDNVPSEEVVKKMKNYWRQLLNAKLITQRKFDNLTKAERGGLSELDKAGFIKRQLVETRQITKHVAQILDSRMNTKYDENDKLIREVKVITLKSKLVSDFRKDFQFYKVREINNYHHAHDAYLNAVVGTALIKKYPKLESEFVYGDYKVYDVRKMIAKSEQEIGKATAKYFFYSNIMNFFKTEITLANGEIRKRPLIETNGETGEIVWDKGRDFATVRKVLSMPQVNIVKKTEVQTGGFSKESILPKRNSDKLIARKKDWDPKKYGGFDSPTVAYSVLVVAKVEKGKSKKLKSVKELLGITIMERSSFEKNPIDFLEAKGYKEVKKDLIIKLPKYSLFELENGRKRMLASAGELQKGNELALPSKYVNFLYLASHYEKLKGSPEDNEQKQLFVEQHKHYLDEIIEQISEFSKRVILADANLDKVLSAYNKHRDKPIREQAENIIHLFTLTNLGAPAAFKYFDTTIDRKRYTSTKEVLDATLIHQSITGLYETRIDLSQLGGDGGPAPEAAAKGGSGGLLGRDLLTKLKAQIQFSTEGPQVTWEDRPAMCLVLNLEEEYRLHEKPVPPSIDPSWLQLFPMVWAEKAGMGLANQVPPVVVELKSDASPVAVRQYPMSKEAREGIRPHIQRFLDLGILVPCQSPWNTPLLPVKKPGTNDYRPVQDLREVNKRVQDIHPTVPNPYNLLSSLPPSHTWYSVLDLKDAFFCLKLHPNSQPLFAFEWRDPEKGNTGQLTWTRLPQGFKNSPTLFNEALHRDLASFRALNPQVVMLQYVDDLLVAAPTYRDCKEGTRRLLQELSKLGYRVSAKKAQLCREEVTYLGYLLKGGKRWLTPARKATVMKIPTPTTPRQVREFLGKAGFCRLFIPGFASLAAPLYPLTRPKVPFTWTEAHQEAFGRIKEALLSAPALALPDLTKPFALYVDEKEGVARGVLTQTLGPWRRPVAYLSKKLDPVASGWPTCLKAIAAVALLLKDADKLTLGQNVLVIAPHNLESIVRQPPDRWMTNARMTHYQSLLLNERVSFAPPAILNPATLLPVESDDTPIHICSEILAEETGTRPDLRDQPLPGVPAWYTDGSSFIMDGRRQAGAAIVDNKRTVWASNLPEGTSAQKAELIALTQALRLAEGKSINIYTDSRYAFATAHVHGAIYKQRGWLTSAGKDIKNKEEILALLEAIHLPKRVAIIHCPGHQRGTDPVATGNRKADEAAKQAAQSTRILTETTKNAGKRTADGSEFEKRTADGSEFESPKKKAKVE

SEQ ID NO: 7259 - protein, 2218 aa, synthetic construct
MPAAKRVKLDGGDKKYSIGLDIGTNSVGWAVITDEYKVPSKKFKVLGNTDRHSIKKNLIGALLFDSGETAEATRLKRTARRRYTRRKNRICYLQEIFSNEMAKVDDSFFHRLEESFLVEEDKKHERHPIFGNIVDEVAYHEKYPTIYHLRKKLVDSTDKADLRLIYLALAHMIKFRGHFLIEGDLNPDNSDVDKLFIQLVQTYNQLFEENPINASGVDAKAILSARLSKSRRLENLIAQLPGEKKNGLFGNLIALSLGLTPNFKSNFDLAEDAKLQLSKDTYDDDLDNLLAQIGDQYADLFLAAKNLSDAILLSDILRVNTEITKAPLSASMIKRYDEHHQDLTLLKALVRQQLPEKYKEIFFDQSKNGYAGYIDGGASQEEFYKFIKPILEKMDGTEELLVKLNREDLLRKQRTFDNGSIPHQIHLGELHAILRRQEDFYPFLKDNREKIEKILTFRIPYYVGPLARGNSRFAWMTRKSEETITPWNFEEVVDKGASAQSFIERMTNFDKNLPNEKVLPKHSLLYEYFTVYNELTKVKYVTEGMRKPAFLSGEQKKAIVDLLFKTNRKVTVKQLKEDYFKKIECFDSVEISGVEDRFNASLGTYHDLLKIIKDKDFLDNEENEDILEDIVLTLTLFEDREMIEERLKTYAHLFDDKVMKQLKRRRYTGWGRLSRKLINGIRDKQSGKTILDFLKSDGFANRNFMQLIHDDSLTFKEDIQKAQVSGQGDSLHEHIANLAGSPAIKKGILQTVKVVDELVKVMGRHKPENIVIEMARENQTTQKGQKNSRERMKRIEEGIKELGSQILKEHPVENTQLQNEKLYLYYLQNGRDMYVDQELDINRLSDYDVDHIVPQSFLKDDSIDNKVLTRSDKARGKSDNVPSEEVVKKMKNYWRQLLNAKLITQRKFDNLTKAERGGLSELDKAGFIKRQLVETRQITKHVAQILDSRMNTKYDENDKLIREVKVITLKSKLVSDFRKDFQFYKVREINNYHHAHDAYLNAVVGTALIKKYPKLESEFVYGDYKVYDVRKMIAKSEQEIGKATAKYFFYSNIMNFFKTEITLANGEIRKRPLIETNGETGEIVWDKGRDFATVRKVLSMPQVNIVKKTEVQTGGFSKESILPKRNSDKLIARKKDWDPKKYGGFDSPTVAYSVLVVAKVEKGKSKKLKSVKELLGITIMERSSFEKNPIDFLEAKGYKEVKKDLIIKLPKYSLFELENGRKRMLASAGELQKGNELALPSKYVNFLYLASHYEKLKGSPEDNEQKQLFVEQHKHYLDEIIEQISEFSKRVILADANLDKVLSAYNKHRDKPIREQAENIIHLFTLTNLGAPAAFKYFDTTIDRKRYTSTKEVLDATLIHQSITGLYETRIDLSQLGGDGGPAPEAAAKGGSGGTLGDQGSRGSDPLPEPRVTLTVEGIPTEFLVNTGAEHSVLTKPMGKMGSKRTVVAGATGSKVYPWTTKRLLKIGQKQVTHSFLVIPECPAPLLGRDLLTKLKAQIQFSTEGPQVTWEDRPAMCLVLNLEEEYRLHEKPVPPSIDPSWLQLFPMVWAEKAGMGLANQVPPVVVELKSDASPVAVRQYPMSKEAREGIRPHIQRFLDLGILVPCQSPWNTPLLPVKKPGTNDYRPVQDLREVNKRVQDIHPTVPNPYNLLSSLPPSHTWYSVLDLKDAFFCLKLHPNSQPLFAFEWRDPEKGNTGQLTWTRLPQGFKNSPTLFNEALHRDLASFRALNPQVVMLQYVDDLLVAAPTYRDCKEGTRRLLQELSKLGYRVSAKKAQLCREEVTYLGYLLKGGKRWLTPARKATVMKIPTPTTPRQVREFLGTAGFCRLWIPGFASLAAPLYPLTRPKVPFTWTEAHQEAFGRIKEALLSAPALALPDLTKPFALYVDEKEGVARGVLTQTLGPWRRPVAYLSKKLDPVASGWPTCLKAIAAVALLLKDADKLTLGQNVLVIAPHNLESIVRQPPDRWMTNARMTHYQSLLLNERVSFAPPAILNPATLLPVESDDTPIHICSEILAEETGTRPDLRDQPLPGVPAWYTDGSSFIMDGRRQAGAAIVDNKRTVWASNLPEGTSAQKAELIALTQALRLAEGKSINIYTDSRYAFATAHVHGAIYKQRGWLTSAGKDIKNKEEILALLEAIHLPKRVAIIHCPGHQRGTDPVATGNRKADEAAKQAAQSTRILTETTKNAGKRTADGSEFEKRTADGSEFESPKKKAKVE

SEQ ID NO: 7260 - protein, 2218 aa, synthetic construct
MPAAKRVKLDGGDKKYSIGLDIGTNSVGWAVITDEYKVPSKKFKVLGNTDRHSIKKNLIGALLFDSGETAEATRLKRTARRRYTRRKNRICYLQEIFSNEMAKVDDSFFHRLEESFLVEEDKKHERHPIFGNIVDEVAYHEKYPTIYHLRKKLVDSTDKADLRLIYLALAHMIKFRGHFLIEGDLNPDNSDVDKLFIQLVQTYNQLFEENPINASGVDAKAILSARLSKSRRLENLIAQLPGEKKNGLFGNLIALSLGLTPNFKSNFDLAEDAKLQLSKDTYDDDLDNLLAQIGDQYADLFLAAKNLSDAILLSDILRVNTEITKAPLSASMIKRYDEHHQDLTLLKALVRQQLPEKYKEIFFDQSKNGYAGYIDGGASQEEFYKFIKPILEKMDGTEELLVKLNREDLLRKQRTFDNGSIPHQIHLGELHAILRRQEDFYPFLKDNREKIEKILTFRIPYYVGPLARGNSRFAWMTRKSEETITPWNFEEVVDKGASAQSFIERMTNFDKNLPNEKVLPKHSLLYEYFTVYNELTKVKYVTEGMRKPAFLSGEQKKAIVDLLFKTNRKVTVKQLKEDYFKKIECFDSVEISGVEDRFNASLGTYHDLLKIIKDKDFLDNEENEDILEDIVLTLTLFEDREMIEERLKTYAHLFDDKVMKQLKRRRYTGWGRLSRKLINGIRDKQSGKTILDFLKSDGFANRNFMQLIHDDSLTFKEDIQKAQVSGQGDSLHEHIANLAGSPAIKKGILQTVKVVDELVKVMGRHKPENIVIEMARENQTTQKGQKNSRERMKRIEEGIKELGSQILKEHPVENTQLQNEKLYLYYLQNGRDMYVDQELDINRLSDYDVDHIVPQSFLKDDSIDNKVLTRSDKARGKSDNVPSEEVVKKMKNYWRQLLNAKLITQRKFDNLTKAERGGLSELDKAGFIKRQLVETRQITKHVAQILDSRMNTKYDENDKLIREVKVITLKSKLVSDFRKDFQFYKVREINNYHHAHDAYLNAVVGTALIKKYPKLESEFVYGDYKVYDVRKMIAKSEQEIGKATAKYFFYSNIMNFFKTEITLANGEIRKRPLIETNGETGEIVWDKGRDFATVRKVLSMPQVNIVKKTEVQTGGFSKESILPKRNSDKLIARKKDWDPKKYGGFDSPTVAYSVLVVAKVEKGKSKKLKSVKELLGITIMERSSFEKNPIDFLEAKGYKEVKKDLIIKLPKYSLFELENGRKRMLASAGELQKGNELALPSKYVNFLYLASHYEKLKGSPEDNEQKQLFVEQHKHYLDEIIEQISEFSKRVILADANLDKVLSAYNKHRDKPIREQAENIIHLFTLTNLGAPAAFKYFDTTIDRKRYTSTKEVLDATLIHQSITGLYETRIDLSQLGGDGGPAPEAAAKGGSGGTLGDQGSRGSDPLPEPRVTLTVEGIPTEFLVNTGAEHSVLTKPMGKMGSKRTVVAGATGSKVYPWTTKRLLKIGQKQVTHSFLVIPECPAPLLGRDLLTKLKAQIQFSTEGPQVTWEDRPAMCLVLNLEEEYRLHEKPVPPSIDPSWLQLFPMVWAEKAGMGLANQVPPVVVELKSDASPVAVRQYPMSKEAREGIRPHIQRFLDLGILVPCQSPWNTPLLPVKKPGTNDYRPVQDLREVNKRVQDIHPTVPNPYNLLSSLPPSHTWYSVLDLKDAFFCLKLHPNSQPLFAFEWRDPEKGNTGQLTWTRLPQGFKNSPTLFNEALHRDLASFRALNPQVVMLQYVDDLLVAAPTYRDCKEGTRRLLQELSKLGYRVSAKKAQLCREEVTYLGYLLKGGKRWLTPARKATVMKIPTPTTPRQVREFLGKAGFCRLFIPGFASLAAPLYPLTRPKVPFTWTEAHQEAFGRIKEALLSAPALALPDLTKPFALYVDEKEGVARGVLTQTLGPWRRPVAYLSKKLDPVASGWPTCLKAIAAVALLLKDADKLTLGQNVLVIAPHNLESIVRQPPDRWMTNARMTHYQSLLLNERVSFAPPAILNPATLLPVESDDTPIHICSEILAEETGTRPDLRDQPLPGVPAWYTDGSSFIMDGRRQAGAAIVDNKRTVWASNLPEGTSAQKAELIALTQALRLAEGKSINIYTDSRYAFATAHVHGAIYKQRGWLTSAGKDIKNKEEILALLEAIHLPKRVAIIHCPGHQRGTDPVATGNRKADEAAKQAAQSTRILTETTKNAGKRTADGSEFEKRTADGSEFESPKKKAKVE

SEQ ID NO: 7261 - protein, 2096 aa, synthetic construct
MPAAKRVKLDGGDKKYSIGLDIGTNSVGWAVITDEYKVPSKKFKVLGNTDRHSIKKNLIGALLFDSGETAEATRLKRTARRRYTRRKNRICYLQEIFSNEMAKVDDSFFHRLEESFLVEEDKKHERHPIFGNIVDEVAYHEKYPTIYHLRKKLVDSTDKADLRLIYLALAHMIKFRGHFLIEGDLNPDNSDVDKLFIQLVQTYNQLFEENPINASGVDAKAILSARLSKSRRLENLIAQLPGEKKNGLFGNLIALSLGLTPNFKSNFDLAEDAKLQLSKDTYDDDLDNLLAQIGDQYADLFLAAKNLSDAILLSDILRVNTEITKAPLSASMIKRYDEHHQDLTLLKALVRQQLPEKYKEIFFDQSKNGYAGYIDGGASQEEFYKFIKPILEKMDGTEELLVKLNREDLLRKQRTFDNGSIPHQIHLGELHAILRRQEDFYPFLKDNREKIEKILTFRIPYYVGPLARGNSRFAWMTRKSEETITPWNFEEVVDKGASAQSFIERMTNFDKNLPNEKVLPKHSLLYEYFTVYNELTKVKYVTEGMRKPAFLSGEQKKAIVDLLFKTNRKVTVKQLKEDYFKKIECFDSVEISGVEDRFNASLGTYHDLLKIIKDKDFLDNEENEDILEDIVLTLTLFEDREMIEERLKTYAHLFDDKVMKQLKRRRYTGWGRLSRKLINGIRDKQSGKTILDFLKSDGFANRNFMQLIHDDSLTFKEDIQKAQVSGQGDSLHEHIANLAGSPAIKKGILQTVKVVDELVKVMGRHKPENIVIEMARENQTTQKGQKNSRERMKRIEEGIKELGSQILKEHPVENTQLQNEKLYLYYLQNGRDMYVDQELDINRLSDYDVDHIVPQSFLKDDSIDNKVLTRSDKARGKSDNVPSEEVVKKMKNYWRQLLNAKLITQRKFDNLTKAERGGLSELDKAGFIKRQLVETRQITKHVAQILDSRMNTKYDENDKLIREVKVITLKSKLVSDFRKDFQFYKVREINNYHHAHDAYLNAVVGTALIKKYPKLESEFVYGDYKVYDVRKMIAKSEQEIGKATAKYFFYSNIMNFFKTEITLANGEIRKRPLIETNGETGEIVWDKGRDFATVRKVLSMPQVNIVKKTEVQTGGFSKESILPKRNSDKLIARKKDWDPKKYGGFDSPTVAYSVLVVAKVEKGKSKKLKSVKELLGITIMERSSFEKNPIDFLEAKGYKEVKKDLIIKLPKYSLFELENGRKRMLASAGELQKGNELALPSKYVNFLYLASHYEKLKGSPEDNEQKQLFVEQHKHYLDEIIEQISEFSKRVILADANLDKVLSAYNKHRDKPIREQAENIIHLFTLTNLGAPAAFKYFDTTIDRKRYTSTKEVLDATLIHQSITGLYETRIDLSQLGGDGGPAPEAAAKGGSGGTLNLEDEYRLYETSAEPEVSPGSTWLSDFPQAWAETGGMGLAVRQAPLIIPLKATSTPVSIKQYPMSQEAKLGIKPHIQRLLDQGILVPCQSPWNTPLLPVKKPGTNDYRPVQDLREVNKRVEDIHPTVPNPYNLLSGLPPSHRWYTVLDLKDAFFCLRLHPTSQPLFAFEWRDPGMGISGQLTWTRLPQGFKNSPTLFNEALHRDLADFRIQHPDLILLQYVDDILLAATSELDCQQGTRALLLTLGNLGYRASAKKAQLCQKQVKYLGYLLKEGQRWLTEARKETVMGQPTPKTPRQLREFLGTAGFCRLWIPGFAEMAAPLYPLTKPGTLFNWGPDQQKAYQEIKQALLTAPALGLPDLTKPFELFVDEKQGYAKGVLTQKLGPWRRPVAYLSKKLDPVAAGWPPCLRMVAAIAVLRKDAGKLTMGQPLVILAPHAVEALVKQPPDRWLSNARMTHYQAMLLDTDRVQFGPVVALNPATLLPLPEEGAPHDCLEILAETHGTRPDLTDQPIPDADHTWYTDGSSFLQEGQRKAGAAVTTETEVIWARALPAGTSAQRAELIALTQALKMAEGKRLNVYTDSRYAFATAHIHGEIYRRRGWLTSEGREIKNKSEILALLKALFLPKRLSIIHCLGHQKGDSAEARGNRLADQAAREAAIKTPPDTSTLLAGKRTADGSEFEKRTADGSEFESPKKKAKVE

SEQ ID NO: 7262 - protein, 2096 aa, synthetic construct; identical to SEQ ID NO: 4528

SEQ ID NO: 7263 - protein, 2096 aa, synthetic construct
MPAAKRVKLDGGDKKYSIGLDIGTNSVGWAVITDEYKVPSKKFKVLGNTDRHSIKKNLIGALLFDSGETAEATRLKRTARRRYTRRKNRICYLQEIFSNEMAKVDDSFFHRLEESFLVEEDKKHERHPIFGNIVDEVAYHEKYPTIYHLRKKLVDSTDKADLRLIYLALAHMIKFRGHFLIEGDLNPDNSDVDKLFIQLVQTYNQLFEENPINASGVDAKAILSARLSKSRRLENLIAQLPGEKKNGLFGNLIALSLGLTPNFKSNFDLAEDAKLQLSKDTYDDDLDNLLAQIGDQYADLFLAAKNLSDAILLSDILRVNTEITKAPLSASMIKRYDEHHQDLTLLKALVRQQLPEKYKEIFFDQSKNGYAGYIDGGASQEEFYKFIKPILEKMDGTEELLVKLNREDLLRKQRTFDNGSIPHQIHLGELHAILRRQEDFYPFLKDNREKIEKILTFRIPYYVGPLARGNSRFAWMTRKSEETITPWNFEEVVDKGASAQSFIERMTNFDKNLPNEKVLPKHSLLYEYFTVYNELTKVKYVTEGMRKPAFLSGEQKKAIVDLLFKTNRKVTVKQLKEDYFKKIECFDSVEISGVEDRFNASLGTYHDLLKIIKDKDFLDNEENEDILEDIVLTLTLFEDREMIEERLKTYAHLFDDKVMKQLKRRRYTGWGRLSRKLINGIRDKQSGKTILDFLKSDGFANRNFMQLIHDDSLTFKEDIQKAQVSGQGDSLHEHIANLAGSPAIKKGILQTVKVVDELVKVMGRHKPENIVIEMARENQTTQKGQKNSRERMKRIEEGIKELGSQILKEHPVENTQLQNEKLYLYYLQNGRDMYVDQELDINRLSDYDVDHIVPQSFLKDDSIDNKVLTRSDKARGKSDNVPSEEVVKKMKNYWRQLLNAKLITQRKFDNLTKAERGGLSELDKAGFIKRQLVETRQITKHVAQILDSRMNTKYDENDKLIREVKVITLKSKLVSDFRKDFQFYKVREINNYHHAHDAYLNAVVGTALIKKYPKLESEFVYGDYKVYDVRKMIAKSEQEIGKATAKYFFYSNIMNFFKTEITLANGEIRKRPLIETNGETGEIVWDKGRDFATVRKVLSMPQVNIVKKTEVQTGGFSKESILPKRNSDKLIARKKDWDPKKYGGFDSPTVAYSVLVVAKVEKGKSKKLKSVKELLGITIMERSSFEKNPIDFLEAKGYKEVKKDLIIKLPKYSLFELENGRKRMLASAGELQKGNELALPSKYVNFLYLASHYEKLKGSPEDNEQKQLFVEQHKHYLDEIIEQISEFSKRVILADANLDKVLSAYNKHRDKPIREQAENIIHLFTLTNLGAPAAFKYFDTTIDRKRYTSTKEVLDATLIHQSITGLYETRIDLSQLGGDGGPAPEAAAKGGSGGTLGIEDEYRLHETSTEPDVSLGSTWLSDFPQAWAETGGMGLAVRQAPLIIPLKATSTPVSIQQYPMSHEARLGIKPHIQRLLDQGILVPCQSPWNTPLLPVKKPGTNDYRPVQDLREVNKRVEDIHPTVPNPYNLLSGLPPSHQWYTVLDLKDAFFCLRLHPTSQPLFAFEWRDPGMGISGQLTWTRLPQGFKNSPTLFNEALHRDLADFRIQHPDLILLQYVDDILLAATSELDCQQGTRALLQTLGDLGYRASAKKAQICQKQVKYLGYLLREGQRWLTEARKETVMGQPVPKTPRQLREFLGTAGFCRLWIPGFAEMAAPLYPLTKPGTLFSWGPDQQKAYQEIKQALLTAPALGLPDLTKPFELFVDEKQGYAKGVLTQKLGPWRRPVAYLSKKLDPVAAGWPPCLRMVAAIAVLTKDAGKLTMGQPLVILAPHAVEALVKQPPDRWLSNARMTHYQAMLLDTDRVQFGPVVALNPATLLPLPEEGAPHDCLEILAETHGTRPDLTDQPIPDADHTWYTDGSSFLQEGQRKAGAAVTTETEVIWAGALPAGTSAQRAELIALTQALKMAEGKRLNVYTDSRYAFATAHIHGEIYRRRGWLTSEGREIKNKSEILALLKALFLPKRLSIIHCLGHQKGDSAEARGNRLADQAAREAAIKTPPDTSTLLAGKRTADGSEFEKRTADGSEFESPKKKAKVE

SEQ ID NO: 7264 - protein, 2096 aa, synthetic construct
MPAAKRVKLDGGDKKYSIGLDIGTNSVGWAVITDEYKVPSKKFKVLGNTDRHSIKKNLIGALLFDSGETAEATRLKRTARRRYTRRKNRICYLQEIFSNEMAKVDDSFFHRLEESFLVEEDKKHERHPIFGNIVDEVAYHEKYPTIYHLRKKLVDSTDKADLRLIYLALAHMIKFRGHFLIEGDLNPDNSDVDKLFIQLVQTYNQLFEENPINASGVDAKAILSARLSKSRRLENLIAQLPGEKKNGLFGNLIALSLGLTPNFKSNFDLAEDAKLQLSKDTYDDDLDNLLAQIGDQYADLFLAAKNLSDAILLSDILRVNTEITKAPLSASMIKRYDEHHQDLTLLKALVRQQLPEKYKEIFFDQSKNGYAGYIDGGASQEEFYKFIKPILEKMDGTEELLVKLNREDLLRKQRTFDNGSIPHQIHLGELHAILRRQEDFYPFLKDNREKIEKILTFRIPYYVGPLARGNSRFAWMTRKSEETITPWNFEEVVDKGASAQSFIERMTNFDKNLPNEKVLPKHSLLYEYFTVYNELTKVKYVTEGMRKPAFLSGEQKKAIVDLLFKTNRKVTVKQLKEDYFKKIECFDSVEISGVEDRFNASLGTYHDLLKIIKDKDFLDNEENEDILEDIVLTLTLFEDREMIEERLKTYAHLFDDKVMKQLKRRRYTGWGRLSRKLINGIRDKQSGKTILDFLKSDGFANRNFMQLIHDDSLTFKEDIQKAQVSGQGDSLHEHIANLAGSPAIKKGILQTVKVVDELVKVMGRHKPENIVIEMARENQTTQKGQKNSRERMKRIEEGIKELGSQILKEHPVENTQLQNEKLYLYYLQNGRDMYVDQELDINRLSDYDVDHIVPQSFLKDDSIDNKVLTRSDKARGKSDNVPSEEVVKKMKNYWRQLLNAKLITQRKFDNLTKAERGGLSELDKAGFIKRQLVETRQITKHVAQILDSRMNTKYDENDKLIREVKVITLKSKLVSDFRKDFQFYKVREINNYHHAHDAYLNAVVGTALIKKYPKLESEFVYGDYKVYDVRKMIAKSEQEIGKATAKYFFYSNIMNFFKTEITLANGEIRKRPLIETNGETGEIVWDKGRDFATVRKVLSMPQVNIVKKTEVQTGGFSKESILPKRNSDKLIARKKDWDPKKYGGFDSPTVAYSVLVVAKVEKGKSKKLKSVKELLGITIMERSSFEKNPIDFLEAKGYKEVKKDLIIKLPKYSLFELENGRKRMLASAGELQKGNELALPSKYVNFLYLASHYEKLKGSPEDNEQKQLFVEQHKHYLDEIIEQISEFSKRVILADANLDKVLSAYNKHRDKPIREQAENIIHLFTLTNLGAPAAFKYFDTTIDRKRYTSTKEVLDATLIHQSITGLYETRIDLSQLGGDGGPAPEAAAKGGSGGTLNIEDEYRLHETSKGPDVPLGSTWLSDFPQAWAETGGMGLAVRQAPLIIPLKATSTPVSIKQYPMSQEARLGIKPHIQRLLDQGILVPCQSPWNTPLLPVKKPGTNDYRPVQDLREVNKRVEDIHPTVPNPYNLLSGLPPSHQWYTVLDLKDAFFCLRLHPTSQSLFAFEWRDPEMGISGQLTWTRLPQGFKNSPTLFNEALHRDLADFRIQHPDLILLQYVDDLLLAATSELDCQQGTRALLQTLGDLGYRASAKKAQICQKQVKYLGYLLKEGQRWLTEARKETVMGQPTPKTPRQLREFLGTAGFCRLWIPGFAEMAAPLYPLTKPGTLFEWGPDQQKAYQEIKQALLTAPALGLPDLTKPFELFVDEKQGYAKGVLTQKLGPWRRPVAYLSKKLDPVAAGWPPCLRMVAAIAVLTKDAGKLTMGQPLVILAPHAVEALVKQPPDRWLSNARMTHYQALLLDTDRVQFGPIVALNPATLLPLPEEGLQHDCLDILAEAHGTRPDLTDQPLPDADHTWYTDGSSFLQEGQRKAGAAVTTETEVVWAKALPAGTSAQRAELIALTQALKMAEGKKLNVYTDSRYAFATAHIHGEIYRRRGWLTSEGKEIKNKDEILALLKALFLPKRLSIIHCPGHQKGNRAEARGNRMADQAAREVATRETPETSTLLAGKRTADGSEFEKRTADGSEFESPKKKAKVE

SEQ ID NO: 7265 - protein, 2088 aa, synthetic construct; identical to SEQ ID NO: 4529

SEQ ID NO: 7266 - protein, 2090 aa, synthetic construct
MPAAKRVKLDGGDKKYSIGLDIGTNSVGWAVITDEYKVPSKKFKVLGNTDRHSIKKNLIGALLFDSGETAEATRLKRTARRRYTRRKNRICYLQEIFSNEMAKVDDSFFHRLEESFLVEEDKKHERHPIFGNIVDEVAYHEKYPTIYHLRKKLVDSTDKADLRLIYLALAHMIKFRGHFLIEGDLNPDNSDVDKLFIQLVQTYNQLFEENPINASGVDAKAILSARLSKSRRLENLIAQLPGEKKNGLFGNLIALSLGLTPNFKSNFDLAEDAKLQLSKDTYDDDLDNLLAQIGDQYADLFLAAKNLSDAILLSDILRVNTEITKAPLSASMIKRYDEHHQDLTLLKALVRQQLPEKYKEIFFDQSKNGYAGYIDGGASQEEFYKFIKPILEKMDGTEELLVKLNREDLLRKQRTFDNGSIPHQIHLGELHAILRRQEDFYPFLKDNREKIEKILTFRIPYYVGPLARGNSRFAWMTRKSEETITPWNFEEVVDKGASAQSFIERMTNFDKNLPNEKVLPKHSLLYEYFTVYNELTKVKYVTEGMRKPAFLSGEQKKAIVDLLFKTNRKVTVKQLKEDYFKKIECFDSVEISGVEDRFNASLGTYHDLLKIIKDKDFLDNEENEDILEDIVLTLTLFEDREMIEERLKTYAHLFDDKVMKQLKRRRYTGWGRLSRKLINGIRDKQSGKTILDFLKSDGFANRNFMQLIHDDSLTFKEDIQKAQVSGQGDSLHEHIANLAGSPAIKKGILQTVKVVDELVKVMGRHKPENIVIEMARENQTTQKGQKNSRERMKRIEEGIKELGSQILKEHPVENTQLQNEKLYLYYLQNGRDMYVDQELDINRLSDYDVDHIVPQSFLKDDSIDNKVLTRSDKARGKSDNVPSEEVVKKMKNYWRQLLNAKLITQRKFDNLTKAERGGLSELDKAGFIKRQLVETRQITKHVAQILDSRMNTKYDENDKLIREVKVITLKSKLVSDFRKDFQFYKVREINNYHHAHDAYLNAVVGTALIKKYPKLESEFVYGDYKVYDVRKMIAKSEQEIGKATAKYFFYSNIMNFFKTEITLANGEIRKRPLIETNGETGEIVWDKGRDFATVRKVLSMPQVNIVKKTEVQTGGFSKESILPKRNSDKLIARKKDWDPKKYGGFDSPTVAYSVLVVAKVEKGKSKKLKSVKELLGITIMERSSFEKNPIDFLEAKGYKEVKKDLIIKLPKYSLFELENGRKRMLASAGELQKGNELALPSKYVNFLYLASHYEKLKGSPEDNEQKQLFVEQHKHYLDEIIEQISEFSKRVILADANLDKVLSAYNKHRDKPIREQAENIIHLFTLTNLGAPAAFKYFDTTIDRKRYTSTKEVLDATLIHQSITGLYETRIDLSQLGGDGGPAPEAAAKGGSGGTLQLDDEYRLYSPLVKPDQNIQFWLEQFPQAWAETAGMGLAKQVPPQVIQLKASATPVSVRQYPLSKEAQEGIRPHVQRLIQQGILVPVQSPWNTPLLPVRKPGTNDYRPVQDLREVNKRVQDIHPTVPNPYNLLCALPPQRSWYTVLDLKDAFFCLRLHPTSQPLFAFEWRDPGTGRTGQLTWTRLPQGFKNSPTIFDEALHRDLANFRIQHPQVTLLQYVDDLLLAGATKQDCLEGTKALLLELSDLGYRASAKKAQICRREVTYLGYSLRDGQRWLTEARKKTVVQIPAPTTAKQVREFLGTAGFCRLWIPGFATLAAPLYPLTKEKGEFSWAPEHQKAFDAIKKALLSAPALALPDVTKPFTLYVDERKGVARGVLTQTLGPWRRPVAYLSKKLDPVASGWPVCLKAIAAVAILVKDADKLTLGQNITVIAPHALENIVRQPPDRWMTNARMTHYQSLLLTERVTFAPPAALNPATLLPEETDEPVTHDCHQLLIEETGVRKDLTDIPLTGEVLTWFTDGSSYVVEGKRMAGAAVVDGTRTIWASSLPEGTSAQKAELMALTQALRLAEGKSINIYTDSRYAFATAHVHGAIYKQRGLLTSAGREIKNKEEILSLLEALHLPKRLAIIHCPGHQKAKDPISRGNQMADRVAKQAAQGVNLLAGKRTADGSEFEKRTADGSEFESPKKKAKVE

SEQ ID NO: 7267 - protein, 2088 aa, synthetic construct; identical to SEQ ID NO: 4529

SEQ ID NO: 7268 - protein, 2176 aa, synthetic construct
MPAAKRVKLDGGDKKYSIGLDIGTNSVGWAVITDEYKVPSKKFKVLGNTDRHSIKKNLIGALLFDSGETAEATRLKRTARRRYTRRKNRICYLQEIFSNEMAKVDDSFFHRLEESFLVEEDKKHERHPIFGNIVDEVAYHEKYPTIYHLRKKLVDSTDKADLRLIYLALAHMIKFRGHFLIEGDLNPDNSDVDKLFIQLVQTYNQLFEENPINASGVDAKAILSARLSKSRRLENLIAQLPGEKKNGLFGNLIALSLGLTPNFKSNFDLAEDAKLQLSKDTYDDDLDNLLAQIGDQYADLFLAAKNLSDAILLSDILRVNTEITKAPLSASMIKRYDEHHQDLTLLKALVRQQLPEKYKEIFFDQSKNGYAGYIDGGASQEEFYKFIKPILEKMDGTEELLVKLNREDLLRKQRTFDNGSIPHQIHLGELHAILRRQEDFYPFLKDNREKIEKILTFRIPYYVGPLARGNSRFAWMTRKSEETITPWNFEEVVDKGASAQSFIERMTNFDKNLPNEKVLPKHSLLYEYFTVYNELTKVKYVTEGMRKPAFLSGEQKKAIVDLLFKTNRKVTVKQLKEDYFKKIECFDSVEISGVEDRFNASLGTYHDLLKIIKDKDFLDNEENEDILEDIVLTLTLFEDREMIEERLKTYAHLFDDKVMKQLKRRRYTGWGRLSRKLINGIRDKQSGKTILDFLKSDGFANRNFMQLIHDDSLTFKEDIQKAQVSGQGDSLHEHIANLAGSPAIKKGILQTVKVVDELVKVMGRHKPENIVIEMARENQTTQKGQKNSRERMKRIEEGIKELGSQILKEHPVENTQLQNEKLYLYYLQNGRDMYVDQELDINRLSDYDVDHIVPQSFLKDDSIDNKVLTRSDKARGKSDNVPSEEVVKKMKNYWRQLLNAKLITQRKFDNLTKAERGGLSELDKAGFIKRQLVETRQITKHVAQILDSRMNTKYDENDKLIREVKVITLKSKLVSDFRKDFQFYKVREINNYHHAHDAYLNAVVGTALIKKYPKLESEFVYGDYKVYDVRKMIAKSEQEIGKATAKYFFYSNIMNFFKTEITLANGEIRKRPLIETNGETGEIVWDKGRDFATVRKVLSMPQVNIVKKTEVQTGGFSKESILPKRNSDKLIARKKDWDPKKYGGFDSPTVAYSVLVVAKVEKGKSKKLKSVKELLGITIMERSSFEKNPIDFLEAKGYKEVKKDLIIKLPKYSLFELENGRKRMLASAGELQKGNELALPSKYVNFLYLASHYEKLKGSPEDNEQKQLFVEQHKHYLDEIIEQISEFSKRVILADANLDKVLSAYNKHRDKPIREQAENIIHLFTLTNLGAPAAFKYFDTTIDRKRYTSTKEVLDATLIHQSITGLYETRIDLSQLGGDGGPAPEAAAKGGSGGMDPLQLLQPLEAEIKGTKLKAHWNSGATITCVPEAFLEDERPIQTMLIKTIHGEKQQDVYYLTFKVQGRKVEAEVLASPYDYILLNPSDVPWLMKKPLQLTVLVPLHEYQERLLQQTALPKEQKELLQKLFLKYDALWQHWENQVGHRRIKPHNIATGTLAPRPQKQYPINPKAKPSIQIVIDDLLKQGVLIQQNSTMNTPVYPVPKPDGKWRMVLDYREVNKTIPLIAAQNQHSAGILSSIYRGKYKTTLDLTNGFWAHPITPESYWLTAFTWQGKQYCWTRLPQGFLNSPALFTADVVDLLKEIPNVQAYVDDIYISHDDPQEHLEQLEKIFSILLNAGYVVSLKKSEIAQREVEFLGFNITKEGRGLTDTFKQKLLNITPPKDLKQLQSILGLLNFARNFIPNYSELVKPLYTIVANANGKFISWTEDNSNQLQHIISVLNQADNLEERNPETRLIIKVNSSPSAGYIRYYNEGSKRPIMYVNYIFSKAEAKFTQTEKLLTTMHKGLIKAMDLAMGQEILVYSPIVSMTKIQRTPLPERKALPVRWITWMTYLEDPRIQFHYDKSLPELQQIPNVTEDVIAKTKHPSEFAMVFYTDGSAIKHPDVNKSHSAGMGIAQVQFIPEYKIVHQWSIPLGDHTAQLAEIAAVEFACKKALKISGPVLIVTDSFYVAESANKELPYWKSNGFLNNKKKPLRHVSKWKSIAECLQLKPDIIIMHEKGHQQPMTTLHTEGNNLADKLATQGSYVVHAGKRTADGSEFEKRTADGSEFESPKKKAKVE

SEQ ID NO: 7269 - protein, 2087 aa, synthetic construct
MPAAKRVKLDGGDKKYSIGLDIGTNSVGWAVITDEYKVPSKKFKVLGNTDRHSIKKNLIGALLFDSGETAEATRLKRTARRRYTRRKNRICYLQEIFSNEMAKVDDSFFHRLEESFLVEEDKKHERHPIFGNIVDEVAYHEKYPTIYHLRKKLVDSTDKADLRLIYLALAHMIKFRGHFLIEGDLNPDNSDVDKLFIQLVQTYNQLFEENPINASGVDAKAILSARLSKSRRLENLIAQLPGEKKNGLFGNLIALSLGLTPNFKSNFDLAEDAKLQLSKDTYDDDLDNLLAQIGDQYADLFLAAKNLSDAILLSDILRVNTEITKAPLSASMIKRYDEHHQDLTLLKALVRQQLPEKYKEIFFDQSKNGYAGYIDGGASQEEFYKFIKPILEKMDGTEELLVKLNREDLLRKQRTFDNGSIPHQIHLGELHAILRRQEDFYPFLKDNREKIEKILTFRIPYYVGPLARGNSRFAWMTRKSEETITPWNFEEVVDKGASAQSFIERMTNFDKNLPNEKVLPKHSLLYEYFTVYNELTKVKYVTEGMRKPAFLSGEQKKAIVDLLFKTNRKVTVKQLKEDYFKKIECFDSVEISGVEDRFNASLGTYHDLLKIIKDKDFLDNEENEDILEDIVLTLTLFEDREMIEERLKTYAHLFDDKVMKQLKRRRYTGWGRLSRKLINGIRDKQSGKTILDFLKSDGFANRNFMQLIHDDSLTFKEDIQKAQVSGQGDSLHEHIANLAGSPAIKKGILQTVKVVDELVKVMGRHKPENIVIEMARENQTTQKGQKNSRERMKRIEEGIKELGSQILKEHPVENTQLQNEKLYLYYLQNGRDMYVDQELDINRLSDYDVDHIVPQSFLKDDSIDNKVLTRSDKARGKSDNVPSEEVVKKMKNYWRQLLNAKLITQRKFDNLTKAERGGLSELDKAGFIKRQLVETRQITKHVAQILDSRMNTKYDENDKLIREVKVITLKSKLVSDFRKDFQFYKVREINNYHHAHDAYLNAVVGTALIKKYPKLESEFVYGDYKVYDVRKMIAKSEQEIGKATAKYFFYSNIMNFFKTEITLANGEIRKRPLIETNGETGEIVWDKGRDFATVRKVLSMPQVNIVKKTEVQTGGFSKESILPKRNSDKLIARKKDWDPKKYGGFDSPTVAYSVLVVAKVEKGKSKKLKSVKELLGITIMERSSFEKNPIDFLEAKGYKEVKKDLIIKLPKYSLFELENGRKRMLASAGELQKGNELALPSKYVNFLYLASHYEKLKGSPEDNEQKQLFVEQHKHYLDEIIEQISEFSKRVILADANLDKVLSAYNKHRDKPIREQAENIIHLFTLTNLGAPAAFKYFDTTIDRKRYTSTKEVLDATLIHQSITGLYETRIDLSQLGGDGGPAPEAAAKGGSGGIPWLMKKPLQLTTLVPLQEYEERLLKQTMLTGSYKEKLQSLFLKYDALWQHWENQVGHRRIKPHHIATGTVNPRPQKQYPINPKAKASIQTVINDLLKQGVLIQQNSIMNTPVYPVPKPDGKWRMVLDYREVNKTIPLIAAQNQHSAGILSSIFRGKYKTTLDLSNGFWAHSITPESYWLTAFTWLGQQYCWTRLPQGFLNSPALFNADVVDLLKEVPNVQVYVDDIYISHDDPREHLEQLEKVFSLLLNAGYVVSLKKSEIAQHEVEFLGFNITKEGRGLTETFKQKLLNITPPRDLKQLQSILGKLNFARNFIPNFSELVKPLYNIIATAPGKYITWTTDNSQQLQNIISMLNSAENLEERNPEVRLIMKVNTSPSAGYIRFYNEFAKRPIMYLNYVYTKAEVKFTNTEKLLTTIHKGLIKALDLGMGQEILVYSPIVSMTKIQKTPLPERKALPIRWITWMSYLEDPRIQFHYDKTLPELQQVPTVTDDIIAKIKHPSEFSMVFYTDGSAIKHPNVNKSHNAGMGIAQVQFKPEFTVINTWSIPLGDHTAQLAEVAAVEFACKKALKIDGPVLIVTDSFYVAESVNKELPYWQSNGFFNNKKKPLKHVSKWKSIADCIQLKPDIIIIHEKGHQPTASTFHTEGNNLADKLATQGSYVVNAGKRTADGSEFEKRTADGSEFESPKKKAKVE

SEQ ID NO: 7270 - protein, 2176 aa, synthetic construct
MPAAKRVKLDGGDKKYSIGLDIGTNSVGWAVITDEYKVPSKKFKVLGNTDRHSIKKNLIGALLFDSGETAEATRLKRTARRRYTRRKNRICYLQEIFSNEMAKVDDSFFHRLEESFLVEEDKKHERHPIFGNIVDEVAYHEKYPTIYHLRKKLVDSTDKADLRLIYLALAHMIKFRGHFLIEGDLNPDNSDVDKLFIQLVQTYNQLFEENPINASGVDAKAILSARLSKSRRLENLIAQLPGEKKNGLFGNLIALSLGLTPNFKSNFDLAEDAKLQLSKDTYDDDLDNLLAQIGDQYADLFLAAKNLSDAILLSDILRVNTEITKAPLSASMIKRYDEHHQDLTLLKALVRQQLPEKYKEIFFDQSKNGYAGYIDGGASQEEFYKFIKPILEKMDGTEELLVKLNREDLLRKQRTFDNGSIPHQIHLGELHAILRRQEDFYPFLKDNREKIEKILTFRIPYYVGPLARGNSRFAWMTRKSEETITPWNFEEVVDKGASAQSFIERMTNFDKNLPNEKVLPKHSLLYEYFTVYNELTKVKYVTEGMRKPAFLSGEQKKAIVDLLFKTNRKVTVKQLKEDYFKKIECFDSVEISGVEDRFNASLGTYHDLLKIIKDKDFLDNEENEDILEDIVLTLTLFEDREMIEERLKTYAHLFDDKVMKQLKRRRYTGWGRLSRKLINGIRDKQSGKTILDFLKSDGFANRNFMQLIHDDSLTFKEDIQKAQVSGQGDSLHEHIANLAGSPAIKKGILQTVKVVDELVKVMGRHKPENIVIEMARENQTTQKGQKNSRERMKRIEEGIKELGSQILKEHPVENTQLQNEKLYLYYLQNGRDMYVDQELDINRLSDYDVDHIVPQSFLKDDSIDNKVLTRSDKARGKSDNVPSEEVVKKMKNYWRQLLNAKLITQRKFDNLTKAERGGLSELDKAGFIKRQLVETRQITKHVAQILDSRMNTKYDENDKLIREVKVITLKSKLVSDFRKDFQFYKVREINNYHHAHDAYLNAVVGTALIKKYPKLESEFVYGDYKVYDVRKMIAKSEQEIGKATAKYFFYSNIMNFFKTEITLANGEIRKRPLIETNGETGEIVWDKGRDFATVRKVLSMPQVNIVKKTEVQTGGFSKESILPKRNSDKLIARKKDWDPKKYGGFDSPTVAYSVLVVAKVEKGKSKKLKSVKELLGITIMERSSFEKNPIDFLEAKGYKEVKKDLIIKLPKYSLFELENGRKRMLASAGELQKGNELALPSKYVNFLYLASHYEKLKGSPEDNEQKQLFVEQHKHYLDEIIEQISEFSKRVILADANLDKVLSAYNKHRDKPIREQAENIIHLFTLTNLGAPAAFKYFDTTIDRKRYTSTKEVLDATLIHQSITGLYETRIDLSQLGGDGGPAPEAAAKGGSGGMDPLQLLQPLEAEIKGTKLKAHWNSGATITCVPQAFLEEEVPIKNIWIKTIHGEKEQPVYYLTFKIQGRKVEAEVISSPYDYILVSPSDIPWLMKKPLQLTTLVPLQEYEERLLKQTMLTGSYKEKLQSLFLKYDALWQHWENQVGHRRIKPHHIATGTVNPRPQKQYPINPKAKASIQTVINDLLKQGVLIQQNSIMNTPVYPVPKPDGKWRMVLDYREVNKTIPLIAAQNQHSAGILSSIFRGKYKTTLDLSNGFWAHSITPESYWLTAFTWLGQQYCWTRLPQGFLNSPALFNADVVDLLKEVPNVQVYVDDIYISHDDPREHLEQLEKVFSLLLNAGYVVSLKKSEIAQHEVEFLGFNITKEGRGLTETFKQKLLNITPPRDLKQLQSILGKLNFARNFIPNFSELVKPLYNIIATAPGKYITWTTDNSQQLQNIISMLNSAENLEERNPEVRLIMKVNTSPSAGYIRFYNEFAKRPIMYLNYVYTKAEVKFTNTEKLLTTIHKGLIKALDLGMGQEILVYSPIVSMTKIQKTPLPERKALPIRWITWMSYLEDPRIQFHYDKTLPELQQVPTVTDDIIAKIKHPSEFSMVFYTDGSAIKHPNVNKSHNAGMGIAQVQFKPEFTVINTWSIPLGDHTAQLAEVAAVEFACKKALKIDGPVLIVTDSFYVAESVNKELPYWQSNGFFNNKKKPLKHVSKWKSIADCIQLKPDIIIIHEKGHQPTASTFHTEGNNLADKLATQGSYVVNAGKRTADGSEFEKRTADGSEFESPKKKAKVE

SEQ ID NO: 7271 - protein, 2094 aa, synthetic construct
MPAAKRVKLDGGDKKYSIGLDIGTNSVGWAVITDEYKVPSKKFKVLGNTDRHSIKKNLIGALLFDSGETAEATRLKRTARRRYTRRKNRICYLQEIFSNEMAKVDDSFFHRLEESFLVEEDKKHERHPIFGNIVDEVAYHEKYPTIYHLRKKLVDSTDKADLRLIYLALAHMIKFRGHFLIEGDLNPDNSDVDKLFIQLVQTYNQLFEENPINASGVDAKAILSARLSKSRRLENLIAQLPGEKKNGLFGNLIALSLGLTPNFKSNFDLAEDAKLQLSKDTYDDDLDNLLAQIGDQYADLFLAAKNLSDAILLSDILRVNTEITKAPLSASMIKRYDEHHQDLTLLKALVRQQLPEKYKEIFFDQSKNGYAGYIDGGASQEEFYKFIKPILEKMDGTEELLVKLNREDLLRKQRTFDNGSIPHQIHLGELHAILRRQEDFYPFLKDNREKIEKILTFRIPYYVGPLARGNSRFAWMTRKSEETITPWNFEEVVDKGASAQSFIERMTNFDKNLPNEKVLPKHSLLYEYFTVYNELTKVKYVTEGMRKPAFLSGEQKKAIVDLLFKTNRKVTVKQLKEDYFKKIECFDSVEISGVEDRFNASLGTYHDLLKIIKDKDFLDNEENEDILEDIVLTLTLFEDREMIEERLKTYAHLFDDKVMKQLKRRRYTGWGRLSRKLINGIRDKQSGKTILDFLKSDGFANRNFMQLIHDDSLTFKEDIQKAQVSGQGDSLHEHIANLAGSPAIKKGILQTVKVVDELVKVMGRHKPENIVIEMARENQTTQKGQKNSRERMKRIEEGIKELGSQILKEHPVENTQLQNEKLYLYYLQNGRDMYVDQELDINRLSDYDVDHIVPQSFLKDDSIDNKVLTRSDKARGKSDNVPSEEVVKKMKNYWRQLLNAKLITQRKFDNLTKAERGGLSELDKAGFIKRQLVETRQITKHVAQILDSRMNTKYDENDKLIREVKVITLKSKLVSDFRKDFQFYKVREINNYHHAHDAYLNAVVGTALIKKYPKLESEFVYGDYKVYDVRKMIAKSEQEIGKATAKYFFYSNIMNFFKTEITLANGEIRKRPLIETNGETGEIVWDKGRDFATVRKVLSMPQVNIVKKTEVQTGGFSKESILPKRNSDKLIARKKDWDPKKYGGFDSPTVAYSVLVVAKVEKGKSKKLKSVKELLGITIMERSSFEKNPIDFLEAKGYKEVKKDLIIKLPKYSLFELENGRKRMLASAGELQKGNELALPSKYVNFLYLASHYEKLKGSPEDNEQKQLFVEQHKHYLDEIIEQISEFSKRVILADANLDKVLSAYNKHRDKPIREQAENIIHLFTLTNLGAPAAFKYFDTTIDRKRYTSTKEVLDATLIHQSITGLYETRIDLSQLGGDGGPAPEAAAKGGSGGVLNLEEEYRLHEKPVPSSIDPSWLQLFPTVWAERAGMGLANQVPPVVVELRSGASPVAVRQYPMSKEAREGIRPHIQRFLDLGVLVPCQSPWNTPLLPVKKPGTNDYRPVQDLREINKRVQDIHPTVPNPYNLLSSLPPSHTWYSVLDLKDAFFCLKLHPNSQPLFAFEWRDPEKGNTGQLTWTRLPQGFKNSPTLFDEALHRDLAPFRALNPQVVLLQYVDDLLVAAPTYRDCKEGTQKLLQELSKLGYRVSAKKAQLCQKEVTYLGYLLKEGKRWLTPARKATVMKIPPPTTPRQVREFLGTAGFCRLWIPGFASLAAPLYPLTKESIPFIWTEEHQKAFDRIKEALLSAPALALPDLTKPFTLYVDERAGVARGVLTQTLGPWRRPVAYLSKKLDPVASGWPTCLKAVAAVALLLKDADKLTLGQNVTVIASHSLESIVRQPPDRWMTNARMTHYQSLLLNERVSFAPPAVLNPATLLPVESEATPVHRCSEILAEETGTRRDLKDQPLPGVPAWYTDGSSFIAEGKRRAGAAIVDGKRTVWASSLPEGTSAQKAELVALTQALRLAEGKDINIYTDSRYAFATAHIHGAIYKQRGLLTSAGKDIKNKEEILALLEAIHLPKRVAIIHCPGHQKGNDPVATGNRRADEAAKQAALSTRVLAETTKPAGKRTADGSEFEKRTADGSEFESPKKKAKVE

SEQ ID NO: 7272 - protein, 2096 aa, synthetic construct
MPAAKRVKLDGGDKKYSIGLDIGTNSVGWAVITDEYKVPSKKFKVLGNTDRHSIKKNLIGALLFDSGETAEATRLKRTARRRYTRRKNRICYLQEIFSNEMAKVDDSFFHRLEESFLVEEDKKHERHPIFGNIVDEVAYHEKYPTIYHLRKKLVDSTDKADLRLIYLALAHMIKFRGHFLIEGDLNPDNSDVDKLFIQLVQTYNQLFEENPINASGVDAKAILSARLSKSRRLENLIAQLPGEKKNGLFGNLIALSLGLTPNFKSNFDLAEDAKLQLSKDTYDDDLDNLLAQIGDQYADLFLAAKNLSDAILLSDILRVNTEITKAPLSASMIKRYDEHHQDLTLLKALVRQQLPEKYKEIFFDQSKNGYAGYIDGGASQEEFYKFIKPILEKMDGTEELLVKLNREDLLRKQRTFDNGSIPHQIHLGELHAILRRQEDFYPFLKDNREKIEKILTFRIPYYVGPLARGNSRFAWMTRKSEETITPWNFEEVVDKGASAQSFIERMTNFDKNLPNEKVLPKHSLLYEYFTVYNELTKVKYVTEGMRKPAFLSGEQKKAIVDLLFKTNRKVTVKQLKEDYFKKIECFDSVEISGVEDRFNASLGTYHDLLKIIKDKDFLDNEENEDILEDIVLTLTLFEDREMIEERLKTYAHLFDDKVMKQLKRRRYTGWGRLSRKLINGIRDKQSGKTILDFLKSDGFANRNFMQLIHDDSLTFKEDIQKAQVSGQGDSLHEHIANLAGSPAIKKGILQTVKVVDELVKVMGRHKPENIVIEMARENQTTQKGQKNSRERMKRIEEGIKELGSQILKEHPVENTQLQNEKLYLYYLQNGRDMYVDQELDINRLSDYDVDHIVPQSFLKDDSIDNKVLTRSDKARGKSDNVPSEEVVKKMKNYWRQLLNAKLITQRKFDNLTKAERGGLSELDKAGFIKRQLVETRQITKHVAQILDSRMNTKYDENDKLIREVKVITLKSKLVSDFRKDFQFYKVREINNYHHAHDAYLNAVVGTALIKKYPKLESEFVYGDYKVYDVRKMIAKSEQEIGKATAKYFFYSNIMNFFKTEITLANGEIRKRPLIETNGETGEIVWDKGRDFATVRKVLSMPQVNIVKKTEVQTGGFSKESILPKRNSDKLIARKKDWDPKKYGGFDSPTVAYSVLVVAKVEKGKSKKLKSVKELLGITIMERSSFEKNPIDFLEAKGYKEVKKDLIIKLPKYSLFELENGRKRMLASAGELQKGNELALPSKYVNFLYLASHYEKLKGSPEDNEQKQLFVEQHKHYLDEIIEQISEFSKRVILADANLDKVLSAYNKHRDKPIREQAENIIHLFTLTNLGAPAAFKYFDTTIDRKRYTSTKEVLDATLIHQSITGLYETRIDLSQLGGDGGPAPEAAAKGGSGGTLNIEDEYRLHETSKEPDVPLGSTWLSDFPQAWAETGGMGLAVRQAPLIIPLKATSTPVSIKQYPMSQEARLGIKPHIQRLLDQGILVPCQSPWNTPLLPVKKPGTNDYRPVQDLREVNKRVEDIHPTVPNPYNLLSGLPPSHQWYTVLDLKDAFFCLRLHPTSQPLFAFEWRDPEMGISGQLTWTRLPQGFKNSPTLFNEALHRDLADFRIQHPDLILLQYVDDLLLAATSEQDCQRGTRALLQTLGNLGYRASAKKAQICQKQVKYLGYLLKEGQRWLTEARKETVMGQPTPKTPRQLREFLGTAGFCRLWIPGFAEMAAPLYPLTKPGTLFNWGPDQQKAYQEIKQALLTAPALGLPDLTKPFELFVDEKQGYAKGVLTQKLGPWRRPVAYLSKKLDPVAAGWPPCLRMVAAIAVLTKDAGKLTMGQPLVILAPHAVEALVKQPPDRWLSNARMTHYQAMLLDTDRVQFGPVVALNPATLLPLPEKEAPHDCLEILAETHGTRPDLTDQPIPDADYTWYTDGSSFLQEGQRRAGAAVTTETEVIWARALPAGTSAQRAELIALTQALKMAEGKKLNVYTDSRYAFATAHVHGEIYRRRGWLTSEGREIKNKNEILALLKALFLPKRLSIIHCPGHQKGNSAEARGNRMADQAAREAAMKAVLETSTLLAGKRTADGSEFEKRTADGSEFESPKKKAKVE

SEQ ID NO: 7273 - protein, 2098 aa, synthetic construct
MPAAKRVKLDGGDKKYSIGLDIGTNSVGWAVITDEYKVPSKKFKVLGNTDRHSIKKNLIGALLFDSGETAEATRLKRTARRRYTRRKNRICYLQEIFSNEMAKVDDSFFHRLEESFLVEEDKKHERHPIFGNIVDEVAYHEKYPTIYHLRKKLVDSTDKADLRLIYLALAHMIKFRGHFLIEGDLNPDNSDVDKLFIQLVQTYNQLFEENPINASGVDAKAILSARLSKSRRLENLIAQLPGEKKNGLFGNLIALSLGLTPNFKSNFDLAEDAKLQLSKDTYDDDLDNLLAQIGDQYADLFLAAKNLSDAILLSDILRVNTEITKAPLSASMIKRYDEHHQDLTLLKALVRQQLPEKYKEIFFDQSKNGYAGYIDGGASQEEFYKFIKPILEKMDGTEELLVKLNREDLLRKQRTFDNGSIPHQIHLGELHAILRRQEDFYPFLKDNREKIEKILTFRIPYYVGPLARGNSRFAWMTRKSEETITPWNFEEVVDKGASAQSFIERMTNFDKNLPNEKVLPKHSLLYEYFTVYNELTKVKYVTEGMRKPAFLSGEQKKAIVDLLFKTNRKVTVKQLKEDYFKKIECFDSVEISGVEDRFNASLGTYHDLLKIIKDKDFLDNEENEDILEDIVLTLTLFEDREMIEERLKTYAHLFDDKVMKQLKRRRYTGWGRLSRKLINGIRDKQSGKTILDFLKSDGFANRNFMQLIHDDSLTFKEDIQKAQVSGQGDSLHEHIANLAGSPAIKKGILQTVKVVDELVKVMGRHKPENIVIEMARENQTTQKGQKNSRERMKRIEEGIKELGSQILKEHPVENTQLQNEKLYLYYLQNGRDMYVDQELDINRLSDYDVDHIVPQSFLKDDSIDNKVLTRSDKARGKSDNVPSEEVVKKMKNYWRQLLNAKLITQRKFDNLTKAERGGLSELDKAGFIKRQLVETRQITKHVAQILDSRMNTKYDENDKLIREVKVITLKSKLVSDFRKDFQFYKVREINNYHHAHDAYLNAVVGTALIKKYPKLESEFVYGDYKVYDVRKMIAKSEQEIGKATAKYFFYSNIMNFFKTEITLANGEIRKRPLIETNGETGEIVWDKGRDFATVRKVLSMPQVNIVKKTEVQTGGFSKESILPKRNSDKLIARKKDWDPKKYGGFDSPTVAYSVLVVAKVEKGKSKKLKSVKELLGITIMERSSFEKNPIDFLEAKGYKEVKKDLIIKLPKYSLFELENGRKRMLASAGELQKGNELALPSKYVNFLYLASHYEKLKGSPEDNEQKQLFVEQHKHYLDEIIEQISEFSKRVILADANLDKVLSAYNKHRDKPIREQAENIIHLFTLTNLGAPAAFKYFDTTIDRKRYTSTKEVLDATLIHQSITGLYETRIDLSQLGGDGGGGGGSSEAAAKGGTAPLEEEYRLFLEAPIQNVTLLEQWKREIPKVWAEINPPGLASTQAPIHVQLLSTALPVRVRQYPITLEAKRSLRETIRKFRAAGILRPVHSPWNTPLLPVRKSGTSEYRMVQDLREVNKRVETIHPTVPNPYTLLSLLPPDRIWYSVLDLKDAFFCIPLAPESQLIFAFEWADAEEGESGQLTWTRLPQGFKNSPTLFNEALNRDLQGFRLDHPSVSLLQYVDDLLIAADTQAACLSATRDLLMTLAELGYRVSGKKAQLCQEEVTYLGFKIHKGSRSLSNSRTQAILQIPVPKTKRQVREFLGTIGYCRLWIPGFAELAQPLYAATRPGNDPLVWGEKEEEAFQSLKLALTQPPALALPSLDKPFQLFVEETSGAAKGVLTQALGPWKRPVAYLSKRLDPVAAGWPRCLRAIAAAALLTREASKLTFGQDIEITSSHNLESLLRSPPDKWLTNARITQYQVLLLDPPRVRFKQTAALNPATLLPETDDTLPIHHCLDTLDSLTSTRPDLTDQPLAQAEATLFTDGSSYIRDGKRYAGAAVVTLDSVIWAEPLPIGTSAQKAELIALTKALEWSKDKSVNIYTDSRYAFATLHVHGMIYRERGWLTAGGKAIKNAPEILALLTAVWLPKRVAVMHCKGHQKDDAPTSTGNRRADEVAREVAIRPLSTQATISAGKRTADGSEFEKRTADGSEFESPKKKAKVE

SEQ ID NO: 7274 - protein, 2218 aa, synthetic construct
MPAAKRVKLDGGDKKYSIGLDIGTNSVGWAVITDEYKVPSKKFKVLGNTDRHSIKKNLIGALLFDSGETAEATRLKRTARRRYTRRKNRICYLQEIFSNEMAKVDDSFFHRLEESFLVEEDKKHERHPIFGNIVDEVAYHEKYPTIYHLRKKLVDSTDKADLRLIYLALAHMIKFRGHFLIEGDLNPDNSDVDKLFIQLVQTYNQLFEENPINASGVDAKAILSARLSKSRRLENLIAQLPGEKKNGLFGNLIALSLGLTPNFKSNFDLAEDAKLQLSKDTYDDDLDNLLAQIGDQYADLFLAAKNLSDAILLSDILRVNTEITKAPLSASMIKRYDEHHQDLTLLKALVRQQLPEKYKEIFFDQSKNGYAGYIDGGASQEEFYKFIKPILEKMDGTEELLVKLNREDLLRKQRTFDNGSIPHQIHLGELHAILRRQEDFYPFLKDNREKIEKILTFRIPYYVGPLARGNSRFAWMTRKSEETITPWNFEEVVDKGASAQSFIERMTNFDKNLPNEKVLPKHSLLYEYFTVYNELTKVKYVTEGMRKPAFLSGEQKKAIVDLLFKTNRKVTVKQLKEDYFKKIECFDSVEISGVEDRFNASLGTYHDLLKIIKDKDFLDNEENEDILEDIVLTLTLFEDREMIEERLKTYAHLFDDKVMKQLKRRRYTGWGRLSRKLINGIRDKQSGKTILDFLKSDGFANRNFMQLIHDDSLTFKEDIQKAQVSGQGDSLHEHIANLAGSPAIKKGILQTVKVVDELVKVMGRHKPENIVIEMARENQTTQKGQKNSRERMKRIEEGIKELGSQILKEHPVENTQLQNEKLYLYYLQNGRDMYVDQELDINRLSDYDVDHIVPQSFLKDDSIDNKVLTRSDKARGKSDNVPSEEVVKKMKNYWRQLLNAKLITQRKFDNLTKAERGGLSELDKAGFIKRQLVETRQITKHVAQILDSRMNTKYDENDKLIREVKVITLKSKLVSDFRKDFQFYKVREINNYHHAHDAYLNAVVGTALIKKYPKLESEFVYGDYKVYDVRKMIAKSEQEIGKATAKYFFYSNIMNFFKTEITLANGEIRKRPLIETNGETGEIVWDKGRDFATVRKVLSMPQVNIVKKTEVQTGGFSKESILPKRNSDKLIARKKDWDPKKYGGFDSPTVAYSVLVVAKVEKGKSKKLKSVKELLGITIMERSSFEKNPIDFLEAKGYKEVKKDLIIKLPKYSLFELENGRKRMLASAGELQKGNELALPSKYVNFLYLASHYEKLKGSPEDNEQKQLFVEQHKHYLDEIIEQISEFSKRVILADANLDKVLSAYNKHRDKPIREQAENIIHLFTLTNLGAPAAFKYFDTTIDRKRYTSTKEVLDATLIHQSITGLYETRIDLSQLGGDGGGGGGSSEAAAKGGTLGDQGSRGSDPLPEPRVTLTVEGIPTEFLVNTGAEHSVLTKPMGKMGSKRTVVAGATGSKVYPWTTKRLLKIGQKQVTHSFLVIPECPAPLLGRDLLTKLKAQIQFSTEGPQVTWEDRPAMCLVLNLEEEYRLHEKPVPPSIDPSWLQLFPMVWAEKAGMGLANQVPPVVVELKSDASPVAVRQYPMSKEAREGIRPHIQRFLDLGILVPCQSPWNTPLLPVKKPGTNDYRPVQDLREVNKRVQDIHPTVPNPYNLLSSLPPSHTWYSVLDLKDAFFCLKLHPNSQPLFAFEWRDPEKGNTGQLTWTRLPQGFKNSPTLFNEALHRDLASFRALNPQVVMLQYVDDLLVAAPTYRDCKEGTRRLLQELSKLGYRVSAKKAQLCREEVTYLGYLLKGGKRWLTPARKATVMKIPTPTTPRQVREFLGTAGFCRLWIPGFASLAAPLYPLTRPKVPFTWTEAHQEAFGRIKEALLSAPALALPDLTKPFALYVDEKEGVARGVLTQTLGPWRRPVAYLSKKLDPVASGWPTCLKAIAAVALLLKDADKLTLGQNVLVIAPHNLESIVRQPPDRWMTNARMTHYQSLLLNERVSFAPPAILNPATLLPVESDDTPIHICSEILAEETGTRPDLRDQPLPGVPAWYTDGSSFIMDGRRQAGAAIVDNKRTVWASNLPEGTSAQKAELIALTQALRLAEGKSINIYTDSRYAFATAHVHGAIYKQRGWLTSAGKDIKNKEEILALLEAIHLPKRVAIIHCPGHQRGTDPVATGNRKADEAAKQAAQSTRILTETTKNAGKRTADGSEFEKRTADGSEFESPKKKAKVE

SEQ ID NO: 7275 - protein, 2096 aa, synthetic construct
MPAAKRVKLDGGDKKYSIGLDIGTNSVGWAVITDEYKVPSKKFKVLGNTDRHSIKKNLIGALLFDSGETAEATRLKRTARRRYTRRKNRICYLQEIFSNEMAKVDDSFFHRLEESFLVEEDKKHERHPIFGNIVDEVAYHEKYPTIYHLRKKLVDSTDKADLRLIYLALAHMIKFRGHFLIEGDLNPDNSDVDKLFIQLVQTYNQLFEENPINASGVDAKAILSARLSKSRRLENLIAQLPGEKKNGLFGNLIALSLGLTPNFKSNFDLAEDAKLQLSKDTYDDDLDNLLAQIGDQYADLFLAAKNLSDAILLSDILRVNTEITKAPLSASMIKRYDEHHQDLTLLKALVRQQLPEKYKEIFFDQSKNGYAGYIDGGASQEEFYKFIKPILEKMDGTEELLVKLNREDLLRKQRTFDNGSIPHQIHLGELHAILRRQEDFYPFLKDNREKIEKILTFRIPYYVGPLARGNSRFAWMTRKSEETITPWNFEEVVDKGASAQSFIERMTNFDKNLPNEKVLPKHSLLYEYFTVYNELTKVKYVTEGMRKPAFLSGEQKKAIVDLLFKTNRKVTVKQLKEDYFKKIECFDSVEISGVEDRFNASLGTYHDLLKIIKDKDFLDNEENEDILEDIVLTLTLFEDREMIEERLKTYAHLFDDKVMKQLKRRRYTGWGRLSRKLINGIRDKQSGKTILDFLKSDGFANRNFMQLIHDDSLTFKEDIQKAQVSGQGDSLHEHIANLAGSPAIKKGILQTVKVVDELVKVMGRHKPENIVIEMARENQTTQKGQKNSRERMKRIEEGIKELGSQILKEHPVENTQLQNEKLYLYYLQNGRDMYVDQELDINRLSDYDVDHIVPQSFLKDDSIDNKVLTRSDKARGKSDNVPSEEVVKKMKNYWRQLLNAKLITQRKFDNLTKAERGGLSELDKAGFIKRQLVETRQITKHVAQILDSRMNTKYDENDKLIREVKVITLKSKLVSDFRKDFQFYKVREINNYHHAHDAYLNAVVGTALIKKYPKLESEFVYGDYKVYDVRKMIAKSEQEIGKATAKYFFYSNIMNFFKTEITLANGEIRKRPLIETNGETGEIVWDKGRDFATVRKVLSMPQVNIVKKTEVQTGGFSKESILPKRNSDKLIARKKDWDPKKYGGFDSPTVAYSVLVVAKVEKGKSKKLKSVKELLGITIMERSSFEKNPIDFLEAKGYKEVKKDLIIKLPKYSLFELENGRKRMLASAGELQKGNELALPSKYVNFLYLASHYEKLKGSPEDNEQKQLFVEQHKHYLDEIIEQISEFSKRVILADANLDKVLSAYNKHRDKPIREQAENIIHLFTLTNLGAPAAFKYFDTTIDRKRYTSTKEVLDATLIHQSITGLYETRIDLSQLGGDGGGGGGSSEAAAKGGTLNLEDEYRLYETSAEPEVSPGSTWLSDFPQAWAETGGMGLAVRQAPLIIPLKATSTPVSIKQYPMSQEAKLGIKPHIQRLLDQGILVPCQSPWNTPLLPVKKPGTNDYRPVQDLREVNKRVEDIHPTVPNPYNLLSGLPPSHRWYTVLDLKDAFFCLRLHPTSQPLFAFEWRDPGMGISGQLTWTRLPQGFKNSPTLFNEALHRDLADFRIQHPDLILLQYVDDILLAATSELDCQQGTRALLLTLGNLGYRASAKKAQLCQKQVKYLGYLLKEGQRWLTEARKETVMGQPTPKTPRQLREFLGKAGFCRLFIPGFAEMAAPLYPLTKPGTLFNWGPDQQKAYQEIKQALLTAPALGLPDLTKPFELFVDEKQGYAKGVLTQKLGPWRRPVAYLSKKLDPVAAGWPPCLRMVAAIAVLRKDAGKLTMGQPLVILAPHAVEALVKQPPDRWLSNARMTHYQAMLLDTDRVQFGPVVALNPATLLPLPEEGAPHDCLEILAETHGTRPDLTDQPIPDADHTWYTDGSSFLQEGQRKAGAAVTTETEVIWARALPAGTSAQRAELIALTQALKMAEGKRLNVYTDSRYAFATAHIHGEIYRRRGWLTSEGREIKNKSEILALLKALFLPKRLSIIHCLGHQKGDSAEARGNRLADQAAREAAIKTPPDTSTLLAGKRTADGSEFEKRTADGSEFESPKKKAKVE

SEQ ID NO: 7276 - protein, 2096 aa, synthetic construct
MPAAKRVKLDGGDKKYSIGLDIGTNSVGWAVITDEYKVPSKKFKVLGNTDRHSIKKNLIGALLFDSGETAEATRLKRTARRRYTRRKNRICYLQEIFSNEMAKVDDSFFHRLEESFLVEEDKKHERHPIFGNIVDEVAYHEKYPTIYHLRKKLVDSTDKADLRLIYLALAHMIKFRGHFLIEGDLNPDNSDVDKLFIQLVQTYNQLFEENPINASGVDAKAILSARLSKSRRLENLIAQLPGEKKNGLFGNLIALSLGLTPNFKSNFDLAEDAKLQLSKDTYDDDLDNLLAQIGDQYADLFLAAKNLSDAILLSDILRVNTEITKAPLSASMIKRYDEHHQDLTLLKALVRQQLPEKYKEIFFDQSKNGYAGYIDGGASQEEFYKFIKPILEKMDGTEELLVKLNREDLLRKQRTFDNGSIPHQIHLGELHAILRRQEDFYPFLKDNREKIEKILTFRIPYYVGPLARGNSRFAWMTRKSEETITPWNFEEVVDKGASAQSFIERMTNFDKNLPNEKVLPKHSLLYEYFTVYNELTKVKYVTEGMRKPAFLSGEQKKAIVDLLFKTNRKVTVKQLKEDYFKKIECFDSVEISGVEDRFNASLGTYHDLLKIIKDKDFLDNEENEDILEDIVLTLTLFEDREMIEERLKTYAHLFDDKVMKQLKRRRYTGWGRLSRKLINGIRDKQSGKTILDFLKSDGFANRNFMQLIHDDSLTFKEDIQKAQVSGQGDSLHEHIANLAGSPAIKKGILQTVKVVDELVKVMGRHKPENIVIEMARENQTTQKGQKNSRERMKRIEEGIKELGSQILKEHPVENTQLQNEKLYLYYLQNGRDMYVDQELDINRLSDYDVDHIVPQSFLKDDSIDNKVLTRSDKARGKSDNVPSEEVVKKMKNYWRQLLNAKLITQRKFDNLTKAERGGLSELDKAGFIKRQLVETRQITKHVAQILDSRMNTKYDENDKLIREVKVITLKSKLVSDFRKDFQFYKVREINNYHHAHDAYLNAVVGTALIKKYPKLESEFVYGDYKVYDVRKMIAKSEQEIGKATAKYFFYSNIMNFFKTEITLANGEIRKRPLIETNGETGEIVWDKGRDFATVRKVLSMPQVNIVKKTEVQTGGFSKESILPKRNSDKLIARKKDWDPKKYGGFDSPTVAYSVLVVAKVEKGKSKKLKSVKELLGITIMERSSFEKNPIDFLEAKGYKEVKKDLIIKLPKYSLFELENGRKRMLASAGELQKGNELALPSKYVNFLYLASHYEKLKGSPEDNEQKQLFVEQHKHYLDEIIEQISEFSKRVILADANLDKVLSAYNKHRDKPIREQAENIIHLFTLTNLGAPAAFKYFDTTIDRKRYTSTKEVLDATLIHQSITGLYETRIDLSQLGGDGGGGGGSSEAAAKGGTLNIEDEYRLHETSKEPDVSLGSTWLSDFPQAWAETGGMGLAVRQAPLIIPLKATSTPVSIKQYPMSQEARLGIKPHIQRLLDQGILVPCQSPWNTPLLPVKKPGTNDYRPVQDLREVNKRVEDIHPTVPNPYNLLSGLPPSHQWYTVLDLKDAFFCLRLHPTSQPLFAFEWRDPEMGISGQLTWTRLPQGFKNSPTLFNEALHRDLAGFRIQHPDLILLQYVDDLLLAATSELDCQQGTRALLQTLGDLGYRASAKKAQICQKQVKYLGYLLKEGQRWLTEARKETVMGQPIPKTPRQLREFLGTAGFCRLWIPGFAEMAAPLYPLTKPGTLFNWGPDQQKAFQEIKQALLTAPALGLPDLTKPFELFVDEKQGYAKGVLTQKLGPWRRPVAYLSKKLDPVAAGWPPCLRMVAAIAVLTKDAGKLTMGQPLVILAPHAVEALVKQPPDRWLSNARMTHYQALLLDTDRVQFGPVVALNPATLLPLPEEGLQHDCLDILAEAHGTRSDLMDQPLPDADHTWYTDGSSFLQEGQRKAGAAVTTETEVIWARALPAGTSAQRAELIALTQALKMAEGKKLNVYTDSRYAFATAHIHGEIYRRRGWLTSEGKEIKNKDEILALLKALFLPKRLSIIHCPGHQKGNSAEARGNRMADQAAREVATRETPETSTLLAGKRTADGSEFEKRTADGSEFESPKKKAKVE

SEQ ID NO: 7277 - protein, 2096 aa, synthetic construct
MPAAKRVKLDGGDKKYSIGLDIGTNSVGWAVITDEYKVPSKKFKVLGNTDRHSIKKNLIGALLFDSGETAEATRLKRTARRRYTRRKNRICYLQEIFSNEMAKVDDSFFHRLEESFLVEEDKKHERHPIFGNIVDEVAYHEKYPTIYHLRKKLVDSTDKADLRLIYLALAHMIKFRGHFLIEGDLNPDNSDVDKLFIQLVQTYNQLFEENPINASGVDAKAILSARLSKSRRLENLIAQLPGEKKNGLFGNLIALSLGLTPNFKSNFDLAEDAKLQLSKDTYDDDLDNLLAQIGDQYADLFLAAKNLSDAILLSDILRVNTEITKAPLSASMIKRYDEHHQDLTLLKALVRQQLPEKYKEIFFDQSKNGYAGYIDGGASQEEFYKFIKPILEKMDGTEELLVKLNREDLLRKQRTFDNGSIPHQIHLGELHAILRRQEDFYPFLKDNREKIEKILTFRIPYYVGPLARGNSRFAWMTRKSEETITPWNFEEVVDKGASAQSFIERMTNFDKNLPNEKVLPKHSLLYEYFTVYNELTKVKYVTEGMRKPAFLSGEQKKAIVDLLFKTNRKVTVKQLKEDYFKKIECFDSVEISGVEDRFNASLGTYHDLLKIIKDKDFLDNEENEDILEDIVLTLTLFEDREMIEERLKTYAHLFDDKVMKQLKRRRYTGWGRLSRKLINGIRDKQSGKTILDFLKSDGFANRNFMQLIHDDSLTFKEDIQKAQVSGQGDSLHEHIANLAGSPAIKKGILQTVKVVDELVKVMGRHKPENIVIEMARENQTTQKGQKNSRERMKRIEEGIKELGSQILKEHPVENTQLQNEKLYLYYLQNGRDMYVDQELDINRLSDYDVDHIVPQSFLKDDSIDNKVLTRSDKARGKSDNVPSEEVVKKMKNYWRQLLNAKLITQRKFDNLTKAERGGLSELDKAGFIKRQLVETRQITKHVAQILDSRMNTKYDENDKLIREVKVITLKSKLVSDFRKDFQFYKVREINNYHHAHDAYLNAVVGTALIKKYPKLESEFVYGDYKVYDVRKMIAKSEQEIGKATAKYFFYSNIMNFFKTEITLANGEIRKRPLIETNGETGEIVWDKGRDFATVRKVLSMPQVNIVKKTEVQTGGFSKESILPKRNSDKLIARKKDWDPKKYGGFDSPTVAYSVLVVAKVEKGKSKKLKSVKELLGITIMERSSFEKNPIDFLEAKGYKEVKKDLIIKLPKYSLFELENGRKRMLASAGELQKGNELALPSKYVNFLYLASHYEKLKGSPEDNEQKQLFVEQHKHYLDEIIEQISEFSKRVILADANLDKVLSAYNKHRDKPIREQAENIIHLFTLTNLGAPAAFKYFDTTIDRKRYTSTKEVLDATLIHQSITGLYETRIDLSQLGGDGGGGGGSSEAAAKGGTLNIEDEHRLHETSKEPDVSLGSTWLSDFPQAWAETGGMGLAVRQAPLIIPLKATSTPVSIKQYPMSQEARLGIKPHIQRLLDQGILVPCQSPWNTPLLPVKKPGTNDYRPVQDLREVNKRVEDIHPTVPNPYNLLSGLPPSHQWYTVLDLKDAFFCLRLHPTSQPLFAFEWRDPEMGISGQLTWTRLPQGFKNSPTLFDEALHRDLADFRIQHPDLILLQYVDDLLLAATSELDCQQGTRALLQTLGNLGYRASAKKAQICQKQVKYLGYLLKEGQRWLTEARKETVMGQPTPKTPRQLREFLGTAGFCRLWIPGFAEMAAPLYPLTKTGTLFNWGPDQQKAYQEIKQALLTAPALGLPDLTKPFELFVDEKQGYAKGVLTQKLGPWRRPVAYLSKKLDPVAAGWPPCLRMVAAIAVLTKDAGKLTMGQPLVILAPHAVEALVKQPPDRWLSNARMTHYQALLLDTDRVQFGPVVALNPATLLPLPEEGLQHNCLDILAEAHGTRPDLTDQPLPDADHTWYTDGSSLLQEGQRKAGAAVTTETEVIWAKALPAGTSAQRAELIALTQALKMAEGKKLNVYTDSRYAFATAHIHGEIYRRRGLLTSEGKEIKNKDEILALLKALFLPKRLSIIHCPGHQKGHSAEARGNRMADQAARKAAITETPDTSTLLAGKRTADGSEFEKRTADGSEFESPKKKAKVE

SEQ ID NO: 7278 - protein, 2088 aa, synthetic construct
MPAAKRVKLDGGDKKYSIGLDIGTNSVGWAVITDEYKVPSKKFKVLGNTDRHSIKKNLIGALLFDSGETAEATRLKRTARRRYTRRKNRICYLQEIFSNEMAKVDDSFFHRLEESFLVEEDKKHERHPIFGNIVDEVAYHEKYPTIYHLRKKLVDSTDKADLRLIYLALAHMIKFRGHFLIEGDLNPDNSDVDKLFIQLVQTYNQLFEENPINASGVDAKAILSARLSKSRRLENLIAQLPGEKKNGLFGNLIALSLGLTPNFKSNFDLAEDAKLQLSKDTYDDDLDNLLAQIGDQYADLFLAAKNLSDAILLSDILRVNTEITKAPLSASMIKRYDEHHQDLTLLKALVRQQLPEKYKEIFFDQSKNGYAGYIDGGASQEEFYKFIKPILEKMDGTEELLVKLNREDLLRKQRTFDNGSIPHQIHLGELHAILRRQEDFYPFLKDNREKIEKILTFRIPYYVGPLARGNSRFAWMTRKSEETITPWNFEEVVDKGASAQSFIERMTNFDKNLPNEKVLPKHSLLYEYFTVYNELTKVKYVTEGMRKPAFLSGEQKKAIVDLLFKTNRKVTVKQLKEDYFKKIECFDSVEISGVEDRFNASLGTYHDLLKIIKDKDFLDNEENEDILEDIVLTLTLFEDREMIEERLKTYAHLFDDKVMKQLKRRRYTGWGRLSRKLINGIRDKQSGKTILDFLKSDGFANRNFMQLIHDDSLTFKEDIQKAQVSGQGDSLHEHIANLAGSPAIKKGILQTVKVVDELVKVMGRHKPENIVIEMARENQTTQKGQKNSRERMKRIEEGIKELGSQILKEHPVENTQLQNEKLYLYYLQNGRDMYVDQELDINRLSDYDVDHIVPQSFLKDDSIDNKVLTRSDKARGKSDNVPSEEVVKKMKNYWRQLLNAKLITQRKFDNLTKAERGGLSELDKAGFIKRQLVETRQITKHVAQILDSRMNTKYDENDKLIREVKVITLKSKLVSDFRKDFQFYKVREINNYHHAHDAYLNAVVGTALIKKYPKLESEFVYGDYKVYDVRKMIAKSEQEIGKATAKYFFYSNIMNFFKTEITLANGEIRKRPLIETNGETGEIVWDKGRDFATVRKVLSMPQVNIVKKTEVQTGGFSKESILPKRNSDKLIARKKDWDPKKYGGFDSPTVAYSVLVVAKVEKGKSKKLKSVKELLGITIMERSSFEKNPIDFLEAKGYKEVKKDLIIKLPKYSLFELENGRKRMLASAGELQKGNELALPSKYVNFLYLASHYEKLKGSPEDNEQKQLFVEQHKHYLDEIIEQISEFSKRVILADANLDKVLSAYNKHRDKPIREQAENIIHLFTLTNLGAPAAFKYFDTTIDRKRYTSTKEVLDATLIHQSITGLYETRIDLSQLGGDGGGGGGSSEAAAKGGLDDEYRLYSPLVKPDQNIQFWLEQFPQAWAETAGMGLAKQVPPQVIQLKASATPVSVRQYPLSKEAQEGIRPHVQRLIQQGILVPVQSPWNTPLLPVRKPGTNDYRPVQDLREVNKRVQDIHPTVPNPYNLLCALPPQRSWYTVLDLKDAFFCLRLHPTSQPLFAFEWRDPGTGRTGQLTWTRLPQGFKNSPTIFNEALHRDLANFRIQHPQVTLLQYVDDLLLAGATKQDCLEGTKALLLELSDLGYRASAKKAQICRREVTYLGYSLRDGQRWLTEARKKTVVQIPAPTTAKQVREFLGKAGFCRLFIPGFATLAAPLYPLTKPKGEFSWAPEHQKAFDAIKKALLSAPALALPDVTKPFTLYVDERKGVARGVLTQTLGPWRRPVAYLSKKLDPVASGWPVCLKAIAAVAILVKDADKLTLGQNITVIAPHALENIVRQPPDRWMTNARMTHYQSLLLTERVTFAPPAALNPATLLPEETDEPVTHDCHQLLIEETGVRKDLTDIPLTGEVLTWFTDGSSYVVEGKRMAGAAVVDGTRTIWASSLPEGTSAQKAELMALTQALRLAEGKSINIYTDSRYAFATAHVHGAIYKQRGWLTSAGREIKNKEEILSLLEALHLPKRLAIIHCPGHQKAKDPISRGNQMADRVAKQAAQGVNLLPAGKRTADGSEFEKRTADGSEFESPKKKAKVE

SEQ ID NO: 7279 - protein, 2088 aa, synthetic construct; identical to SEQ ID NO: 7278

SEQ ID NO: 7280 - protein, 2090 aa, synthetic construct
MPAAKRVKLDGGDKKYSIGLDIGTNSVGWAVITDEYKVPSKKFKVLGNTDRHSIKKNLIGALLFDSGETAEATRLKRTARRRYTRRKNRICYLQEIFSNEMAKVDDSFFHRLEESFLVEEDKKHERHPIFGNIVDEVAYHEKYPTIYHLRKKLVDSTDKADLRLIYLALAHMIKFRGHFLIEGDLNPDNSDVDKLFIQLVQTYNQLFEENPINASGVDAKAILSARLSKSRRLENLIAQLPGEKKNGLFGNLIALSLGLTPNFKSNFDLAEDAKLQLSKDTYDDDLDNLLAQIGDQYADLFLAAKNLSDAILLSDILRVNTEITKAPLSASMIKRYDEHHQDLTLLKALVRQQLPEKYKEIFFDQSKNGYAGYIDGGASQEEFYKFIKPILEKMDGTEELLVKLNREDLLRKQRTFDNGSIPHQIHLGELHAILRRQEDFYPFLKDNREKIEKILTFRIPYYVGPLARGNSRFAWMTRKSEETITPWNFEEVVDKGASAQSFIERMTNFDKNLPNEKVLPKHSLLYEYFTVYNELTKVKYVTEGMRKPAFLSGEQKKAIVDLLFKTNRKVTVKQLKEDYFKKIECFDSVEISGVEDRFNASLGTYHDLLKIIKDKDFLDNEENEDILEDIVLTLTLFEDREMIEERLKTYAHLFDDKVMKQLKRRRYTGWGRLSRKLINGIRDKQSGKTILDFLKSDGFANRNFMQLIHDDSLTFKEDIQKAQVSGQGDSLHEHIANLAGSPAIKKGILQTVKVVDELVKVMGRHKPENIVIEMARENQTTQKGQKNSRERMKRIEEGIKELGSQILKEHPVENTQLQNEKLYLYYLQNGRDMYVDQELDINRLSDYDVDHIVPQSFLKDDSIDNKVLTRSDKARGKSDNVPSEEVVKKMKNYWRQLLNAKLITQRKFDNLTKAERGGLSELDKAGFIKRQLVETRQITKHVAQILDSRMNTKYDENDKLIREVKVITLKSKLVSDFRKDFQFYKVREINNYHHAHDAYLNAVVGTALIKKYPKLESEFVYGDYKVYDVRKMIAKSEQEIGKATAKYFFYSNIMNFFKTEITLANGEIRKRPLIETNGETGEIVWDKGRDFATVRKVLSMPQVNIVKKTEVQTGGFSKESILPKRNSDKLIARKKDWDPKKYGGFDSPTVAYSVLVVAKVEKGKSKKLKSVKELLGITIMERSSFEKNPIDFLEAKGYKEVKKDLIIKLPKYSLFELENGRKRMLASAGELQKGNELALPSKYVNFLYLASHYEKLKGSPEDNEQKQLFVEQHKHYLDEIIEQISEFSKRVILADANLDKVLSAYNKHRDKPIREQAENIIHLFTLTNLGAPAAFKYFDTTIDRKRYTSTKEVLDATLIHQSITGLYETRIDLSQLGGDGGGGGGSSEAAAKGGTLQLDDEYRLYSPLVKPDQNIQFWLEQFPQAWAETAGMGLAKQVPPQVIQLKASATPVSVRQYPLSKEAQEGIRPHVQRLIQQGILVPVQSPWNTPLLPVRKPGTNDYRPVQDLREVNKRVQDIHPTVPNPYNLLCALPPQRSWYTVLDLKDAFFCLRLHPTSQPLFAFEWRDPGTGRTGQLTWTRLPQGFKNSPTIFDEALHRDLANFRIQHPQVTLLQYVDDLLLAGATKQDCLEGTKALLLELSDLGYRASAKKAQICRREVTYLGYSLRDGQRWLTEARKKTVVQIPAPTTAKQVREFLGTAGFCRLWIPGFATLAAPLYPLTKEKGEFSWAPEHQKAFDAIKKALLSAPALALPDVTKPFTLYVDERKGVARGVLTQTLGPWRRPVAYLSKKLDPVASGWPVCLKAIAAVAILVKDADKLTLGQNITVIAPHALENIVRQPPDRWMTNARMTHYQSLLLTERVTFAPPAALNPATLLPEETDEPVTHDCHQLLIEETGVRKDLTDIPLTGEVLTWFTDGSSYVVEGKRMAGAAVVDGTRTIWASSLPEGTSAQKAELMALTQALRLAEGKSINIYTDSRYAFATAHVHGAIYKQRGLLTSAGREIKNKEEILSLLEALHLPKRLAIIHCPGHQKAKDPISRGNQMADRVAKQAAQGVNLLAGKRTADGSEFEKRTADGSEFESPKKKAKVE

SEQ ID NO: 7281 - protein, 2094 aa, synthetic construct
MPAAKRVKLDGGDKKYSIGLDIGTNSVGWAVITDEYKVPSKKFKVLGNTDRHSIKKNLIGALLFDSGETAEATRLKRTARRRYTRRKNRICYLQEIFSNEMAKVDDSFFHRLEESFLVEEDKKHERHPIFGNIVDEVAYHEKYPTIYHLRKKLVDSTDKADLRLIYLALAHMIKFRGHFLIEGDLNPDNSDVDKLFIQLVQTYNQLFEENPINASGVDAKAILSARLSKSRRLENLIAQLPGEKKNGLFGNLIALSLGLTPNFKSNFDLAEDAKLQLSKDTYDDDLDNLLAQIGDQYADLFLAAKNLSDAILLSDILRVNTEITKAPLSASMIKRYDEHHQDLTLLKALVRQQLPEKYKEIFFDQSKNGYAGYIDGGASQEEFYKFIKPILEKMDGTEELLVKLNREDLLRKQRTFDNGSIPHQIHLGELHAILRRQEDFYPFLKDNREKIEKILTFRIPYYVGPLARGNSRFAWMTRKSEETITPWNFEEVVDKGASAQSFIERMTNFDKNLPNEKVLPKHSLLYEYFTVYNELTKVKYVTEGMRKPAFLSGEQKKAIVDLLFKTNRKVTVKQLKEDYFKKIECFDSVEISGVEDRFNASLGTYHDLLKIIKDKDFLDNEENEDILEDIVLTLTLFEDREMIEERLKTYAHLFDDKVMKQLKRRRYTGWGRLSRKLINGIRDKQSGKTILDFLKSDGFANRNFMQLIHDDSLTFKEDIQKAQVSGQGDSLHEHIANLAGSPAIKKGILQTVKVVDELVKVMGRHKPENIVIEMARENQTTQKGQKNSRERMKRIEEGIKELGSQILKEHPVENTQLQNEKLYLYYLQNGRDMYVDQELDINRLSDYDVDHIVPQSFLKDDSIDNKVLTRSDKARGKSDNVPSEEVVKKMKNYWRQLLNAKLITQRKFDNLTKAERGGLSELDKAGFIKRQLVETRQITKHVAQILDSRMNTKYDENDKLIREVKVITLKSKLVSDFRKDFQFYKVREINNYHHAHDAYLNAVVGTALIKKYPKLESEFVYGDYKVYDVRKMIAKSEQEIGKATAKYFFYSNIMNFFKTEITLANGEIRKRPLIETNGETGEIVWDKGRDFATVRKVLSMPQVNIVKKTEVQTGGFSKESILPKRNSDKLIARKKDWDPKKYGGFDSPTVAYSVLVVAKVEKGKSKKLKSVKELLGITIMERSSFEKNPIDFLEAKGYKEVKKDLIIKLPKYSLFELENGRKRMLASAGELQKGNELALPSKYVNFLYLASHYEKLKGSPEDNEQKQLFVEQHKHYLDEIIEQISEFSKRVILADANLDKVLSAYNKHRDKPIREQAENIIHLFTLTNLGAPAAFKYFDTTIDRKRYTSTKEVLDATLIHQSITGLYETRIDLSQLGGDGGGGGGSSEAAAKGGVLNLEEEYRLHEKPVPSSIDPSWLQLFPTVWAERAGMGLANQVPPVVVELRSGASPVAVRQYPMSKEAREGIRPHIQRFLDLGVLVPCQSPWNTPLLPVKKPGTNDYRPVQDLREINKRVQDIHPTVPNPYNLLSSLPPSHTWYSVLDLKDAFFCLKLHPNSQPLFAFEWRDPEKGNTGQLTWTRLPQGFKNSPTLFNEALHRDLAPFRALNPQVVLLQYVDDLLVAAPTYRDCKEGTQKLLQELSKLGYRVSAKKAQLCQKEVTYLGYLLKEGKRWLTPARKATVMKIPPPTTPRQVREFLGKAGFCRLFIPGFASLAAPLYPLTKPSIPFIWTEEHQKAFDRIKEALLSAPALALPDLTKPFTLYVDERAGVARGVLTQTLGPWRRPVAYLSKKLDPVASGWPTCLKAVAAVALLLKDADKLTLGQNVTVIASHSLESIVRQPPDRWMTNARMTHYQSLLLNERVSFAPPAVLNPATLLPVESEATPVHRCSEILAEETGTRRDLKDQPLPGVPAWYTDGSSFIAEGKRRAGAAIVDGKRTVWASSLPEGTSAQKAELVALTQALRLAEGKDINIYTDSRYAFATAHIHGAIYKQRGWLTSAGKDIKNKEEILALLEAIHLPKRVAIIHCPGHQKGNDPVATGNRRADEAAKQAALSTRVLAETTKPAGKRTADGSEFEKRTADGSEFESPKKKAKVE

SEQ ID NO: 7282 - protein, 2096 aa, synthetic construct
MPAAKRVKLDGGDKKYSIGLDIGTNSVGWAVITDEYKVPSKKFKVLGNTDRHSIKKNLIGALLFDSGETAEATRLKRTARRRYTRRKNRICYLQEIFSNEMAKVDDSFFHRLEESFLVEEDKKHERHPIFGNIVDEVAYHEKYPTIYHLRKKLVDSTDKADLRLIYLALAHMIKFRGHFLIEGDLNPDNSDVDKLFIQLVQTYNQLFEENPINASGVDAKAILSARLSKSRRLENLIAQLPGEKKNGLFGNLIALSLGLTPNFKSNFDLAEDAKLQLSKDTYDDDLDNLLAQIGDQYADLFLAAKNLSDAILLSDILRVNTEITKAPLSASMIKRYDEHHQDLTLLKALVRQQLPEKYKEIFFDQSKNGYAGYIDGGASQEEFYKFIKPILEKMDGTEELLVKLNREDLLRKQRTFDNGSIPHQIHLGELHAILRRQEDFYPFLKDNREKIEKILTFRIPYYVGPLARGNSRFAWMTRKSEETITPWNFEEVVDKGASAQSFIERMTNFDKNLPNEKVLPKHSLLYEYFTVYNELTKVKYVTEGMRKPAFLSGEQKKAIVDLLFKTNRKVTVKQLKEDYFKKIECFDSVEISGVEDRFNASLGTYHDLLKIIKDKDFLDNEENEDILEDIVLTLTLFEDREMIEERLKTYAHLFDDKVMKQLKRRRYTGWGRLSRKLINGIRDKQSGKTILDFLKSDGFANRNFMQLIHDDSLTFKEDIQKAQVSGQGDSLHEHIANLAGSPAIKKGILQTVKVVDELVKVMGRHKPENIVIEMARENQTTQKGQKNSRERMKRIEEGIKELGSQILKEHPVENTQLQNEKLYLYYLQNGRDMYVDQELDINRLSDYDVDHIVPQSFLKDDSIDNKVLTRSDKARGKSDNVPSEEVVKKMKNYWRQLLNAKLITQRKFDNLTKAERGGLSELDKAGFIKRQLVETRQITKHVAQILDSRMNTKYDENDKLIREVKVITLKSKLVSDFRKDFQFYKVREINNYHHAHDAYLNAVVGTALIKKYPKLESEFVYGDYKVYDVRKMIAKSEQEIGKATAKYFFYSNIMNFFKTEITLANGEIRKRPLIETNGETGEIVWDKGRDFATVRKVLSMPQVNIVKKTEVQTGGFSKESILPKRNSDKLIARKKDWDPKKYGGFDSPTVAYSVLVVAKVEKGKSKKLKSVKELLGITIMERSSFEKNPIDFLEAKGYKEVKKDLIIKLPKYSLFELENGRKRMLASAGELQKGNELALPSKYVNFLYLASHYEKLKGSPEDNEQKQLFVEQHKHYLDEIIEQISEFSKRVILADANLDKVLSAYNKHRDKPIREQAENIIHLFTLTNLGAPAAFKYFDTTIDRKRYTSTKEVLDATLIHQSITGLYETRIDLSQLGGDGGGGGGSSEAAAKGGTLNIEDEYRLHETSKEPDVPLGSTWLSDFPQAWAETGGMGLAVRQAPLIIPLKATSTPVSIKQYPMSQEARLGIKPHIQRLLDQGILVPCQSPWNTPLLPVKKPGTNDYRPVQDLREVNKRVEDIHPTVPNPYNLLSGLPPSHQWYTVLDLKDAFFCLRLHPTSQPLFAFEWRDPEMGISGQLTWTRLPQGFKNSPTLFNEALHRDLADFRIQHPDLILLQYVDDLLLAATSEQDCQRGTRALLQTLGNLGYRASAKKAQICQKQVKYLGYLLKEGQRWLTEARKETVMGQPTPKTPRQLREFLGTAGFCRLWIPGFAEMAAPLYPLTKPGTLFNWGPDQQKAYQEIKQALLTAPALGLPDLTKPFELFVDEKQGYAKGVLTQKLGPWRRPVAYLSKKLDPVAAGWPPCLRMVAAIAVLTKDAGKLTMGQPLVILAPHAVEALVKQPPDRWLSNARMTHYQAMLLDTDRVQFGPVVALNPATLLPLPEKEAPHDCLEILAETHGTRPDLTDQPIPDADYTWYTDGSSFLQEGQRRAGAAVTTETEVIWARALPAGTSAQRAELIALTQALKMAEGKKLNVYTDSRYAFATAHVHGEIYRRRGWLTSEGREIKNKNEILALLKALFLPKRLSIIHCPGHQKGNSAEARGNRMADQAAREAAMKAVLETSTLLAGKRTADGSEFEKRTADGSEFESPKKKAKVE

SEQ ID NO: 7283 - protein, 2173 aa, synthetic construct
MPAAKRVKLDGGDKKYSIGLDIGTNSVGWAVITDEYKVPSKKFKVLGNTDRHSIKKNLIGALLFDSGETAEATRLKRTARRRYTRRKNRICYLQEIFSNEMAKVDDSFFHRLEESFLVEEDKKHERHPIFGNIVDEVAYHEKYPTIYHLRKKLVDSTDKADLRLIYLALAHMIKFRGHFLIEGDLNPDNSDVDKLFIQLVQTYNQLFEENPINASGVDAKAILSARLSKSRRLENLIAQLPGEKKNGLFGNLIALSLGLTPNFKSNFDLAEDAKLQLSKDTYDDDLDNLLAQIGDQYADLFLAAKNLSDAILLSDILRVNTEITKAPLSASMIKRYDEHHQDLTLLKALVRQQLPEKYKEIFFDQSKNGYAGYIDGGASQEEFYKFIKPILEKMDGTEELLVKLNREDLLRKQRTFDNGSIPHQIHLGELHAILRRQEDFYPFLKDNREKIEKILTFRIPYYVGPLARGNSRFAWMTRKSEETITPWNFEEVVDKGASAQSFIERMTNFDKNLPNEKVLPKHSLLYEYFTVYNELTKVKYVTEGMRKPAFLSGEQKKAIVDLLFKTNRKVTVKQLKEDYFKKIECFDSVEISGVEDRFNASLGTYHDLLKIIKDKDFLDNEENEDILEDIVLTLTLFEDREMIEERLKTYAHLFDDKVMKQLKRRRYTGWGRLSRKLINGIRDKQSGKTILDFLKSDGFANRNFMQLIHDDSLTFKEDIQKAQVSGQGDSLHEHIANLAGSPAIKKGILQTVKVVDELVKVMGRHKPENIVIEMARENQTTQKGQKNSRERMKRIEEGIKELGSQILKEHPVENTQLQNEKLYLYYLQNGRDMYVDQELDINRLSDYDVDHIVPQSFLKDDSIDNKVLTRSDKARGKSDNVPSEEVVKKMKNYWRQLLNAKLITQRKFDNLTKAERGGLSELDKAGFIKRQLVETRQITKHVAQILDSRMNTKYDENDKLIREVKVITLKSKLVSDFRKDFQFYKVREINNYHHAHDAYLNAVVGTALIKKYPKLESEFVYGDYKVYDVRKMIAKSEQEIGKATAKYFFYSNIMNFFKTEITLANGEIRKRPLIETNGETGEIVWDKGRDFATVRKVLSMPQVNIVKKTEVQTGGFSKESILPKRNSDKLIARKKDWDPKKYGGFDSPTVAYSVLVVAKVEKGKSKKLKSVKELLGITIMERSSFEKNPIDFLEAKGYKEVKKDLIIKLPKYSLFELENGRKRMLASAGELQKGNELALPSKYVNFLYLASHYEKLKGSPEDNEQKQLFVEQHKHYLDEIIEQISEFSKRVILADANLDKVLSAYNKHRDKPIREQAENIIHLFTLTNLGAPAAFKYFDTTIDRKRYTSTKEVLDATLIHQSITGLYETRIDLSQLGGDGGGGGEAAAKGSSGGMDLLKPLTVERKGVKIKGYWNSQADITCVPKDLLQGEEPVRQQNVTTIHGTQEGDVYYVNLKIDGRRINTEVIGTTLDYAIITPGDVPWILKKPLELTIKLDLEEQQGTLLNNSILSKKGKEELKQLFEKYSALWQSWENQVGHRRIRPHKIATGTVKPTPQKQYHINPKAKPDIQIVINDLLKQGVLIQKESTMNTPVYPVPKPNGRWRMVLDYRAVNKVTPLIAVQNQHSYGILGSLFKGRYKTTIDLSNGFWAHPIVPEDYWITAFTWQGKQYCWTVLPQGFLNSPGLFNGDVVDLLQGIPNVEVYVDDVYISHDSEKEHLEYLDILFNRLKEAGYIISLKKSNIANSIVDFLGFQITNEGRGLTDTFKEKLENITAPTTLKQLQSILGKLNFARNFIPDFTELIAPLYALIPKSPKNYVPWQIEHSTTLETLITKLNGAEYLQGRKGDKTLIMKVNASYTTGYIRYYNEGEKKPISYVSIVFSKTELKFTELEKLLTTVHKGLLKALDLSMGQNIHVYSPIVSMQNIQKTPQTAKKALASRWLSWLSYLEDPRIRFFYDPQMPALKDLPAVDTGKDNKKHPSNFQHIFYTDGSAITSPTKEGHLNAGMGIVYFINKDGNLQKQQEWSISLGNHTAQFAEIAAFEFALKKCLPLGGNILVVTDSNYVAKAYNEELDVWASNGFVNNRKKPLKHISKWKSVADLKRLRPDVVVTHEPGHQKLDSSPHAYGNNLADQLATQASFKVHAGKRTADGSEFEKRTADGSEFESPKKKAKVE

SEQ ID NO: 7284 - protein, 2095 aa, synthetic construct
MPAAKRVKLDGGDKKYSIGLDIGTNSVGWAVITDEYKVPSKKFKVLGNTDRHSIKKNLIGALLFDSGETAEATRLKRTARRRYTRRKNRICYLQEIFSNEMAKVDDSFFHRLEESFLVEEDKKHERHPIFGNIVDEVAYHEKYPTIYHLRKKLVDSTDKADLRLIYLALAHMIKFRGHFLIEGDLNPDNSDVDKLFIQLVQTYNQLFEENPINASGVDAKAILSARLSKSRRLENLIAQLPGEKKNGLFGNLIALSLGLTPNFKSNFDLAEDAKLQLSKDTYDDDLDNLLAQIGDQYADLFLAAKNLSDAILLSDILRVNTEITKAPLSASMIKRYDEHHQDLTLLKALVRQQLPEKYKEIFFDQSKNGYAGYIDGGASQEEFYKFIKPILEKMDGTEELLVKLNREDLLRKQRTFDNGSIPHQIHLGELHAILRRQEDFYPFLKDNREKIEKILTFRIPYYVGPLARGNSRFAWMTRKSEETITPWNFEEVVDKGASAQSFIERMTNFDKNLPNEKVLPKHSLLYEYFTVYNELTKVKYVTEGMRKPAFLSGEQKKAIVDLLFKTNRKVTVKQLKEDYFKKIECFDSVEISGVEDRFNASLGTYHDLLKIIKDKDFLDNEENEDILEDIVLTLTLFEDREMIEERLKTYAHLFDDKVMKQLKRRRYTGWGRLSRKLINGIRDKQSGKTILDFLKSDGFANRNFMQLIHDDSLTFKEDIQKAQVSGQGDSLHEHIANLAGSPAIKKGILQTVKVVDELVKVMGRHKPENIVIEMARENQTTQKGQKNSRERMKRIEEGIKELGSQILKEHPVENTQLQNEKLYLYYLQNGRDMYVDQELDINRLSDYDVDHIVPQSFLKDDSIDNKVLTRSDKARGKSDNVPSEEVVKKMKNYWRQLLNAKLITQRKFDNLTKAERGGLSELDKAGFIKRQLVETRQITKHVAQILDSRMNTKYDENDKLIREVKVITLKSKLVSDFRKDFQFYKVREINNYHHAHDAYLNAVVGTALIKKYPKLESEFVYGDYKVYDVRKMIAKSEQEIGKATAKYFFYSNIMNFFKTEITLANGEIRKRPLIETNGETGEIVWDKGRDFATVRKVLSMPQVNIVKKTEVQTGGFSKESILPKRNSDKLIARKKDWDPKKYGGFDSPTVAYSVLVVAKVEKGKSKKLKSVKELLGITIMERSSFEKNPIDFLEAKGYKEVKKDLIIKLPKYSLFELENGRKRMLASAGELQKGNELALPSKYVNFLYLASHYEKLKGSPEDNEQKQLFVEQHKHYLDEIIEQISEFSKRVILADANLDKVLSAYNKHRDKPIREQAENIIHLFTLTNLGAPAAFKYFDTTIDRKRYTSTKEVLDATLIHQSITGLYETRIDLSQLGGDGGGGGEAAAKGSSGGTLQLEEEYRLFEPESTQKQEMDIWLKNFPQAWAETGGMGTAHCQAPVLIQLKATATPISIRQYPMPHEAYQGIKPHIRRMLDQGILKPCQSPWNTPLLPVKKPGTEDYRPVQDLREVNKRVEDIHPTVPNPYNLLSTLPPSHPWYTVLDLKDAFFCLRLHSESQLLFAFEWRDPEIGLSGQLTWTRLPQGFKNSPTLFNEALHSDLADFRVRYPALVLLQYVDDLLLAAATRTECLEGTKALLETLGNKGYRASAKKAQICLQEVTYLGYSLKDGQRWLTKARKEAILSIPVPKNSRQVREFLGKAGYCRLFIPGFAELAAPLYPLTRPGTLFQWGTEQQLAFEDIKKALLSSPALGLPDITKPFELFIDENSGFAKGVLVQKLGPWKRPVAYLSKKLDTVASGWPPCLRMVAAIAILVKDAGKLTLGQPLTILTSHPVEALVRQPPNKWLSNARMTHYQAMLLDAERVHFGPTVSLNPATLLPLPSGGNHHDCLQILAETHGTRPDLTDQPLPDADLTWYTDGSSFIRNGEREAGAAVTTESEVIWAAPLPPGTSAQRAELIALTQALKMAEGKKLTVYTDSRYAFATTHVHGEIYRRRGWLTSEGKEIKNKNEILALLEALFLPKRLSIIHCPGHQKGDSPQAKGNRLADDTAKKAATETHSSLTVLPAGKRTADGSEFEKRTADGSEFESPKKKAKVE

SEQ ID NO: 7285 - protein, 2176 aa, synthetic construct
MPAAKRVKLDGGDKKYSIGLDIGTNSVGWAVITDEYKVPSKKFKVLGNTDRHSIKKNLIGALLFDSGETAEATRLKRTARRRYTRRKNRICYLQEIFSNEMAKVDDSFFHRLEESFLVEEDKKHERHPIFGNIVDEVAYHEKYPTIYHLRKKLVDSTDKADLRLIYLALAHMIKFRGHFLIEGDLNPDNSDVDKLFIQLVQTYNQLFEENPINASGVDAKAILSARLSKSRRLENLIAQLPGEKKNGLFGNLIALSLGLTPNFKSNFDLAEDAKLQLSKDTYDDDLDNLLAQIGDQYADLFLAAKNLSDAILLSDILRVNTEITKAPLSASMIKRYDEHHQDLTLLKALVRQQLPEKYKEIFFDQSKNGYAGYIDGGASQEEFYKFIKPILEKMDGTEELLVKLNREDLLRKQRTFDNGSIPHQIHLGELHAILRRQEDFYPFLKDNREKIEKILTFRIPYYVGPLARGNSRFAWMTRKSEETITPWNFEEVVDKGASAQSFIERMTNFDKNLPNEKVLPKHSLLYEYFTVYNELTKVKYVTEGMRKPAFLSGEQKKAIVDLLFKTNRKVTVKQLKEDYFKKIECFDSVEISGVEDRFNASLGTYHDLLKIIKDKDFLDNEENEDILEDIVLTLTLFEDREMIEERLKTYAHLFDDKVMKQLKRRRYTGWGRLSRKLINGIRDKQSGKTILDFLKSDGFANRNFMQLIHDDSLTFKEDIQKAQVSGQGDSLHEHIANLAGSPAIKKGILQTVKVVDELVKVMGRHKPENIVIEMARENQTTQKGQKNSRERMKRIEEGIKELGSQILKEHPVENTQLQNEKLYLYYLQNGRDMYVDQELDINRLSDYDVDHIVPQSFLKDDSIDNKVLTRSDKARGKSDNVPSEEVVKKMKNYWRQLLNAKLITQRKFDNLTKAERGGLSELDKAGFIKRQLVETRQITKHVAQILDSRMNTKYDENDKLIREVKVITLKSKLVSDFRKDFQFYKVREINNYHHAHDAYLNAVVGTALIKKYPKLESEFVYGDYKVYDVRKMIAKSEQEIGKATAKYFFYSNIMNFFKTEITLANGEIRKRPLIETNGETGEIVWDKGRDFATVRKVLSMPQVNIVKKTEVQTGGFSKESILPKRNSDKLIARKKDWDPKKYGGFDSPTVAYSVLVVAKVEKGKSKKLKSVKELLGITIMERSSFEKNPIDFLEAKGYKEVKKDLIIKLPKYSLFELENGRKRMLASAGELQKGNELALPSKYVNFLYLASHYEKLKGSPEDNEQKQLFVEQHKHYLDEIIEQISEFSKRVILADANLDKVLSAYNKHRDKPIREQAENIIHLFTLTNLGAPAAFKYFDTTIDRKRYTSTKEVLDATLIHQSITGLYETRIDLSQLGGDGGGGGEAAAKGSSGGMNPLQLLQPLPAEIKGTKLLAHWNSGATITCIPESFLEDEQPIKKTLIKTIHGEKQQNVYYVTFKVKGRKVEAEVIASPYEYILLSPTDVPWLTQQPLQLTILVPLQEYQEKILSKTALPEDQKQQLKTLFVKYDNLWQHWENQVGHRKIRPHNIATGDYPPRPQKQYPINPKAKPSIQIVIDDLLKQGVLTPQNSTMNTPVYPVPKPDGRWRMVLDYREVNKTIPLTAAQNQHSAGILATIVRQKYKTTLDLANGFWAHPITPESYWLTAFTWQGKQYCWTRLPQGFLNSPALFTADVVDLLKEIPNVQVYVDDIYLSHDDPKEHVQQLEKVFQILLQAGYVVSLKKSEIGQKTVEFLGFNITKEGRGLTDTFKTKLLNITPPKDLKQLQSILGLLNFARNFIPNFAELVQPLYNLIASAKGKYIEWSEENTKQLNMVIEALNTASNLEERLPEQRLVIKVNTSPSAGYVRYYNETGKKPIMYLNYVFSKAELKFSMLEKLLTTMHKALIKAMDLAMGQEILVYSPIVSMTKIQKTPLPERKALPIRWITWMTYLEDPRIQFHYDKTLPELKHIPDVYTSSQSPVKHPSQYEGVFYTDGSAIKSPDPTKSNNAGMGIVHATYKPEYQVLNQWSIPLGNHTAQMAEIAAVEFACKKALKIPGPVLVITDSFYVAESANKELPYWKSNGFVNNKKKPLKHISKWKSIAECLSMKPDITIQHEKGISLQIPVFILKGNALADKLATQGSYVVNAGKRTADGSEFEKRTADGSEFESPKKKAKVE

SEQ ID NO: 7286 - protein, 2127 aa, synthetic construct
MPAAKRVKLDGGDKKYSIGLDIGTNSVGWAVITDEYKVPSKKFKVLGNTDRHSIKKNLIGALLFDSGETAEATRLKRTARRRYTRRKNRICYLQEIFSNEMAKVDDSFFHRLEESFLVEEDKKHERHPIFGNIVDEVAYHEKYPTIYHLRKKLVDSTDKADLRLIYLALAHMIKFRGHFLIEGDLNPDNSDVDKLFIQLVQTYNQLFEENPINASGVDAKAILSARLSKSRRLENLIAQLPGEKKNGLFGNLIALSLGLTPNFKSNFDLAEDAKLQLSKDTYDDDLDNLLAQIGDQYADLFLAAKNLSDAILLSDILRVNTEITKAPLSASMIKRYDEHHQDLTLLKALVRQQLPEKYKEIFFDQSKNGYAGYIDGGASQEEFYKFIKPILEKMDGTEELLVKLNREDLLRKQRTFDNGSIPHQIHLGELHAILRRQEDFYPFLKDNREKIEKILTFRIPYYVGPLARGNSRFAWMTRKSEETITPWNFEEVVDKGASAQSFIERMTNFDKNLPNEKVLPKHSLLYEYFTVYNELTKVKYVTEGMRKPAFLSGEQKKAIVDLLFKTNRKVTVKQLKEDYFKKIECFDSVEISGVEDRFNASLGTYHDLLKIIKDKDFLDNEENEDILEDIVLTLTLFEDREMIEERLKTYAHLFDDKVMKQLKRRRYTGWGRLSRKLINGIRDKQSGKTILDFLKSDGFANRNFMQLIHDDSLTFKEDIQKAQVSGQGDSLHEHIANLAGSPAIKKGILQTVKVVDELVKVMGRHKPENIVIEMARENQTTQKGQKNSRERMKRIEEGIKELGSQILKEHPVENTQLQNEKLYLYYLQNGRDMYVDQELDINRLSDYDVDHIVPQSFLKDDSIDNKVLTRSDKARGKSDNVPSEEVVKKMKNYWRQLLNAKLITQRKFDNLTKAERGGLSELDKAGFIKRQLVETRQITKHVAQILDSRMNTKYDENDKLIREVKVITLKSKLVSDFRKDFQFYKVREINNYHHAHDAYLNAVVGTALIKKYPKLESEFVYGDYKVYDVRKMIAKSEQEIGKATAKYFFYSNIMNFFKTEITLANGEIRKRPLIETNGETGEIVWDKGRDFATVRKVLSMPQVNIVKKTEVQTGGFSKESILPKRNSDKLIARKKDWDPKKYGGFDSPTVAYSVLVVAKVEKGKSKKLKSVKELLGITIMERSSFEKNPIDFLEAKGYKEVKKDLIIKLPKYSLFELENGRKRMLASAGELQKGNELALPSKYVNFLYLASHYEKLKGSPEDNEQKQLFVEQHKHYLDEIIEQISEFSKRVILADANLDKVLSAYNKHRDKPIREQAENIIHLFTLTNLGAPAAFKYFDTTIDRKRYTSTKEVLDATLIHQSITGLYETRIDLSQLGGDGGGGGEAAAKGSSGGLLGRDLLTKLKAQIQFSTEGPQVTWEDRPAMCLVLNLEEEYRLHEKPVPPSIDPSWLQLFPMVWAEKAGMGLANQVPPVVVELKSDASPVAVRQYPMSKEAREGIRPHIQRFLDLGILVPCQSPWNTPLLPVKKPGTNDYRPVQDLREVNKRVQDIHPTVPNPYNLLSSLPPSHTWYSVLDLKDAFFCLKLHPNSQPLFAFEWRDPEKGNTGQLTWTRLPQGFKNSPTLFNEALHRDLASFRALNPQVVMLQYVDDLLVAAPTYRDCKEGTRRLLQELSKLGYRVSAKKAQLCREEVTYLGYLLKGGKRWLTPARKATVMKIPTPTTPRQVREFLGTAGFCRLWIPGFASLAAPLYPLTRPKVPFTWTEAHQEAFGRIKEALLSAPALALPDLTKPFALYVDEKEGVARGVLTQTLGPWRRPVAYLSKKLDPVASGWPTCLKAIAAVALLLKDADKLTLGQNVLVIAPHNLESIVRQPPDRWMTNARMTHYQSLLLNERVSFAPPAILNPATLLPVESDDTPIHICSEILAEETGTRPDLRDQPLPGVPAWYTDGSSFIMDGRRQAGAAIVDNKRTVWASNLPEGTSAQKAELIALTQALRLAEGKSINIYTDSRYAFATAHVHGAIYKQRGWLTSAGKDIKNKEEILALLEAIHLPKRVAIIHCPGHQRGTDPVATGNRKADEAAKQAAQSTRILTETTKNAGKRTADGSEFEKRTADGSEFESPKKKAKVE

SEQ ID NO: 7287 - protein, 2218 aa, synthetic construct
MPAAKRVKLDGGDKKYSIGLDIGTNSVGWAVITDEYKVPSKKFKVLGNTDRHSIKKNLIGALLFDSGETAEATRLKRTARRRYTRRKNRICYLQEIFSNEMAKVDDSFFHRLEESFLVEEDKKHERHPIFGNIVDEVAYHEKYPTIYHLRKKLVDSTDKADLRLIYLALAHMIKFRGHFLIEGDLNPDNSDVDKLFIQLVQTYNQLFEENPINASGVDAKAILSARLSKSRRLENLIAQLPGEKKNGLFGNLIALSLGLTPNFKSNFDLAEDAKLQLSKDTYDDDLDNLLAQIGDQYADLFLAAKNLSDAILLSDILRVNTEITKAPLSASMIKRYDEHHQDLTLLKALVRQQLPEKYKEIFFDQSKNGYAGYIDGGASQEEFYKFIKPILEKMDGTEELLVKLNREDLLRKQRTFDNGSIPHQIHLGELHAILRRQEDFYPFLKDNREKIEKILTFRIPYYVGPLARGNSRFAWMTRKSEETITPWNFEEVVDKGASAQSFIERMTNFDKNLPNEKVLPKHSLLYEYFTVYNELTKVKYVTEGMRKPAFLSGEQKKAIVDLLFKTNRKVTVKQLKEDYFKKIECFDSVEISGVEDRFNASLGTYHDLLKIIKDKDFLDNEENEDILEDIVLTLTLFEDREMIEERLKTYAHLFDDKVMKQLKRRRYTGWGRLSRKLINGIRDKQSGKTILDFLKSDGFANRNFMQLIHDDSLTFKEDIQKAQVSGQGDSLHEHIANLAGSPAIKKGILQTVKVVDELVKVMGRHKPENIVIEMARENQTTQKGQKNSRERMKRIEEGIKELGSQILKEHPVENTQLQNEKLYLYYLQNGRDMYVDQELDINRLSDYDVDHIVPQSFLKDDSIDNKVLTRSDKARGKSDNVPSEEVVKKMKNYWRQLLNAKLITQRKFDNLTKAERGGLSELDKAGFIKRQLVETRQITKHVAQILDSRMNTKYDENDKLIREVKVITLKSKLVSDFRKDFQFYKVREINNYHHAHDAYLNAVVGTALIKKYPKLESEFVYGDYKVYDVRKMIAKSEQEIGKATAKYFFYSNIMNFFKTEITLANGEIRKRPLIETNGETGEIVWDKGRDFATVRKVLSMPQVNIVKKTEVQTGGFSKESILPKRNSDKLIARKKDWDPKKYGGFDSPTVAYSVLVVAKVEKGKSKKLKSVKELLGITIMERSSFEKNPIDFLEAKGYKEVKKDLIIKLPKYSLFELENGRKRMLASAGELQKGNELALPSKYVNFLYLASHYEKLKGSPEDNEQKQLFVEQHKHYLDEIIEQISEFSKRVILADANLDKVLSAYNKHRDKPIREQAENIIHLFTLTNLGAPAAFKYFDTTIDRKRYTSTKEVLDATLIHQSITGLYETRIDLSQLGGDGGGGGEAAAKGSSGGTLGDQGSRGSDPLPEPRVTLTVEGIPTEFLVNTGAEHSVLTKPMGKMGSKRTVVAGATGSKVYPWTTKRLLKIGQKQVTHSFLVIPECPAPLLGRDLLTKLKAQIQFSTEGPQVTWEDRPAMCLVLNLEEEYRLHEKPVPPSIDPSWLQLFPMVWAEKAGMGLANQVPPVVVELKSDASPVAVRQYPMSKEAREGIRPHIQRFLDLGILVPCQSPWNTPLLPVKKPGTNDYRPVQDLREVNKRVQDIHPTVPNPYNLLSSLPPSHTWYSVLDLKDAFFCLKLHPNSQPLFAFEWRDPEKGNTGQLTWTRLPQGFKNSPTLFNEALHRDLASFRALNPQVVMLQYVDDLLVAAPTYRDCKEGTRRLLQELSKLGYRVSAKKAQLCREEVTYLGYLLKGGKRWLTPARKATVMKIPTPTTPRQVREFLGTAGFCRLWIPGFASLAAPLYPLTRPKVPFTWTEAHQEAFGRIKEALLSAPALALPDLTKPFALYVDEKEGVARGVLTQTLGPWRRPVAYLSKKLDPVASGWPTCLKAIAAVALLLKDADKLTLGQNVLVIAPHNLESIVRQPPDRWMTNARMTHYQSLLLNERVSFAPPAILNPATLLPVESDDTPIHICSEILAEETGTRPDLRDQPLPGVPAWYTDGSSFIMDGRRQAGAAIVDNKRTVWASNLPEGTSAQKAELIALTQALRLAEGKSINIYTDSRYAFATAHVHGAIYKQRGWLTSAGKDIKNKEEILALLEAIHLPKRVAIIHCPGHQRGTDPVATGNRKADEAAKQAAQSTRILTETTKNAGKRTADGSEFEKRTADGSEFESPKKKAKVE

SEQ ID NO: 7288 - protein, 2096 aa, synthetic construct
MPAAKRVKLDGGDKKYSIGLDIGTNSVGWAVITDEYKVPSKKFKVLGNTDRHSIKKNLIGALLFDSGETAEATRLKRTARRRYTRRKNRICYLQEIFSNEMAKVDDSFFHRLEESFLVEEDKKHERHPIFGNIVDEVAYHEKYPTIYHLRKKLVDSTDKADLRLIYLALAHMIKFRGHFLIEGDLNPDNSDVDKLFIQLVQTYNQLFEENPINASGVDAKAILSARLSKSRRLENLIAQLPGEKKNGLFGNLIALSLGLTPNFKSNFDLAEDAKLQLSKDTYDDDLDNLLAQIGDQYADLFLAAKNLSDAILLSDILRVNTEITKAPLSASMIKRYDEHHQDLTLLKALVRQQLPEKYKEIFFDQSKNGYAGYIDGGASQEEFYKFIKPILEKMDGTEELLVKLNREDLLRKQRTFDNGSIPHQIHLGELHAILRRQEDFYPFLKDNREKIEKILTFRIPYYVGPLARGNSRFAWMTRKSEETITPWNFEEVVDKGASAQSFIERMTNFDKNLPNEKVLPKHSLLYEYFTVYNELTKVKYVTEGMRKPAFLSGEQKKAIVDLLFKTNRKVTVKQLKEDYFKKIECFDSVEISGVEDRFNASLGTYHDLLKIIKDKDFLDNEENEDILEDIVLTLTLFEDREMIEERLKTYAHLFDDKVMKQLKRRRYTGWGRLSRKLINGIRDKQSGKTILDFLKSDGFANRNFMQLIHDDSLTFKEDIQKAQVSGQGDSLHEHIANLAGSPAIKKGILQTVKVVDELVKVMGRHKPENIVIEMARENQTTQKGQKNSRERMKRIEEGIKELGSQILKEHPVENTQLQNEKLYLYYLQNGRDMYVDQELDINRLSDYDVDHIVPQSFLKDDSIDNKVLTRSDKARGKSDNVPSEEVVKKMKNYWRQLLNAKLITQRKFDNLTKAERGGLSELDKAGFIKRQLVETRQITKHVAQILDSRMNTKYDENDKLIREVKVITLKSKLVSDFRKDFQFYKVREINNYHHAHDAYLNAVVGTALIKKYPKLESEFVYGDYKVYDVRKMIAKSEQEIGKATAKYFFYSNIMNFFKTEITLANGEIRKRPLIETNGETGEIVWDKGRDFATVRKVLSMPQVNIVKKTEVQTGGFSKESILPKRNSDKLIARKKDWDPKKYGGFDSPTVAYSVLVVAKVEKGKSKKLKSVKELLGITIMERSSFEKNPIDFLEAKGYKEVKKDLIIKLPKYSLFELENGRKRMLASAGELQKGNELALPSKYVNFLYLASHYEKLKGSPEDNEQKQLFVEQHKHYLDEIIEQISEFSKRVILADANLDKVLSAYNKHRDKPIREQAENIIHLFTLTNLGAPAAFKYFDTTIDRKRYTSTKEVLDATLIHQSITGLYETRIDLSQLGGDGGGGGEAAAKGSSGGTLNLEDEYRLYETSAEPEVSPGSTWLSDFPQAWAETGGMGLAVRQAPLIIPLKATSTPVSIKQYPMSQEAKLGIKPHIQRLLDQGILVPCQSPWNTPLLPVKKPGTNDYRPVQDLREVNKRVEDIHPTVPNPYNLLSGLPPSHRWYTVLDLKDAFFCLRLHPTSQPLFAFEWRDPGMGISGQLTWTRLPQGFKNSPTLFNEALHRDLADFRIQHPDLILLQYVDDILLAATSELDCQQGTRALLLTLGNLGYRASAKKAQLCQKQVKYLGYLLKEGQRWLTEARKETVMGQPTPKTPRQLREFLGTAGFCRLWIPGFAEMAAPLYPLTKPGTLFNWGPDQQKAYQEIKQALLTAPALGLPDLTKPFELFVDEKQGYAKGVLTQKLGPWRRPVAYLSKKLDPVAAGWPPCLRMVAAIAVLRKDAGKLTMGQPLVILAPHAVEALVKQPPDRWLSNARMTHYQAMLLDTDRVQFGPVVALNPATLLPLPEEGAPHDCLEILAETHGTRPDLTDQPIPDADHTWYTDGSSFLQEGQRKAGAAVTTETEVIWARALPAGTSAQRAELIALTQALKMAEGKRLNVYTDSRYAFATAHIHGEIYRRRGWLTSEGREIKNKSEILALLKALFLPKRLSIIHCLGHQKGDSAEARGNRLADQAAREAAIKTPPDTSTLLAGKRTADGSEFEKRTADGSEFESPKKKAKVE

SEQ ID NO: 7289 - protein, 2096 aa, synthetic construct
MPAAKRVKLDGGDKKYSIGLDIGTNSVGWAVITDEYKVPSKKFKVLGNTDRHSIKKNLIGALLFDSGETAEATRLKRTARRRYTRRKNRICYLQEIFSNEMAKVDDSFFHRLEESFLVEEDKKHERHPIFGNIVDEVAYHEKYPTIYHLRKKLVDSTDKADLRLIYLALAHMIKFRGHFLIEGDLNPDNSDVDKLFIQLVQTYNQLFEENPINASGVDAKAILSARLSKSRRLENLIAQLPGEKKNGLFGNLIALSLGLTPNFKSNFDLAEDAKLQLSKDTYDDDLDNLLAQIGDQYADLFLAAKNLSDAILLSDILRVNTEITKAPLSASMIKRYDEHHQDLTLLKALVRQQLPEKYKEIFFDQSKNGYAGYIDGGASQEEFYKFIKPILEKMDGTEELLVKLNREDLLRKQRTFDNGSIPHQIHLGELHAILRRQEDFYPFLKDNREKIEKILTFRIPYYVGPLARGNSRFAWMTRKSEETITPWNFEEVVDKGASAQSFIERMTNFDKNLPNEKVLPKHSLLYEYFTVYNELTKVKYVTEGMRKPAFLSGEQKKAIVDLLFKTNRKVTVKQLKEDYFKKIECFDSVEISGVEDRFNASLGTYHDLLKIIKDKDFLDNEENEDILEDIVLTLTLFEDREMIEERLKTYAHLFDDKVMKQLKRRRYTGWGRLSRKLINGIRDKQSGKTILDFLKSDGFANRNFMQLIHDDSLTFKEDIQKAQVSGQGDSLHEHIANLAGSPAIKKGILQTVKVVDELVKVMGRHKPENIVIEMARENQTTQKGQKNSRERMKRIEEGIKELGSQILKEHPVENTQLQNEKLYLYYLQNGRDMYVDQELDINRLSDYDVDHIVPQSFLKDDSIDNKVLTRSDKARGKSDNVPSEEVVKKMKNYWRQLLNAKLITQRKFDNLTKAERGGLSELDKAGFIKRQLVETRQITKHVAQILDSRMNTKYDENDKLIREVKVITLKSKLVSDFRKDFQFYKVREINNYHHAHDAYLNAVVGTALIKKYPKLESEFVYGDYKVYDVRKMIAKSEQEIGKATAKYFFYSNIMNFFKTEITLANGEIRKRPLIETNGETGEIVWDKGRDFATVRKVLSMPQVNIVKKTEVQTGGFSKESILPKRNSDKLIARKKDWDPKKYGGFDSPTVAYSVLVVAKVEKGKSKKLKSVKELLGITIMERSSFEKNPIDFLEAKGYKEVKKDLIIKLPKYSLFELENGRKRMLASAGELQKGNELALPSKYVNFLYLASHYEKLKGSPEDNEQKQLFVEQHKHYLDEIIEQISEFSKRVILADANLDKVLSAYNKHRDKPIREQAENIIHLFTLTNLGAPAAFKYFDTTIDRKRYTSTKEVLDATLIHQSITGLYETRIDLSQLGGDGGGGGEAAAKGSSGGTLGIEDEYRLHETSTEPDVSLGSTWLSDFPQAWAETGGMGLAVRQAPLIIPLKATSTPVSIQQYPMSHEARLGIKPHIQRLLDQGILVPCQSPWNTPLLPVKKPGTNDYRPVQDLREVNKRVEDIHPTVPNPYNLLSGLPPSHQWYTVLDLKDAFFCLRLHPTSQPLFAFEWRDPGMGISGQLTWTRLPQGFKNSPTLFDEALHRDLADFRIQHPDLILLQYVDDILLAATSELDCQQGTRALLQTLGDLGYRASAKKAQICQKQVKYLGYLLREGQRWLTEARKETVMGQPVPKTPRQLREFLGTAGFCRLWIPGFAEMAAPLYPLTKTGTLFSWGPDQQKAYQEIKQALLTAPALGLPDLTKPFELFVDEKQGYAKGVLTQKLGPWRRPVAYLSKKLDPVAAGWPPCLRMVAAIAVLTKDAGKLTMGQPLVILAPHAVEALVKQPPDRWLSNARMTHYQAMLLDTDRVQFGPVVALNPATLLPLPEEGAPHDCLEILAETHGTRPDLTDQPIPDADHTWYTDGSSFLQEGQRKAGAAVTTETEVIWAGALPAGTSAQRAELIALTQALKMAEGKRLNVYTDSRYAFATAHIHGEIYRRRGLLTSEGREIKNKSEILALLKALFLPKRLSIIHCLGHQKGDSAEARGNRLADQAAREAAIKTPPDTSTLLAGKRTADGSEFEKRTADGSEFESPKKKAKVE

SEQ ID NO: 7290 - protein, 2096 aa, synthetic construct
MPAAKRVKLDGGDKKYSIGLDIGTNSVGWAVITDEYKVPSKKFKVLGNTDRHSIKKNLIGALLFDSGETAEATRLKRTARRRYTRRKNRICYLQEIFSNEMAKVDDSFFHRLEESFLVEEDKKHERHPIFGNIVDEVAYHEKYPTIYHLRKKLVDSTDKADLRLIYLALAHMIKFRGHFLIEGDLNPDNSDVDKLFIQLVQTYNQLFEENPINASGVDAKAILSARLSKSRRLENLIAQLPGEKKNGLFGNLIALSLGLTPNFKSNFDLAEDAKLQLSKDTYDDDLDNLLAQIGDQYADLFLAAKNLSDAILLSDILRVNTEITKAPLSASMIKRYDEHHQDLTLLKALVRQQLPEKYKEIFFDQSKNGYAGYIDGGASQEEFYKFIKPILEKMDGTEELLVKLNREDLLRKQRTFDNGSIPHQIHLGELHAILRRQEDFYPFLKDNREKIEKILTFRIPYYVGPLARGNSRFAWMTRKSEETITPWNFEEVVDKGASAQSFIERMTNFDKNLPNEKVLPKHSLLYEYFTVYNELTKVKYVTEGMRKPAFLSGEQKKAIVDLLFKTNRKVTVKQLKEDYFKKIECFDSVEISGVEDRFNASLGTYHDLLKIIKDKDFLDNEENEDILEDIVLTLTLFEDREMIEERLKTYAHLFDDKVMKQLKRRRYTGWGRLSRKLINGIRDKQSGKTILDFLKSDGFANRNFMQLIHDDSLTFKEDIQKAQVSGQGDSLHEHIANLAGSPAIKKGILQTVKVVDELVKVMGRHKPENIVIEMARENQTTQKGQKNSRERMKRIEEGIKELGSQILKEHPVENTQLQNEKLYLYYLQNGRDMYVDQELDINRLSDYDVDHIVPQSFLKDDSIDNKVLTRSDKARGKSDNVPSEEVVKKMKNYWRQLLNAKLITQRKFDNLTKAERGGLSELDKAGFIKRQLVETRQITKHVAQILDSRMNTKYDENDKLIREVKVITLKSKLVSDFRKDFQFYKVREINNYHHAHDAYLNAVVGTALIKKYPKLESEFVYGDYKVYDVRKMIAKSEQEIGKATAKYFFYSNIMNFFKTEITLANGEIRKRPLIETNGETGEIVWDKGRDFATVRKVLSMPQVNIVKKTEVQTGGFSKESILPKRNSDKLIARKKDWDPKKYGGFDSPTVAYSVLVVAKVEKGKSKKLKSVKELLGITIMERSSFEKNPIDFLEAKGYKEVKKDLIIKLPKYSLFELENGRKRMLASAGELQKGNELALPSKYVNFLYLASHYEKLKGSPEDNEQKQLFVEQHKHYLDEIIEQISEFSKRVILADANLDKVLSAYNKHRDKPIREQAENIIHLFTLTNLGAPAAFKYFDTTIDRKRYTSTKEVLDATLIHQSITGLYETRIDLSQLGGDGGGGGEAAAKGSSGGTLGIEDEYRLHETSTEPDVSLGSTWLSDFPQAWAETGGMGLAVRQAPLIIPLKATSTPVSIQQYPMSHEARLGIKPHIQRLLDQGILVPCQSPWNTPLLPVKKPGTNDYRPVQDLREVNKRVEDIHPTVPNPYNLLSGLPPSHQWYTVLDLKDAFFCLRLHPTSQPLFAFEWRDPGMGISGQLTWTRLPQGFKNSPTLFNEALHRDLADFRIQHPDLILLQYVDDILLAATSELDCQQGTRALLQTLGDLGYRASAKKAQICQKQVKYLGYLLREGQRWLTEARKETVMGQPVPKTPRQLREFLGTAGFCRLWIPGFAEMAAPLYPLTKPGTLFSWGPDQQKAYQEIKQALLTAPALGLPDLTKPFELFVDEKQGYAKGVLTQKLGPWRRPVAYLSKKLDPVAAGWPPCLRMVAAIAVLTKDAGKLTMGQPLVILAPHAVEALVKQPPDRWLSNARMTHYQAMLLDTDRVQFGPVVALNPATLLPLPEEGAPHDCLEILAETHGTRPDLTDQPIPDADHTWYTDGSSFLQEGQRKAGAAVTTETEVIWAGALPAGTSAQRAELIALTQALKMAEGKRLNVYTDSRYAFATAHIHGEIYRRRGWLTSEGREIKNKSEILALLKALFLPKRLSIIHCLGHQKGDSAEARGNRLADQAAREAAIKTPPDTSTLLAGKRTADGSEFEKRTADGSEFESPKKKAKVE

SEQ ID NO: 7291 - protein, 2096 aa, synthetic construct
MPAAKRVKLDGGDKKYSIGLDIGTNSVGWAVITDEYKVPSKKFKVLGNTDRHSIKKNLIGALLFDSGETAEATRLKRTARRRYTRRKNRICYLQEIFSNEMAKVDDSFFHRLEESFLVEEDKKHERHPIFGNIVDEVAYHEKYPTIYHLRKKLVDSTDKADLRLIYLALAHMIKFRGHFLIEGDLNPDNSDVDKLFIQLVQTYNQLFEENPINASGVDAKAILSARLSKSRRLENLIAQLPGEKKNGLFGNLIALSLGLTPNFKSNFDLAEDAKLQLSKDTYDDDLDNLLAQIGDQYADLFLAAKNLSDAILLSDILRVNTEITKAPLSASMIKRYDEHHQDLTLLKALVRQQLPEKYKEIFFDQSKNGYAGYIDGGASQEEFYKFIKPILEKMDGTEELLVKLNREDLLRKQRTFDNGSIPHQIHLGELHAILRRQEDFYPFLKDNREKIEKILTFRIPYYVGPLARGNSRFAWMTRKSEETITPWNFEEVVDKGASAQSFIERMTNFDKNLPNEKVLPKHSLLYEYFTVYNELTKVKYVTEGMRKPAFLSGEQKKAIVDLLFKTNRKVTVKQLKEDYFKKIECFDSVEISGVEDRFNASLGTYHDLLKIIKDKDFLDNEENEDILEDIVLTLTLFEDREMIEERLKTYAHLFDDKVMKQLKRRRYTGWGRLSRKLINGIRDKQSGKTILDFLKSDGFANRNFMQLIHDDSLTFKEDIQKAQVSGQGDSLHEHIANLAGSPAIKKGILQTVKVVDELVKVMGRHKPENIVIEMARENQTTQKGQKNSRERMKRIEEGIKELGSQILKEHPVENTQLQNEKLYLYYLQNGRDMYVDQELDINRLSDYDVDHIVPQSFLKDDSIDNKVLTRSDKARGKSDNVPSEEVVKKMKNYWRQLLNAKLITQRKFDNLTKAERGGLSELDKAGFIKRQLVETRQITKHVAQILDSRMNTKYDENDKLIREVKVITLKSKLVSDFRKDFQFYKVREINNYHHAHDAYLNAVVGTALIKKYPKLESEFVYGDYKVYDVRKMIAKSEQEIGKATAKYFFYSNIMNFFKTEITLANGEIRKRPLIETNGETGEIVWDKGRDFATVRKVLSMPQVNIVKKTEVQTGGFSKESILPKRNSDKLIARKKDWDPKKYGGFDSPTVAYSVLVVAKVEKGKSKKLKSVKELLGITIMERSSFEKNPIDFLEAKGYKEVKKDLIIKLPKYSLFELENGRKRMLASAGELQKGNELALPSKYVNFLYLASHYEKLKGSPEDNEQKQLFVEQHKHYLDEIIEQISEFSKRVILADANLDKVLSAYNKHRDKPIREQAENIIHLFTLTNLGAPAAFKYFDTTIDRKRYTSTKEVLDATLIHQSITGLYETRIDLSQLGGDGGGGGEAAAKGSSGGTLNIEDEYRLHETSKEPDVSLGSTWLSDFPQAWAETGGMGLAVRQAPLIIPLKATSTPVSIKQYPMSQEARLGIKPHIQRLLDQGILVPCQSPWNTPLLPVKKPGTNDYRPVQDLREVNKRVEDIHPTVPNPYNLLSGLPPSHQWYTVLDLKDAFFCLRLHPTSQPLFAFEWRDPEMGISGQLTWTRLPQGFKNSPTLFNEALHRDLAGFRIQHPDLILLQYVDDLLLAATSELDCQQGTRALLQTLGDLGYRASAKKAQICQKQVKYLGYLLKEGQRWLTEARKETVMGQPIPKTPRQLREFLGTAGFCRLWIPGFAEMAAPLYPLTKPGTLFNWGPDQQKAFQEIKQALLTAPALGLPDLTKPFELFVDEKQGYAKGVLTQKLGPWRRPVAYLSKKLDPVAAGWPPCLRMVAAIAVLTKDAGKLTMGQPLVILAPHAVEALVKQPPDRWLSNARMTHYQALLLDTDRVQFGPVVALNPATLLPLPEEGLQHDCLDILAEAHGTRSDLMDQPLPDADHTWYTDGSSFLQEGQRKAGAAVTTETEVIWARALPAGTSAQRAELIALTQALKMAEGKKLNVYTDSRYAFATAHIHGEIYRRRGWLTSEGKEIKNKDEILALLKALFLPKRLSIIHCPGHQKGNSAEARGNRMADQAAREVATRETPETSTLLAGKRTADGSEFEKRTADGSEFESPKKKAKVE

SEQ ID NO: 7292 - protein, 2096 aa, synthetic construct
MPAAKRVKLDGGDKKYSIGLDIGTNSVGWAVITDEYKVPSKKFKVLGNTDRHSIKKNLIGALLFDSGETAEATRLKRTARRRYTRRKNRICYLQEIFSNEMAKVDDSFFHRLEESFLVEEDKKHERHPIFGNIVDEVAYHEKYPTIYHLRKKLVDSTDKADLRLIYLALAHMIKFRGHFLIEGDLNPDNSDVDKLFIQLVQTYNQLFEENPINASGVDAKAILSARLSKSRRLENLIAQLPGEKKNGLFGNLIALSLGLTPNFKSNFDLAEDAKLQLSKDTYDDDLDNLLAQIGDQYADLFLAAKNLSDAILLSDILRVNTEITKAPLSASMIKRYDEHHQDLTLLKALVRQQLPEKYKEIFFDQSKNGYAGYIDGGASQEEFYKFIKPILEKMDGTEELLVKLNREDLLRKQRTFDNGSIPHQIHLGELHAILRRQEDFYPFLKDNREKIEKILTFRIPYYVGPLARGNSRFAWMTRKSEETITPWNFEEVVDKGASAQSFIERMTNFDKNLPNEKVLPKHSLLYEYFTVYNELTKVKYVTEGMRKPAFLSGEQKKAIVDLLFKTNRKVTVKQLKEDYFKKIECFDSVEISGVEDRFNASLGTYHDLLKIIKDKDFLDNEENEDILEDIVLTLTLFEDREMIEERLKTYAHLFDDKVMKQLKRRRYTGWGRLSRKLINGIRDKQSGKTILDFLKSDGFANRNFMQLIHDDSLTFKEDIQKAQVSGQGDSLHEHIANLAGSPAIKKGILQTVKVVDELVKVMGRHKPENIVIEMARENQTTQKGQKNSRERMKRIEEGIKELGSQILKEHPVENTQLQNEKLYLYYLQNGRDMYVDQELDINRLSDYDVDHIVPQSFLKDDSIDNKVLTRSDKARGKSDNVPSEEVVKKMKNYWRQLLNAKLITQRKFDNLTKAERGGLSELDKAGFIKRQLVETRQITKHVAQILDSRMNTKYDENDKLIREVKVITLKSKLVSDFRKDFQFYKVREINNYHHAHDAYLNAVVGTALIKKYPKLESEFVYGDYKVYDVRKMIAKSEQEIGKATAKYFFYSNIMNFFKTEITLANGEIRKRPLIETNGETGEIVWDKGRDFATVRKVLSMPQVNIVKKTEVQTGGFSKESILPKRNSDKLIARKKDWDPKKYGGFDSPTVAYSVLVVAKVEKGKSKKLKSVKELLGITIMERSSFEKNPIDFLEAKGYKEVKKDLIIKLPKYSLFELENGRKRMLASAGELQKGNELALPSKYVNFLYLASHYEKLKGSPEDNEQKQLFVEQHKHYLDEIIEQISEFSKRVILADANLDKVLSAYNKHRDKPIREQAENIIHLFTLTNLGAPAAFKYFDTTIDRKRYTSTKEVLDATLIHQSITGLYETRIDLSQLGGDGGGGGEAAAKGSSGGTLNIEDEYRLHETSKGPDVPLGSTWLSDFPQAWAETGGMGLAVRQAPLIIPLKATSTPVSIKQYPMSQEARLGIKPHIQRLLDQGILVPCQSPWNTPLLPVKKPGTNDYRPVQDLREVNKRVEDIHPTVPNPYNLLSGLPPSHQWYTVLDLKDAFFCLRLHPTSQSLFAFEWRDPEMGISGQLTWTRLPQGFKNSPTLFNEALHRDLADFRIQHPDLILLQYVDDLLLAATSELDCQQGTRALLQTLGDLGYRASAKKAQICQKQVKYLGYLLKEGQRWLTEARKETVMGQPTPKTPRQLREFLGTAGFCRLWIPGFAEMAAPLYPLTKPGTLFEWGPDQQKAYQEIKQALLTAPALGLPDLTKPFELFVDEKQGYAKGVLTQKLGPWRRPVAYLSKKLDPVAAGWPPCLRMVAAIAVLTKDAGKLTMGQPLVILAPHAVEALVKQPPDRWLSNARMTHYQALLLDTDRVQFGPIVALNPATLLPLPEEGLQHDCLDILAEAHGTRPDLTDQPLPDADHTWYTDGSSFLQEGQRKAGAAVTTETEVVWAKALPAGTSAQRAELIALTQALKMAEGKKLNVYTDSRYAFATAHIHGEIYRRRGWLTSEGKEIKNKDEILALLKALFLPKRLSIIHCPGHQKGNRAEARGNRMADQAAREVATRETPETSTLLAGKRTADGSEFEKRTADGSEFESPKKKAKVE

SEQ ID NO: 7293 - protein, 2096 aa, synthetic construct; identical to SEQ ID NO: 4530

SEQ ID NO: 7294 - protein, 2096 aa, synthetic construct
MPAAKRVKLDGGDKKYSIGLDIGTNSVGWAVITDEYKVPSKKFKVLGNTDRHSIKKNLIGALLFDSGETAEATRLKRTARRRYTRRKNRICYLQEIFSNEMAKVDDSFFHRLEESFLVEEDKKHERHPIFGNIVDEVAYHEKYPTIYHLRKKLVDSTDKADLRLIYLALAHMIKFRGHFLIEGDLNPDNSDVDKLFIQLVQTYNQLFEENPINASGVDAKAILSARLSKSRRLENLIAQLPGEKKNGLFGNLIALSLGLTPNFKSNFDLAEDAKLQLSKDTYDDDLDNLLAQIGDQYADLFLAAKNLSDAILLSDILRVNTEITKAPLSASMIKRYDEHHQDLTLLKALVRQQLPEKYKEIFFDQSKNGYAGYIDGGASQEEFYKFIKPILEKMDGTEELLVKLNREDLLRKQRTFDNGSIPHQIHLGELHAILRRQEDFYPFLKDNREKIEKILTFRIPYYVGPLARGNSRFAWMTRKSEETITPWNFEEVVDKGASAQSFIERMTNFDKNLPNEKVLPKHSLLYEYFTVYNELTKVKYVTEGMRKPAFLSGEQKKAIVDLLFKTNRKVTVKQLKEDYFKKIECFDSVEISGVEDRFNASLGTYHDLLKIIKDKDFLDNEENEDILEDIVLTLTLFEDREMIEERLKTYAHLFDDKVMKQLKRRRYTGWGRLSRKLINGIRDKQSGKTILDFLKSDGFANRNFMQLIHDDSLTFKEDIQKAQVSGQGDSLHEHIANLAGSPAIKKGILQTVKVVDELVKVMGRHKPENIVIEMARENQTTQKGQKNSRERMKRIEEGIKELGSQILKEHPVENTQLQNEKLYLYYLQNGRDMYVDQELDINRLSDYDVDHIVPQSFLKDDSIDNKVLTRSDKARGKSDNVPSEEVVKKMKNYWRQLLNAKLITQRKFDNLTKAERGGLSELDKAGFIKRQLVETRQITKHVAQILDSRMNTKYDENDKLIREVKVITLKSKLVSDFRKDFQFYKVREINNYHHAHDAYLNAVVGTALIKKYPKLESEFVYGDYKVYDVRKMIAKSEQEIGKATAKYFFYSNIMNFFKTEITLANGEIRKRPLIETNGETGEIVWDKGRDFATVRKVLSMPQVNIVKKTEVQTGGFSKESILPKRNSDKLIARKKDWDPKKYGGFDSPTVAYSVLVVAKVEKGKSKKLKSVKELLGITIMERSSFEKNPIDFLEAKGYKEVKKDLIIKLPKYSLFELENGRKRMLASAGELQKGNELALPSKYVNFLYLASHYEKLKGSPEDNEQKQLFVEQHKHYLDEIIEQISEFSKRVILADANLDKVLSAYNKHRDKPIREQAENIIHLFTLTNLGAPAAFKYFDTTIDRKRYTSTKEVLDATLIHQSITGLYETRIDLSQLGGDGGGGGEAAAKGSSGGTLNIEDEHRLHETSKEPDVSLGSTWLSDFPQAWAETGGMGLAVRQAPLIIPLKATSTPVSIKQYPMSQEARLGIKPHIQRLLDQGILVPCQSPWNTPLLPVKKPGTNDYRPVQDLREVNKRVEDIHPTVPNPYNLLSGLPPSHQWYTVLDLKDAFFCLRLHPTSQPLFAFEWRDPEMGISGQLTWTRLPQGFKNSPTLFDEALHRDLADFRIQHPDLILLQYVDDLLLAATSELDCQQGTRALLQTLGNLGYRASAKKAQICQKQVKYLGYLLKEGQRWLTEARKETVMGQPTPKTPRQLREFLGTAGFCRLWIPGFAEMAAPLYPLTKTGTLFNWGPDQQKAYQEIKQALLTAPALGLPDLTKPFELFVDEKQGYAKGVLTQKLGPWRRPVAYLSKKLDPVAAGWPPCLRMVAAIAVLTKDAGKLTMGQPLVILAPHAVEALVKQPPDRWLSNARMTHYQALLLDTDRVQFGPVVALNPATLLPLPEEGLQHNCLDILAEAHGTRPDLTDQPLPDADHTWYTDGSSLLQEGQRKAGAAVTTETEVIWAKALPAGTSAQRAELIALTQALKMAEGKKLNVYTDSRYAFATAHIHGEIYRRRGLLTSEGKEIKNKDEILALLKALFLPKRLSIIHCPGHQKGHSAEARGNRMADQAARKAAITETPDTSTLLAGKRTADGSEFEKRTADGSEFESPKKKAKVE

SEQ ID NO: 7295 - protein, 2096 aa, synthetic construct; identical to SEQ ID NO: 4530

SEQ ID NO: 7296 - protein, 2090 aa, synthetic construct
MPAAKRVKLDGGDKKYSIGLDIGTNSVGWAVITDEYKVPSKKFKVLGNTDRHSIKKNLIGALLFDSGETAEATRLKRTARRRYTRRKNRICYLQEIFSNEMAKVDDSFFHRLEESFLVEEDKKHERHPIFGNIVDEVAYHEKYPTIYHLRKKLVDSTDKADLRLIYLALAHMIKFRGHFLIEGDLNPDNSDVDKLFIQLVQTYNQLFEENPINASGVDAKAILSARLSKSRRLENLIAQLPGEKKNGLFGNLIALSLGLTPNFKSNFDLAEDAKLQLSKDTYDDDLDNLLAQIGDQYADLFLAAKNLSDAILLSDILRVNTEITKAPLSASMIKRYDEHHQDLTLLKALVRQQLPEKYKEIFFDQSKNGYAGYIDGGASQEEFYKFIKPILEKMDGTEELLVKLNREDLLRKQRTFDNGSIPHQIHLGELHAILRRQEDFYPFLKDNREKIEKILTFRIPYYVGPLARGNSRFAWMTRKSEETITPWNFEEVVDKGASAQSFIERMTNFDKNLPNEKVLPKHSLLYEYFTVYNELTKVKYVTEGMRKPAFLSGEQKKAIVDLLFKTNRKVTVKQLKEDYFKKIECFDSVEISGVEDRFNASLGTYHDLLKIIKDKDFLDNEENEDILEDIVLTLTLFEDREMIEERLKTYAHLFDDKVMKQLKRRRYTGWGRLSRKLINGIRDKQSGKTILDFLKSDGFANRNFMQLIHDDSLTFKEDIQKAQVSGQGDSLHEHIANLAGSPAIKKGILQTVKVVDELVKVMGRHKPENIVIEMARENQTTQKGQKNSRERMKRIEEGIKELGSQILKEHPVENTQLQNEKLYLYYLQNGRDMYVDQELDINRLSDYDVDHIVPQSFLKDDSIDNKVLTRSDKARGKSDNVPSEEVVKKMKNYWRQLLNAKLITQRKFDNLTKAERGGLSELDKAGFIKRQLVETRQITKHVAQILDSRMNTKYDENDKLIREVKVITLKSKLVSDFRKDFQFYKVREINNYHHAHDAYLNAVVGTALIKKYPKLESEFVYGDYKVYDVRKMIAKSEQEIGKATAKYFFYSNIMNFFKTEITLANGEIRKRPLIETNGETGEIVWDKGRDFATVRKVLSMPQVNIVKKTEVQTGGFSKESILPKRNSDKLIARKKDWDPKKYGGFDSPTVAYSVLVVAKVEKGKSKKLKSVKELLGITIMERSSFEKNPIDFLEAKGYKEVKKDLIIKLPKYSLFELENGRKRMLASAGELQKGNELALPSKYVNFLYLASHYEKLKGSPEDNEQKQLFVEQHKHYLDEIIEQISEFSKRVILADANLDKVLSAYNKHRDKPIREQAENIIHLFTLTNLGAPAAFKYFDTTIDRKRYTSTKEVLDATLIHQSITGLYETRIDLSQLGGDGGGGGEAAAKGSSGGTLQLDDEYRLYSPLVKPDQNIQFWLEQFPQAWAETAGMGLAKQVPPQVIQLKASATPVSVRQYPLSKEAQEGIRPHVQRLIQQGILVPVQSPWNTPLLPVRKPGTNDYRPVQDLREVNKRVQDIHPTVPNPYNLLCALPPQRSWYTVLDLKDAFFCLRLHPTSQPLFAFEWRDPGTGRTGQLTWTRLPQGFKNSPTIFDEALHRDLANFRIQHPQVTLLQYVDDLLLAGATKQDCLEGTKALLLELSDLGYRASAKKAQICRREVTYLGYSLRDGQRWLTEARKKTVVQIPAPTTAKQVREFLGTAGFCRLWIPGFATLAAPLYPLTKEKGEFSWAPEHQKAFDAIKKALLSAPALALPDVTKPFTLYVDERKGVARGVLTQTLGPWRRPVAYLSKKLDPVASGWPVCLKAIAAVAILVKDADKLTLGQNITVIAPHALENIVRQPPDRWMTNARMTHYQSLLLTERVTFAPPAALNPATLLPEETDEPVTHDCHQLLIEETGVRKDLTDIPLTGEVLTWFTDGSSYVVEGKRMAGAAVVDGTRTIWASSLPEGTSAQKAELMALTQALRLAEGKSINIYTDSRYAFATAHVHGAIYKQRGLLTSAGREIKNKEEILSLLEALHLPKRLAIIHCPGHQKAKDPISRGNQMADRVAKQAAQGVNLLAGKRTADGSEFEKRTADGSEFESPKKKAKVE

SEQ ID NO: 7297 - protein, 2176 aa, synthetic construct
MPAAKRVKLDGGDKKYSIGLDIGTNSVGWAVITDEYKVPSKKFKVLGNTDRHSIKKNLIGALLFDSGETAEATRLKRTARRRYTRRKNRICYLQEIFSNEMAKVDDSFFHRLEESFLVEEDKKHERHPIFGNIVDEVAYHEKYPTIYHLRKKLVDSTDKADLRLIYLALAHMIKFRGHFLIEGDLNPDNSDVDKLFIQLVQTYNQLFEENPINASGVDAKAILSARLSKSRRLENLIAQLPGEKKNGLFGNLIALSLGLTPNFKSNFDLAEDAKLQLSKDTYDDDLDNLLAQIGDQYADLFLAAKNLSDAILLSDILRVNTEITKAPLSASMIKRYDEHHQDLTLLKALVRQQLPEKYKEIFFDQSKNGYAGYIDGGASQEEFYKFIKPILEKMDGTEELLVKLNREDLLRKQRTFDNGSIPHQIHLGELHAILRRQEDFYPFLKDNREKIEKILTFRIPYYVGPLARGNSRFAWMTRKSEETITPWNFEEVVDKGASAQSFIERMTNFDKNLPNEKVLPKHSLLYEYFTVYNELTKVKYVTEGMRKPAFLSGEQKKAIVDLLFKTNRKVTVKQLKEDYFKKIECFDSVEISGVEDRFNASLGTYHDLLKIIKDKDFLDNEENEDILEDIVLTLTLFEDREMIEERLKTYAHLFDDKVMKQLKRRRYTGWGRLSRKLINGIRDKQSGKTILDFLKSDGFANRNFMQLIHDDSLTFKEDIQKAQVSGQGDSLHEHIANLAGSPAIKKGILQTVKVVDELVKVMGRHKPENIVIEMARENQTTQKGQKNSRERMKRIEEGIKELGSQILKEHPVENTQLQNEKLYLYYLQNGRDMYVDQELDINRLSDYDVDHIVPQSFLKDDSIDNKVLTRSDKARGKSDNVPSEEVVKKMKNYWRQLLNAKLITQRKFDNLTKAERGGLSELDKAGFIKRQLVETRQITKHVAQILDSRMNTKYDENDKLIREVKVITLKSKLVSDFRKDFQFYKVREINNYHHAHDAYLNAVVGTALIKKYPKLESEFVYGDYKVYDVRKMIAKSEQEIGKATAKYFFYSNIMNFFKTEITLANGEIRKRPLIETNGETGEIVWDKGRDFATVRKVLSMPQVNIVKKTEVQTGGFSKESILPKRNSDKLIARKKDWDPKKYGGFDSPTVAYSVLVVAKVEKGKSKKLKSVKELLGITIMERSSFEKNPIDFLEAKGYKEVKKDLIIKLPKYSLFELENGRKRMLASAGELQKGNELALPSKYVNFLYLASHYEKLKGSPEDNEQKQLFVEQHKHYLDEIIEQISEFSKRVILADANLDKVLSAYNKHRDKPIREQAENIIHLFTLTNLGAPAAFKYFDTTIDRKRYTSTKEVLDATLIHQSITGLYETRIDLSQLGGDGGGGGEAAAKGSSGGMNPLQLLQPLPAEVKGTKLLAHWNSGATITCIPESFLEDEQPIKQTLIKTIHGEKQQNVYYLTFKVKGRKVEAEVIASPYEYILLSPTDVPWLTQQPLQLTILVPLQEYQDRILNKTALPEEQKQQLKALFTKYDNLWQHWENQVGHRKIRPHNIATGDYPPRPQKQYPINPKAKPSIQIVIDDLLKQGVLTPQNSTMNTPVYPVPKPDGRWRMVLDYREVNKTIPLTAAQNQHSAGILATIVRQKYKTTLDLANGFWAHPITPDSYWLTAFTWQGKQYCWTRLPQGFLNSPALFTADAVDLLKEVPNVQVYVDDIYLSHDNPHEHIQQLEKVFQILLQAGYVVSLKKSEIGQRTVEFLGFNITKEGRGLTDTFKTKLLNVTPPKDLKQLQSILGLLNFARNFIPNFAELVQTLYNLIASSKGKYIEWTEDNTKQLNKVIEALNTASNLEERLPDQRLVIKVNTSPSAGYVRYYNESGKKPIMYLNYVFSKAELKFSMLEKLLTTMHKALIKAMDLAMGQEILVYSPIVSMTKIQKTPLPERKALPIRWITWMTYLEDPRIQFHYDKTLPELKHIPDVYTSSIPPLKHPSQYEGVFCTDGSAIKSPDPTKSNNAGMGIVHAIYNPEYKILNQWSIPLGHHTAQMAEIAAVEFACKKALKVPGPVLVITDSFYVAESANKELPYWKSNGFVNNKKEPLKHISKWKSIAECLSIKPDITIQHEKGHQPINTSIHTEGNALADKLATQGSYVVNAGKRTADGSEFEKRTADGSEFESPKKKAKVE

SEQ ID NO: 7298 - protein, 2096 aa, synthetic construct
MPAAKRVKLDGGDKKYSIGLDIGTNSVGWAVITDEYKVPSKKFKVLGNTDRHSIKKNLIGALLFDSGETAEATRLKRTARRRYTRRKNRICYLQEIFSNEMAKVDDSFFHRLEESFLVEEDKKHERHPIFGNIVDEVAYHEKYPTIYHLRKKLVDSTDKADLRLIYLALAHMIKFRGHFLIEGDLNPDNSDVDKLFIQLVQTYNQLFEENPINASGVDAKAILSARLSKSRRLENLIAQLPGEKKNGLFGNLIALSLGLTPNFKSNFDLAEDAKLQLSKDTYDDDLDNLLAQIGDQYADLFLAAKNLSDAILLSDILRVNTEITKAPLSASMIKRYDEHHQDLTLLKALVRQQLPEKYKEIFFDQSKNGYAGYIDGGASQEEFYKFIKPILEKMDGTEELLVKLNREDLLRKQRTFDNGSIPHQIHLGELHAILRRQEDFYPFLKDNREKIEKILTFRIPYYVGPLARGNSRFAWMTRKSEETITPWNFEEVVDKGASAQSFIERMTNFDKNLPNEKVLPKHSLLYEYFTVYNELTKVKYVTEGMRKPAFLSGEQKKAIVDLLFKTNRKVTVKQLKEDYFKKIECFDSVEISGVEDRFNASLGTYHDLLKIIKDKDFLDNEENEDILEDIVLTLTLFEDREMIEERLKTYAHLFDDKVMKQLKRRRYTGWGRLSRKLINGIRDKQSGKTILDFLKSDGFANRNFMQLIHDDSLTFKEDIQKAQVSGQGDSLHEHIANLAGSPAIKKGILQTVKVVDELVKVMGRHKPENIVIEMARENQTTQKGQKNSRERMKRIEEGIKELGSQILKEHPVENTQLQNEKLYLYYLQNGRDMYVDQELDINRLSDYDVDHIVPQSFLKDDSIDNKVLTRSDKARGKSDNVPSEEVVKKMKNYWRQLLNAKLITQRKFDNLTKAERGGLSELDKAGFIKRQLVETRQITKHVAQILDSRMNTKYDENDKLIREVKVITLKSKLVSDFRKDFQFYKVREINNYHHAHDAYLNAVVGTALIKKYPKLESEFVYGDYKVYDVRKMIAKSEQEIGKATAKYFFYSNIMNFFKTEITLANGEIRKRPLIETNGETGEIVWDKGRDFATVRKVLSMPQVNIVKKTEVQTGGFSKESILPKRNSDKLIARKKDWDPKKYGGFDSPTVAYSVLVVAKVEKGKSKKLKSVKELLGITIMERSSFEKNPIDFLEAKGYKEVKKDLIIKLPKYSLFELENGRKRMLASAGELQKGNELALPSKYVNFLYLASHYEKLKGSPEDNEQKQLFVEQHKHYLDEIIEQISEFSKRVILADANLDKVLSAYNKHRDKPIREQAENIIHLFTLTNLGAPAAFKYFDTTIDRKRYTSTKEVLDATLIHQSITGLYETRIDLSQLGGDGGGGGEAAAKGSSGGTLNIEDEYRLHETSKEPDVPLGSTWLSDFPQAWAETGGMGLAVRQAPLIIPLKATSTPVSIKQYPMSQEARLGIKPHIQRLLDQGILVPCQSPWNTPLLPVKKPGTNDYRPVQDLREVNKRVEDIHPTVPNPYNLLSGLPPSHQWYTVLDLKDAFFCLRLHPTSQPLFAFEWRDPEMGISGQLTWTRLPQGFKNSPTLFNEALHRDLADFRIQHPDLILLQYVDDLLLAATSEQDCQRGTRALLQTLGNLGYRASAKKAQICQKQVKYLGYLLKEGQRWLTEARKETVMGQPTPKTPRQLREFLGTAGFCRLWIPGFAEMAAPLYPLTKPGTLFNWGPDQQKAYQEIKQALLTAPALGLPDLTKPFELFVDEKQGYAKGVLTQKLGPWRRPVAYLSKKLDPVAAGWPPCLRMVAAIAVLTKDAGKLTMGQPLVILAPHAVEALVKQPPDRWLSNARMTHYQAMLLDTDRVQFGPVVALNPATLLPLPEKEAPHDCLEILAETHGTRPDLTDQPIPDADYTWYTDGSSFLQEGQRRAGAAVTTETEVIWARALPAGTSAQRAELIALTQALKMAEGKKLNVYTDSRYAFATAHVHGEIYRRRGWLTSEGREIKNKNEILALLKALFLPKRLSIIHCPGHQKGNSAEARGNRMADQAAREAAMKAVLETSTLLAGKRTADGSEFEKRTADGSEFESPKKKAKVE

SEQ ID NO: 7299 - protein, 2102 aa, synthetic construct
MPAAKRVKLDGGDKKYSIGLDIGTNSVGWAVITDEYKVPSKKFKVLGNTDRHSIKKNLIGALLFDSGETAEATRLKRTARRRYTRRKNRICYLQEIFSNEMAKVDDSFFHRLEESFLVEEDKKHERHPIFGNIVDEVAYHEKYPTIYHLRKKLVDSTDKADLRLIYLALAHMIKFRGHFLIEGDLNPDNSDVDKLFIQLVQTYNQLFEENPINASGVDAKAILSARLSKSRRLENLIAQLPGEKKNGLFGNLIALSLGLTPNFKSNFDLAEDAKLQLSKDTYDDDLDNLLAQIGDQYADLFLAAKNLSDAILLSDILRVNTEITKAPLSASMIKRYDEHHQDLTLLKALVRQQLPEKYKEIFFDQSKNGYAGYIDGGASQEEFYKFIKPILEKMDGTEELLVKLNREDLLRKQRTFDNGSIPHQIHLGELHAILRRQEDFYPFLKDNREKIEKILTFRIPYYVGPLARGNSRFAWMTRKSEETITPWNFEEVVDKGASAQSFIERMTNFDKNLPNEKVLPKHSLLYEYFTVYNELTKVKYVTEGMRKPAFLSGEQKKAIVDLLFKTNRKVTVKQLKEDYFKKIECFDSVEISGVEDRFNASLGTYHDLLKIIKDKDFLDNEENEDILEDIVLTLTLFEDREMIEERLKTYAHLFDDKVMKQLKRRRYTGWGRLSRKLINGIRDKQSGKTILDFLKSDGFANRNFMQLIHDDSLTFKEDIQKAQVSGQGDSLHEHIANLAGSPAIKKGILQTVKVVDELVKVMGRHKPENIVIEMARENQTTQKGQKNSRERMKRIEEGIKELGSQILKEHPVENTQLQNEKLYLYYLQNGRDMYVDQELDINRLSDYDVDHIVPQSFLKDDSIDNKVLTRSDKARGKSDNVPSEEVVKKMKNYWRQLLNAKLITQRKFDNLTKAERGGLSELDKAGFIKRQLVETRQITKHVAQILDSRMNTKYDENDKLIREVKVITLKSKLVSDFRKDFQFYKVREINNYHHAHDAYLNAVVGTALIKKYPKLESEFVYGDYKVYDVRKMIAKSEQEIGKATAKYFFYSNIMNFFKTEITLANGEIRKRPLIETNGETGEIVWDKGRDFATVRKVLSMPQVNIVKKTEVQTGGFSKESILPKRNSDKLIARKKDWDPKKYGGFDSPTVAYSVLVVAKVEKGKSKKLKSVKELLGITIMERSSFEKNPIDFLEAKGYKEVKKDLIIKLPKYSLFELENGRKRMLASAGELQKGNELALPSKYVNFLYLASHYEKLKGSPEDNEQKQLFVEQHKHYLDEIIEQISEFSKRVILADANLDKVLSAYNKHRDKPIREQAENIIHLFTLTNLGAPAAFKYFDTTIDRKRYTSTKEVLDATLIHQSITGLYETRIDLSQLGGDGGGSSGGGEAAAKGGTVSLQDEHRLFDIPVTTSLPDVWLQDFPQAWAETGGLGRAKCQAPIIIDLKPTAVPVSIKQYPMSLEAHMGIRQHIIKFLELGVLRPCRSPWNTPLLPVKKPGTQDYRPVQDLREINKRTVDIHPTVPNPYNLLSTLKPDYSWYTVLDLKDAFFCLPLAPQSQELFAFEWKDPERGISGQLTWTRLPQGFKNSPTLFNEALHRDLTDFRTQHPEVTLLQYVDDLLLAAPTKKACTQGTRHLLQELGEKGYRASAKKAQICQTKVTYLGYILSEGKRWLTPGRIETVARIPPPRNPREVREFLGTAGFCRLWIPGFAELAAPLYALTKPSTPFTWQTEHQLAFEALKKALLSAPALGLPDTSKPFTLFLDERQGIAKGVLTQKLGPWKRPVAYLSKKLDPVAAGWPPCLRIMAATAMLVKDSAKLTLGQPLTVITPHTLEAIVRQPPDRWITNARLTHYQALLLDTDRVQFGPPVTLNPATLLPVPENQPSPHDCRQVLAETHGTREDLKDQELPDADHTWYTDGSSYLDSGTRRAGAAVVDGHNTIWAQSLPPGTSAQKAELIALTKALELSKGKKANIYTDSRYAFATAHTHGSIYERRGWLTSEGKEIKNKAEIIALLKALFLPQEVAIIHCPGHQKGQDPVAVGNRQADRVARQAAMAEVLTLATEPDNTSHITAGKRTADGSEFEKRTADGSEFESPKKKAKVE

SEQ ID NO: 7300 - protein, 2218 aa, synthetic construct
MPAAKRVKLDGGDKKYSIGLDIGTNSVGWAVITDEYKVPSKKFKVLGNTDRHSIKKNLIGALLFDSGETAEATRLKRTARRRYTRRKNRICYLQEIFSNEMAKVDDSFFHRLEESFLVEEDKKHERHPIFGNIVDEVAYHEKYPTIYHLRKKLVDSTDKADLRLIYLALAHMIKFRGHFLIEGDLNPDNSDVDKLFIQLVQTYNQLFEENPINASGVDAKAILSARLSKSRRLENLIAQLPGEKKNGLFGNLIALSLGLTPNFKSNFDLAEDAKLQLSKDTYDDDLDNLLAQIGDQYADLFLAAKNLSDAILLSDILRVNTEITKAPLSASMIKRYDEHHQDLTLLKALVRQQLPEKYKEIFFDQSKNGYAGYIDGGASQEEFYKFIKPILEKMDGTEELLVKLNREDLLRKQRTFDNGSIPHQIHLGELHAILRRQEDFYPFLKDNREKIEKILTFRIPYYVGPLARGNSRFAWMTRKSEETITPWNFEEVVDKGASAQSFIERMTNFDKNLPNEKVLPKHSLLYEYFTVYNELTKVKYVTEGMRKPAFLSGEQKKAIVDLLFKTNRKVTVKQLKEDYFKKIECFDSVEISGVEDRFNASLGTYHDLLKIIKDKDFLDNEENEDILEDIVLTLTLFEDREMIEERLKTYAHLFDDKVMKQLKRRRYTGWGRLSRKLINGIRDKQSGKTILDFLKSDGFANRNFMQLIHDDSLTFKEDIQKAQVSGQGDSLHEHIANLAGSPAIKKGILQTVKVVDELVKVMGRHKPENIVIEMARENQTTQKGQKNSRERMKRIEEGIKELGSQILKEHPVENTQLQNEKLYLYYLQNGRDMYVDQELDINRLSDYDVDHIVPQSFLKDDSIDNKVLTRSDKARGKSDNVPSEEVVKKMKNYWRQLLNAKLITQRKFDNLTKAERGGLSELDKAGFIKRQLVETRQITKHVAQILDSRMNTKYDENDKLIREVKVITLKSKLVSDFRKDFQFYKVREINNYHHAHDAYLNAVVGTALIKKYPKLESEFVYGDYKVYDVRKMIAKSEQEIGKATAKYFFYSNIMNFFKTEITLANGEIRKRPLIETNGETGEIVWDKGRDFATVRKVLSMPQVNIVKKTEVQTGGFSKESILPKRNSDKLIARKKDWDPKKYGGFDSPTVAYSVLVVAKVEKGKSKKLKSVKELLGITIMERSSFEKNPIDFLEAKGYKEVKKDLIIKLPKYSLFELENGRKRMLASAGELQKGNELALPSKYVNFLYLASHYEKLKGSPEDNEQKQLFVEQHKHYLDEIIEQISEFSKRVILADANLDKVLSAYNKHRDKPIREQAENIIHLFTLTNLGAPAAFKYFDTTIDRKRYTSTKEVLDATLIHQSITGLYETRIDLSQLGGDGGGSSGGGEAAAKGGTLGDQGSRGSDPLPEPRVTLTVEGIPTEFLVNTGAEHSVLTKPMGKMGSKRTVVAGATGSKVYPWTTKRLLKIGQKQVTHSFLVIPECPAPLLGRDLLTKLKAQIQFSTEGPQVTWEDRPAMCLVLNLEEEYRLHEKPVPPSIDPSWLQLFPMVWAEKAGMGLANQVPPVVVELKSDASPVAVRQYPMSKEAREGIRPHIQRFLDLGILVPCQSPWNTPLLPVKKPGTNDYRPVQDLREVNKRVQDIHPTVPNPYNLLSSLPPSHTWYSVLDLKDAFFCLKLHPNSQPLFAFEWRDPEKGNTGQLTWTRLPQGFKNSPTLFDEALHRDLASFRALNPQVVMLQYVDDLLVAAPTYRDCKEGTRRLLQELSKLGYRVSAKKAQLCREEVTYLGYLLKGGKRWLTPARKATVMKIPTPTTPRQVREFLGTAGFCRLWIPGFASLAAPLYPLTREKVPFTWTEAHQEAFGRIKEALLSAPALALPDLTKPFALYVDEKEGVARGVLTQTLGPWRRPVAYLSKKLDPVASGWPTCLKAIAAVALLLKDADKLTLGQNVLVIAPHNLESIVRQPPDRWMTNARMTHYQSLLLNERVSFAPPAILNPATLLPVESDDTPIHICSEILAEETGTRPDLRDQPLPGVPAWYTDGSSFIMDGRRQAGAAIVDNKRTVWASNLPEGTSAQKAELIALTQALRLAEGKSINIYTDSRYAFATAHVHGAIYKQRGLLTSAGKDIKNKEEILALLEAIHLPKRVAIIHCPGHQRGTDPVATGNRKADEAAKQAAQSTRILTETTKNAGKRTADGSEFEKRTADGSEFESPKKKAKVE

SEQ ID NO: 7301 - protein, 2127 aa, synthetic construct
MPAAKRVKLDGGDKKYSIGLDIGTNSVGWAVITDEYKVPSKKFKVLGNTDRHSIKKNLIGALLFDSGETAEATRLKRTARRRYTRRKNRICYLQEIFSNEMAKVDDSFFHRLEESFLVEEDKKHERHPIFGNIVDEVAYHEKYPTIYHLRKKLVDSTDKADLRLIYLALAHMIKFRGHFLIEGDLNPDNSDVDKLFIQLVQTYNQLFEENPINASGVDAKAILSARLSKSRRLENLIAQLPGEKKNGLFGNLIALSLGLTPNFKSNFDLAEDAKLQLSKDTYDDDLDNLLAQIGDQYADLFLAAKNLSDAILLSDILRVNTEITKAPLSASMIKRYDEHHQDLTLLKALVRQQLPEKYKEIFFDQSKNGYAGYIDGGASQEEFYKFIKPILEKMDGTEELLVKLNREDLLRKQRTFDNGSIPHQIHLGELHAILRRQEDFYPFLKDNREKIEKILTFRIPYYVGPLARGNSRFAWMTRKSEETITPWNFEEVVDKGASAQSFIERMTNFDKNLPNEKVLPKHSLLYEYFTVYNELTKVKYVTEGMRKPAFLSGEQKKAIVDLLFKTNRKVTVKQLKEDYFKKIECFDSVEISGVEDRFNASLGTYHDLLKIIKDKDFLDNEENEDILEDIVLTLTLFEDREMIEERLKTYAHLFDDKVMKQLKRRRYTGWGRLSRKLINGIRDKQSGKTILDFLKSDGFANRNFMQLIHDDSLTFKEDIQKAQVSGQGDSLHEHIANLAGSPAIKKGILQTVKVVDELVKVMGRHKPENIVIEMARENQTTQKGQKNSRERMKRIEEGIKELGSQILKEHPVENTQLQNEKLYLYYLQNGRDMYVDQELDINRLSDYDVDHIVPQSFLKDDSIDNKVLTRSDKARGKSDNVPSEEVVKKMKNYWRQLLNAKLITQRKFDNLTKAERGGLSELDKAGFIKRQLVETRQITKHVAQILDSRMNTKYDENDKLIREVKVITLKSKLVSDFRKDFQFYKVREINNYHHAHDAYLNAVVGTALIKKYPKLESEFVYGDYKVYDVRKMIAKSEQEIGKATAKYFFYSNIMNFFKTEITLANGEIRKRPLIETNGETGEIVWDKGRDFATVRKVLSMPQVNIVKKTEVQTGGFSKESILPKRNSDKLIARKKDWDPKKYGGFDSPTVAYSVLVVAKVEKGKSKKLKSVKELLGITIMERSSFEKNPIDFLEAKGYKEVKKDLIIKLPKYSLFELENGRKRMLASAGELQKGNELALPSKYVNFLYLASHYEKLKGSPEDNEQKQLFVEQHKHYLDEIIEQISEFSKRVILADANLDKVLSAYNKHRDKPIREQAENIIHLFTLTNLGAPAAFKYFDTTIDRKRYTSTKEVLDATLIHQSITGLYETRIDLSQLGGDGGGSSGGGEAAAKGGLLGRDLLTKLKAQIQFSTEGPQVTWEDRPAMCLVLNLEEEYRLHEKPVPPSIDPSWLQLFPMVWAEKAGMGLANQVPPVVVELKSDASPVAVRQYPMSKEAREGIRPHIQRFLDLGILVPCQSPWNTPLLPVKKPGTNDYRPVQDLREVNKRVQDIHPTVPNPYNLLSSLPPSHTWYSVLDLKDAFFCLKLHPNSQPLFAFEWRDPEKGNTGQLTWTRLPQGFKNSPTLFNEALHRDLASFRALNPQVVMLQYVDDLLVAAPTYRDCKEGTRRLLQELSKLGYRVSAKKAQLCREEVTYLGYLLKGGKRWLTPARKATVMKIPTPTTPRQVREFLGTAGFCRLWIPGFASLAAPLYPLTRPKVPFTWTEAHQEAFGRIKEALLSAPALALPDLTKPFALYVDEKEGVARGVLTQTLGPWRRPVAYLSKKLDPVASGWPTCLKAIAAVALLLKDADKLTLGQNVLVIAPHNLESIVRQPPDRWMTNARMTHYQSLLLNERVSFAPPAILNPATLLPVESDDTPIHICSEILAEETGTRPDLRDQPLPGVPAWYTDGSSFIMDGRRQAGAAIVDNKRTVWASNLPEGTSAQKAELIALTQALRLAEGKSINIYTDSRYAFATAHVHGAIYKQRGWLTSAGKDIKNKEEILALLEAIHLPKRVAIIHCPGHQRGTDPVATGNRKADEAAKQAAQSTRILTETTKNAGKRTADGSEFEKRTADGSEFESPKKKAKVE

SEQ ID NO: 7302 - protein, 2096 aa, synthetic construct
MPAAKRVKLDGGDKKYSIGLDIGTNSVGWAVITDEYKVPSKKFKVLGNTDRHSIKKNLIGALLFDSGETAEATRLKRTARRRYTRRKNRICYLQEIFSNEMAKVDDSFFHRLEESFLVEEDKKHERHPIFGNIVDEVAYHEKYPTIYHLRKKLVDSTDKADLRLIYLALAHMIKFRGHFLIEGDLNPDNSDVDKLFIQLVQTYNQLFEENPINASGVDAKAILSARLSKSRRLENLIAQLPGEKKNGLFGNLIALSLGLTPNFKSNFDLAEDAKLQLSKDTYDDDLDNLLAQIGDQYADLFLAAKNLSDAILLSDILRVNTEITKAPLSASMIKRYDEHHQDLTLLKALVRQQLPEKYKEIFFDQSKNGYAGYIDGGASQEEFYKFIKPILEKMDGTEELLVKLNREDLLRKQRTFDNGSIPHQIHLGELHAILRRQEDFYPFLKDNREKIEKILTFRIPYYVGPLARGNSRFAWMTRKSEETITPWNFEEVVDKGASAQSFIERMTNFDKNLPNEKVLPKHSLLYEYFTVYNELTKVKYVTEGMRKPAFLSGEQKKAIVDLLFKTNRKVTVKQLKEDYFKKIECFDSVEISGVEDRFNASLGTYHDLLKIIKDKDFLDNEENEDILEDIVLTLTLFEDREMIEERLKTYAHLFDDKVMKQLKRRRYTGWGRLSRKLINGIRDKQSGKTILDFLKSDGFANRNFMQLIHDDSLTFKEDIQKAQVSGQGDSLHEHIANLAGSPAIKKGILQTVKVVDELVKVMGRHKPENIVIEMARENQTTQKGQKNSRERMKRIEEGIKELGSQILKEHPVENTQLQNEKLYLYYLQNGRDMYVDQELDINRLSDYDVDHIVPQSFLKDDSIDNKVLTRSDKARGKSDNVPSEEVVKKMKNYWRQLLNAKLITQRKFDNLTKAERGGLSELDKAGFIKRQLVETRQITKHVAQILDSRMNTKYDENDKLIREVKVITLKSKLVSDFRKDFQFYKVREINNYHHAHDAYLNAVVGTALIKKYPKLESEFVYGDYKVYDVRKMIAKSEQEIGKATAKYFFYSNIMNFFKTEITLANGEIRKRPLIETNGETGEIVWDKGRDFATVRKVLSMPQVNIVKKTEVQTGGFSKESILPKRNSDKLIARKKDWDPKKYGGFDSPTVAYSVLVVAKVEKGKSKKLKSVKELLGITIMERSSFEKNPIDFLEAKGYKEVKKDLIIKLPKYSLFELENGRKRMLASAGELQKGNELALPSKYVNFLYLASHYEKLKGSPEDNEQKQLFVEQHKHYLDEIIEQISEFSKRVILADANLDKVLSAYNKHRDKPIREQAENIIHLFTLTNLGAPAAFKYFDTTIDRKRYTSTKEVLDATLIHQSITGLYETRIDLSQLGGDGGGSSGGGEAAAKGGTLNIEDEYRLHETSKGPDVPLGSTWLSDFPQAWAETGGMGLAVRQAPLIIPLKATSTPVSIKQYPMSQEARLGIKPHIQRLLDQGILVPCQSPWNTPLLPVKKPGTNDYRPVQDLREVNKRVEDIHPTVPNPYNLLSGLPPSHQWYTVLDLKDAFFCLRLHPTSQSLFAFEWRDPEMGISGQLTWTRLPQGFKNSPTLFNEALHRDLADFRIQHPDLILLQYVDDLLLAATSELDCQQGTRALLQTLGDLGYRASAKKAQICQKQVKYLGYLLKEGQRWLTEARKETVMGQPTPKTPRQLREFLGTAGFCRLWIPGFAEMAAPLYPLTKPGTLFEWGPDQQKAYQEIKQALLTAPALGLPDLTKPFELFVDEKQGYAKGVLTQKLGPWRRPVAYLSKKLDPVAAGWPPCLRMVAAIAVLTKDAGKLTMGQPLVILAPHAVEALVKQPPDRWLSNARMTHYQALLLDTDRVQFGPIVALNPATLLPLPEEGLQHDCLDILAEAHGTRPDLTDQPLPDADHTWYTDGSSFLQEGQRKAGAAVTTETEVVWAKALPAGTSAQRAELIALTQALKMAEGKKLNVYTDSRYAFATAHIHGEIYRRRGWLTSEGKEIKNKDEILALLKALFLPKRLSIIHCPGHQKGNRAEARGNRMADQAAREVATRETPETSTLLAGKRTADGSEFEKRTADGSEFESPKKKAKVE

SEQ ID NO: 7303 - protein, 2090 aa, synthetic construct
MPAAKRVKLDGGDKKYSIGLDIGTNSVGWAVITDEYKVPSKKFKVLGNTDRHSIKKNLIGALLFDSGETAEATRLKRTARRRYTRRKNRICYLQEIFSNEMAKVDDSFFHRLEESFLVEEDKKHERHPIFGNIVDEVAYHEKYPTIYHLRKKLVDSTDKADLRLIYLALAHMIKFRGHFLIEGDLNPDNSDVDKLFIQLVQTYNQLFEENPINASGVDAKAILSARLSKSRRLENLIAQLPGEKKNGLFGNLIALSLGLTPNFKSNFDLAEDAKLQLSKDTYDDDLDNLLAQIGDQYADLFLAAKNLSDAILLSDILRVNTEITKAPLSASMIKRYDEHHQDLTLLKALVRQQLPEKYKEIFFDQSKNGYAGYIDGGASQEEFYKFIKPILEKMDGTEELLVKLNREDLLRKQRTFDNGSIPHQIHLGELHAILRRQEDFYPFLKDNREKIEKILTFRIPYYVGPLARGNSRFAWMTRKSEETITPWNFEEVVDKGASAQSFIERMTNFDKNLPNEKVLPKHSLLYEYFTVYNELTKVKYVTEGMRKPAFLSGEQKKAIVDLLFKTNRKVTVKQLKEDYFKKIECFDSVEISGVEDRFNASLGTYHDLLKIIKDKDFLDNEENEDILEDIVLTLTLFEDREMIEERLKTYAHLFDDKVMKQLKRRRYTGWGRLSRKLINGIRDKQSGKTILDFLKSDGFANRNFMQLIHDDSLTFKEDIQKAQVSGQGDSLHEHIANLAGSPAIKKGILQTVKVVDELVKVMGRHKPENIVIEMARENQTTQKGQKNSRERMKRIEEGIKELGSQILKEHPVENTQLQNEKLYLYYLQNGRDMYVDQELDINRLSDYDVDHIVPQSFLKDDSIDNKVLTRSDKARGKSDNVPSEEVVKKMKNYWRQLLNAKLITQRKFDNLTKAERGGLSELDKAGFIKRQLVETRQITKHVAQILDSRMNTKYDENDKLIREVKVITLKSKLVSDFRKDFQFYKVREINNYHHAHDAYLNAVVGTALIKKYPKLESEFVYGDYKVYDVRKMIAKSEQEIGKATAKYFFYSNIMNFFKTEITLANGEIRKRPLIETNGETGEIVWDKGRDFATVRKVLSMPQVNIVKKTEVQTGGFSKESILPKRNSDKLIARKKDWDPKKYGGFDSPTVAYSVLVVAKVEKGKSKKLKSVKELLGITIMERSSFEKNPIDFLEAKGYKEVKKDLIIKLPKYSLFELENGRKRMLASAGELQKGNELALPSKYVNFLYLASHYEKLKGSPEDNEQKQLFVEQHKHYLDEIIEQISEFSKRVILADANLDKVLSAYNKHRDKPIREQAENIIHLFTLTNLGAPAAFKYFDTTIDRKRYTSTKEVLDATLIHQSITGLYETRIDLSQLGGDGGGSSGGGEAAAKGGTLQLDDEYRLYSPLVKPDQNIQFWLEQFPQAWAETAGMGLAKQVPPQVIQLKASATPVSVRQYPLSKEAQEGIRPHVQRLIQQGILVPVQSPWNTPLLPVRKPGTNDYRPVQDLREVNKRVQDIHPTVPNPYNLLCALPPQRSWYTVLDLKDAFFCLRLHPTSQPLFAFEWRDPGTGRTGQLTWTRLPQGFKNSPTIFDEALHRDLANFRIQHPQVTLLQYVDDLLLAGATKQDCLEGTKALLLELSDLGYRASAKKAQICRREVTYLGYSLRDGQRWLTEARKKTVVQIPAPTTAKQVREFLGTAGFCRLWIPGFATLAAPLYPLTKEKGEFSWAPEHQKAFDAIKKALLSAPALALPDVTKPFTLYVDERKGVARGVLTQTLGPWRRPVAYLSKKLDPVASGWPVCLKAIAAVAILVKDADKLTLGQNITVIAPHALENIVRQPPDRWMTNARMTHYQSLLLTERVTFAPPAALNPATLLPEETDEPVTHDCHQLLIEETGVRKDLTDIPLTGEVLTWFTDGSSYVVEGKRMAGAAVVDGTRTIWASSLPEGTSAQKAELMALTQALRLAEGKSINIYTDSRYAFATAHVHGAIYKQRGLLTSAGREIKNKEEILSLLEALHLPKRLAIIHCPGHQKAKDPISRGNQMADRVAKQAAQGVNLLAGKRTADGSEFEKRTADGSEFESPKKKAKVE

SEQ ID NO: 7304 - protein, 2087 aa, synthetic construct
MPAAKRVKLDGGDKKYSIGLDIGTNSVGWAVITDEYKVPSKKFKVLGNTDRHSIKKNLIGALLFDSGETAEATRLKRTARRRYTRRKNRICYLQEIFSNEMAKVDDSFFHRLEESFLVEEDKKHERHPIFGNIVDEVAYHEKYPTIYHLRKKLVDSTDKADLRLIYLALAHMIKFRGHFLIEGDLNPDNSDVDKLFIQLVQTYNQLFEENPINASGVDAKAILSARLSKSRRLENLIAQLPGEKKNGLFGNLIALSLGLTPNFKSNFDLAEDAKLQLSKDTYDDDLDNLLAQIGDQYADLFLAAKNLSDAILLSDILRVNTEITKAPLSASMIKRYDEHHQDLTLLKALVRQQLPEKYKEIFFDQSKNGYAGYIDGGASQEEFYKFIKPILEKMDGTEELLVKLNREDLLRKQRTFDNGSIPHQIHLGELHAILRRQEDFYPFLKDNREKIEKILTFRIPYYVGPLARGNSRFAWMTRKSEETITPWNFEEVVDKGASAQSFIERMTNFDKNLPNEKVLPKHSLLYEYFTVYNELTKVKYVTEGMRKPAFLSGEQKKAIVDLLFKTNRKVTVKQLKEDYFKKIECFDSVEISGVEDRFNASLGTYHDLLKIIKDKDFLDNEENEDILEDIVLTLTLFEDREMIEERLKTYAHLFDDKVMKQLKRRRYTGWGRLSRKLINGIRDKQSGKTILDFLKSDGFANRNFMQLIHDDSLTFKEDIQKAQVSGQGDSLHEHIANLAGSPAIKKGILQTVKVVDELVKVMGRHKPENIVIEMARENQTTQKGQKNSRERMKRIEEGIKELGSQILKEHPVENTQLQNEKLYLYYLQNGRDMYVDQELDINRLSDYDVDHIVPQSFLKDDSIDNKVLTRSDKARGKSDNVPSEEVVKKMKNYWRQLLNAKLITQRKFDNLTKAERGGLSELDKAGFIKRQLVETRQITKHVAQILDSRMNTKYDENDKLIREVKVITLKSKLVSDFRKDFQFYKVREINNYHHAHDAYLNAVVGTALIKKYPKLESEFVYGDYKVYDVRKMIAKSEQEIGKATAKYFFYSNIMNFFKTEITLANGEIRKRPLIETNGETGEIVWDKGRDFATVRKVLSMPQVNIVKKTEVQTGGFSKESILPKRNSDKLIARKKDWDPKKYGGFDSPTVAYSVLVVAKVEKGKSKKLKSVKELLGITIMERSSFEKNPIDFLEAKGYKEVKKDLIIKLPKYSLFELENGRKRMLASAGELQKGNELALPSKYVNFLYLASHYEKLKGSPEDNEQKQLFVEQHKHYLDEIIEQISEFSKRVILADANLDKVLSAYNKHRDKPIREQAENIIHLFTLTNLGAPAAFKYFDTTIDRKRYTSTKEVLDATLIHQSITGLYETRIDLSQLGGDGGGSSGGGEAAAKGGIPWLMKKPLQLTTLVPLQEYEERLLKQTMLTGSYKEKLQSLFLKYDALWQHWENQVGHRRIKPHHIATGTVNPRPQKQYPINPKAKASIQTVINDLLKQGVLIQQNSIMNTPVYPVPKPDGKWRMVLDYREVNKTIPLIAAQNQHSAGILSSIFRGKYKTTLDLSNGFWAHSITPESYWLTAFTWLGQQYCWTRLPQGFLNSPALFNADVVDLLKEVPNVQVYVDDIYISHDDPREHLEQLEKVFSLLLNAGYVVSLKKSEIAQHEVEFLGFNITKEGRGLTETFKQKLLNITPPRDLKQLQSILGKLNFARNFIPNFSELVKPLYNIIATAPGKYITWTTDNSQQLQNIISMLNSAENLEERNPEVRLIMKVNTSPSAGYIRFYNEFAKRPIMYLNYVYTKAEVKFTNTEKLLTTIHKGLIKALDLGMGQEILVYSPIVSMTKIQKTPLPERKALPIRWITWMSYLEDPRIQFHYDKTLPELQQVPTVTDDIIAKIKHPSEFSMVFYTDGSAIKHPNVNKSHNAGMGIAQVQFKPEFTVINTWSIPLGDHTAQLAEVAAVEFACKKALKIDGPVLIVTDSFYVAESVNKELPYWQSNGFFNNKKKPLKHVSKWKSIADCIQLKPDIIIIHEKGHQPTASTFHTEGNNLADKLATQGSYVVNAGKRTADGSEFEKRTADGSEFESPKKKAKVE

SEQ ID NO: 7305 - protein, 2176 aa, synthetic construct
MPAAKRVKLDGGDKKYSIGLDIGTNSVGWAVITDEYKVPSKKFKVLGNTDRHSIKKNLIGALLFDSGETAEATRLKRTARRRYTRRKNRICYLQEIFSNEMAKVDDSFFHRLEESFLVEEDKKHERHPIFGNIVDEVAYHEKYPTIYHLRKKLVDSTDKADLRLIYLALAHMIKFRGHFLIEGDLNPDNSDVDKLFIQLVQTYNQLFEENPINASGVDAKAILSARLSKSRRLENLIAQLPGEKKNGLFGNLIALSLGLTPNFKSNFDLAEDAKLQLSKDTYDDDLDNLLAQIGDQYADLFLAAKNLSDAILLSDILRVNTEITKAPLSASMIKRYDEHHQDLTLLKALVRQQLPEKYKEIFFDQSKNGYAGYIDGGASQEEFYKFIKPILEKMDGTEELLVKLNREDLLRKQRTFDNGSIPHQIHLGELHAILRRQEDFYPFLKDNREKIEKILTFRIPYYVGPLARGNSRFAWMTRKSEETITPWNFEEVVDKGASAQSFIERMTNFDKNLPNEKVLPKHSLLYEYFTVYNELTKVKYVTEGMRKPAFLSGEQKKAIVDLLFKTNRKVTVKQLKEDYFKKIECFDSVEISGVEDRFNASLGTYHDLLKIIKDKDFLDNEENEDILEDIVLTLTLFEDREMIEERLKTYAHLFDDKVMKQLKRRRYTGWGRLSRKLINGIRDKQSGKTILDFLKSDGFANRNFMQLIHDDSLTFKEDIQKAQVSGQGDSLHEHIANLAGSPAIKKGILQTVKVVDELVKVMGRHKPENIVIEMARENQTTQKGQKNSRERMKRIEEGIKELGSQILKEHPVENTQLQNEKLYLYYLQNGRDMYVDQELDINRLSDYDVDHIVPQSFLKDDSIDNKVLTRSDKARGKSDNVPSEEVVKKMKNYWRQLLNAKLITQRKFDNLTKAERGGLSELDKAGFIKRQLVETRQITKHVAQILDSRMNTKYDENDKLIREVKVITLKSKLVSDFRKDFQFYKVREINNYHHAHDAYLNAVVGTALIKKYPKLESEFVYGDYKVYDVRKMIAKSEQEIGKATAKYFFYSNIMNFFKTEITLANGEIRKRPLIETNGETGEIVWDKGRDFATVRKVLSMPQVNIVKKTEVQTGGFSKESILPKRNSDKLIARKKDWDPKKYGGFDSPTVAYSVLVVAKVEKGKSKKLKSVKELLGITIMERSSFEKNPIDFLEAKGYKEVKKDLIIKLPKYSLFELENGRKRMLASAGELQKGNELALPSKYVNFLYLASHYEKLKGSPEDNEQKQLFVEQHKHYLDEIIEQISEFSKRVILADANLDKVLSAYNKHRDKPIREQAENIIHLFTLTNLGAPAAFKYFDTTIDRKRYTSTKEVLDATLIHQSITGLYETRIDLSQLGGDGGGSSGGGEAAAKGGMDPLQLLQPLEAEIKGTKLKAHWNSGATITCVPQAFLEEEVPIKNIWIKTIHGEKEQPVYYLTFKIQGRKVEAEVISSPYDYILVSPSDIPWLMKKPLQLTTLVPLQEYEERLLKQTMLTGSYKEKLQSLFLKYDALWQHWENQVGHRRIKPHHIATGTVNPRPQKQYPINPKAKASIQTVINDLLKQGVLIQQNSIMNTPVYPVPKPDGKWRMVLDYREVNKTIPLIAAQNQHSAGILSSIFRGKYKTTLDLSNGFWAHSITPESYWLTAFTWLGQQYCWTRLPQGFLNSPALFNADVVDLLKEVPNVQVYVDDIYISHDDPREHLEQLEKVFSLLLNAGYVVSLKKSEIAQHEVEFLGFNITKEGRGLTETFKQKLLNITPPRDLKQLQSILGLLNFARNFIPNFSELVKPLYNIIATAPGKYITWTTDNSQQLQNIISMLNSAENLEERNPEVRLIMKVNTSPSAGYIRFYNEFAKRPIMYLNYVYTKAEVKFTNTEKLLTTIHKGLIKALDLGMGQEILVYSPIVSMTKIQKTPLPERKALPIRWITWMSYLEDPRIQFHYDKTLPELQQVPTVTDDIIAKIKHPSEFSMVFYTDGSAIKHPNVNKSHNAGMGIAQVQFKPEFTVINTWSIPLGDHTAQLAEVAAVEFACKKALKIDGPVLIVTDSFYVAESVNKELPYWQSNGFFNNKKKPLKHVSKWKSIADCIQLKPDIIIIHEKGHQPTASTFHTEGNNLADKLATQGSYVVNAGKRTADGSEFEKRTADGSEFESPKKKAKVE

SEQ ID NO: 7306 - protein, 2094 aa, synthetic construct
MPAAKRVKLDGGDKKYSIGLDIGTNSVGWAVITDEYKVPSKKFKVLGNTDRHSIKKNLIGALLFDSGETAEATRLKRTARRRYTRRKNRICYLQEIFSNEMAKVDDSFFHRLEESFLVEEDKKHERHPIFGNIVDEVAYHEKYPTIYHLRKKLVDSTDKADLRLIYLALAHMIKFRGHFLIEGDLNPDNSDVDKLFIQLVQTYNQLFEENPINASGVDAKAILSARLSKSRRLENLIAQLPGEKKNGLFGNLIALSLGLTPNFKSNFDLAEDAKLQLSKDTYDDDLDNLLAQIGDQYADLFLAAKNLSDAILLSDILRVNTEITKAPLSASMIKRYDEHHQDLTLLKALVRQQLPEKYKEIFFDQSKNGYAGYIDGGASQEEFYKFIKPILEKMDGTEELLVKLNREDLLRKQRTFDNGSIPHQIHLGELHAILRRQEDFYPFLKDNREKIEKILTFRIPYYVGPLARGNSRFAWMTRKSEETITPWNFEEVVDKGASAQSFIERMTNFDKNLPNEKVLPKHSLLYEYFTVYNELTKVKYVTEGMRKPAFLSGEQKKAIVDLLFKTNRKVTVKQLKEDYFKKIECFDSVEISGVEDRFNASLGTYHDLLKIIKDKDFLDNEENEDILEDIVLTLTLFEDREMIEERLKTYAHLFDDKVMKQLKRRRYTGWGRLSRKLINGIRDKQSGKTILDFLKSDGFANRNFMQLIHDDSLTFKEDIQKAQVSGQGDSLHEHIANLAGSPAIKKGILQTVKVVDELVKVMGRHKPENIVIEMARENQTTQKGQKNSRERMKRIEEGIKELGSQILKEHPVENTQLQNEKLYLYYLQNGRDMYVDQELDINRLSDYDVDHIVPQSFLKDDSIDNKVLTRSDKARGKSDNVPSEEVVKKMKNYWRQLLNAKLITQRKFDNLTKAERGGLSELDKAGFIKRQLVETRQITKHVAQILDSRMNTKYDENDKLIREVKVITLKSKLVSDFRKDFQFYKVREINNYHHAHDAYLNAVVGTALIKKYPKLESEFVYGDYKVYDVRKMIAKSEQEIGKATAKYFFYSNIMNFFKTEITLANGEIRKRPLIETNGETGEIVWDKGRDFATVRKVLSMPQVNIVKKTEVQTGGFSKESILPKRNSDKLIARKKDWDPKKYGGFDSPTVAYSVLVVAKVEKGKSKKLKSVKELLGITIMERSSFEKNPIDFLEAKGYKEVKKDLIIKLPKYSLFELENGRKRMLASAGELQKGNELALPSKYVNFLYLASHYEKLKGSPEDNEQKQLFVEQHKHYLDEIIEQISEFSKRVILADANLDKVLSAYNKHRDKPIREQAENIIHLFTLTNLGAPAAFKYFDTTIDRKRYTSTKEVLDATLIHQSITGLYETRIDLSQLGGDGGGSSGGGEAAAKGGVLNLEEEYRLHEKPVPSSIDPSWLQLFPTVWAERAGMGLANQVPPVVVELRSGASPVAVRQYPMSKEAREGIRPHIQRFLDLGVLVPCQSPWNTPLLPVKKPGTNDYRPVQDLREINKRVQDIHPTVPNPYNLLSSLPPSHTWYSVLDLKDAFFCLKLHPNSQPLFAFEWRDPEKGNTGQLTWTRLPQGFKNSPTLFNEALHRDLAPFRALNPQVVLLQYVDDLLVAAPTYRDCKEGTQKLLQELSKLGYRVSAKKAQLCQKEVTYLGYLLKEGKRWLTPARKATVMKIPPPTTPRQVREFLGTAGFCRLWIPGFASLAAPLYPLTKPSIPFIWTEEHQKAFDRIKEALLSAPALALPDLTKPFTLYVDERAGVARGVLTQTLGPWRRPVAYLSKKLDPVASGWPTCLKAVAAVALLLKDADKLTLGQNVTVIASHSLESIVRQPPDRWMTNARMTHYQSLLLNERVSFAPPAVLNPATLLPVESEATPVHRCSEILAEETGTRRDLKDQPLPGVPAWYTDGSSFIAEGKRRAGAAIVDGKRTVWASSLPEGTSAQKAELVALTQALRLAEGKDINIYTDSRYAFATAHIHGAIYKQRGWLTSAGKDIKNKEEILALLEAIHLPKRVAIIHCPGHQKGNDPVATGNRRADEAAKQAALSTRVLAETTKPAGKRTADGSEFEKRTADGSEFESPKKKAKVE

SEQ ID NO: 7307 - protein, 2102 aa, synthetic construct
MPAAKRVKLDGGDKKYSIGLDIGTNSVGWAVITDEYKVPSKKFKVLGNTDRHSIKKNLIGALLFDSGETAEATRLKRTARRRYTRRKNRICYLQEIFSNEMAKVDDSFFHRLEESFLVEEDKKHERHPIFGNIVDEVAYHEKYPTIYHLRKKLVDSTDKADLRLIYLALAHMIKFRGHFLIEGDLNPDNSDVDKLFIQLVQTYNQLFEENPINASGVDAKAILSARLSKSRRLENLIAQLPGEKKNGLFGNLIALSLGLTPNFKSNFDLAEDAKLQLSKDTYDDDLDNLLAQIGDQYADLFLAAKNLSDAILLSDILRVNTEITKAPLSASMIKRYDEHHQDLTLLKALVRQQLPEKYKEIFFDQSKNGYAGYIDGGASQEEFYKFIKPILEKMDGTEELLVKLNREDLLRKQRTFDNGSIPHQIHLGELHAILRRQEDFYPFLKDNREKIEKILTFRIPYYVGPLARGNSRFAWMTRKSEETITPWNFEEVVDKGASAQSFIERMTNFDKNLPNEKVLPKHSLLYEYFTVYNELTKVKYVTEGMRKPAFLSGEQKKAIVDLLFKTNRKVTVKQLKEDYFKKIECFDSVEISGVEDRFNASLGTYHDLLKIIKDKDFLDNEENEDILEDIVLTLTLFEDREMIEERLKTYAHLFDDKVMKQLKRRRYTGWGRLSRKLINGIRDKQSGKTILDFLKSDGFANRNFMQLIHDDSLTFKEDIQKAQVSGQGDSLHEHIANLAGSPAIKKGILQTVKVVDELVKVMGRHKPENIVIEMARENQTTQKGQKNSRERMKRIEEGIKELGSQILKEHPVENTQLQNEKLYLYYLQNGRDMYVDQELDINRLSDYDVDHIVPQSFLKDDSIDNKVLTRSDKARGKSDNVPSEEVVKKMKNYWRQLLNAKLITQRKFDNLTKAERGGLSELDKAGFIKRQLVETRQITKHVAQILDSRMNTKYDENDKLIREVKVITLKSKLVSDFRKDFQFYKVREINNYHHAHDAYLNAVVGTALIKKYPKLESEFVYGDYKVYDVRKMIAKSEQEIGKATAKYFFYSNIMNFFKTEITLANGEIRKRPLIETNGETGEIVWDKGRDFATVRKVLSMPQVNIVKKTEVQTGGFSKESILPKRNSDKLIARKKDWDPKKYGGFDSPTVAYSVLVVAKVEKGKSKKLKSVKELLGITIMERSSFEKNPIDFLEAKGYKEVKKDLIIKLPKYSLFELENGRKRMLASAGELQKGNELALPSKYVNFLYLASHYEKLKGSPEDNEQKQLFVEQHKHYLDEIIEQISEFSKRVILADANLDKVLSAYNKHRDKPIREQAENIIHLFTLTNLGAPAAFKYFDTTIDRKRYTSTKEVLDATLIHQSITGLYETRIDLSQLGGDGGGSSEAAAKGGGGGTVSLQDEHRLFDIPVTTSLPDVWLQDFPQAWAETGGLGRAKCQAPIIIDLKPTAVPVSIKQYPMSLEAHMGIRQHIIKFLELGVLRPCRSPWNTPLLPVKKPGTQDYRPVQDLREINKRTVDIHPTVPNPYNLLSTLKPDYSWYTVLDLKDAFFCLPLAPQSQELFAFEWKDPERGISGQLTWTRLPQGFKNSPTLFNEALHRDLTDFRTQHPEVTLLQYVDDLLLAAPTKKACTQGTRHLLQELGEKGYRASAKKAQICQTKVTYLGYILSEGKRWLTPGRIETVARIPPPRNPREVREFLGTAGFCRLWIPGFAELAAPLYALTKPSTPFTWQTEHQLAFEALKKALLSAPALGLPDTSKPFTLFLDERQGIAKGVLTQKLGPWKRPVAYLSKKLDPVAAGWPPCLRIMAATAMLVKDSAKLTLGQPLTVITPHTLEAIVRQPPDRWITNARLTHYQALLLDTDRVQFGPPVTLNPATLLPVPENQPSPHDCRQVLAETHGTREDLKDQELPDADHTWYTDGSSYLDSGTRRAGAAVVDGHNTIWAQSLPPGTSAQKAELIALTKALELSKGKKANIYTDSRYAFATAHTHGSIYERRGWLTSEGKEIKNKAEIIALLKALFLPQEVAIIHCPGHQKGQDPVAVGNRQADRVARQAAMAEVLTLATEPDNTSHITAGKRTADGSEFEKRTADGSEFESPKKKAKVE

SEQ ID NO: 7308 - protein, 2173 aa, synthetic construct
MPAAKRVKLDGGDKKYSIGLDIGTNSVGWAVITDEYKVPSKKFKVLGNTDRHSIKKNLIGALLFDSGETAEATRLKRTARRRYTRRKNRICYLQEIFSNEMAKVDDSFFHRLEESFLVEEDKKHERHPIFGNIVDEVAYHEKYPTIYHLRKKLVDSTDKADLRLIYLALAHMIKFRGHFLIEGDLNPDNSDVDKLFIQLVQTYNQLFEENPINASGVDAKAILSARLSKSRRLENLIAQLPGEKKNGLFGNLIALSLGLTPNFKSNFDLAEDAKLQLSKDTYDDDLDNLLAQIGDQYADLFLAAKNLSDAILLSDILRVNTEITKAPLSASMIKRYDEHHQDLTLLKALVRQQLPEKYKEIFFDQSKNGYAGYIDGGASQEEFYKFIKPILEKMDGTEELLVKLNREDLLRKQRTFDNGSIPHQIHLGELHAILRRQEDFYPFLKDNREKIEKILTFRIPYYVGPLARGNSRFAWMTRKSEETITPWNFEEVVDKGASAQSFIERMTNFDKNLPNEKVLPKHSLLYEYFTVYNELTKVKYVTEGMRKPAFLSGEQKKAIVDLLFKTNRKVTVKQLKEDYFKKIECFDSVEISGVEDRFNASLGTYHDLLKIIKDKDFLDNEENEDILEDIVLTLTLFEDREMIEERLKTYAHLFDDKVMKQLKRRRYTGWGRLSRKLINGIRDKQSGKTILDFLKSDGFANRNFMQLIHDDSLTFKEDIQKAQVSGQGDSLHEHIANLAGSPAIKKGILQTVKVVDELVKVMGRHKPENIVIEMARENQTTQKGQKNSRERMKRIEEGIKELGSQILKEHPVENTQLQNEKLYLYYLQNGRDMYVDQELDINRLSDYDVDHIVPQSFLKDDSIDNKVLTRSDKARGKSDNVPSEEVVKKMKNYWRQLLNAKLITQRKFDNLTKAERGGLSELDKAGFIKRQLVETRQITKHVAQILDSRMNTKYDENDKLIREVKVITLKSKLVSDFRKDFQFYKVREINNYHHAHDAYLNAVVGTALIKKYPKLESEFVYGDYKVYDVRKMIAKSEQEIGKATAKYFFYSNIMNFFKTEITLANGEIRKRPLIETNGETGEIVWDKGRDFATVRKVLSMPQVNIVKKTEVQTGGFSKESILPKRNSDKLIARKKDWDPKKYGGFDSPTVAYSVLVVAKVEKGKSKKLKSVKELLGITIMERSSFEKNPIDFLEAKGYKEVKKDLIIKLPKYSLFELENGRKRMLASAGELQKGNELALPSKYVNFLYLASHYEKLKGSPEDNEQKQLFVEQHKHYLDEIIEQISEFSKRVILADANLDKVLSAYNKHRDKPIREQAENIIHLFTLTNLGAPAAFKYFDTTIDRKRYTSTKEVLDATLIHQSITGLYETRIDLSQLGGDGGGSSEAAAKGGGGGMDLLKPLTVERKGVKIKGYWNSQADITCVPKDLLQGEEPVRQQNVTTIHGTQEGDVYYVNLKIDGRRINTEVIGTTLDYAIITPGDVPWILKKPLELTIKLDLEEQQGTLLNNSILSKKGKEELKQLFEKYSALWQSWENQVGHRRIRPHKIATGTVKPTPQKQYHINPKAKPDIQIVINDLLKQGVLIQKESTMNTPVYPVPKPNGRWRMVLDYRAVNKVTPLIAVQNQHSYGILGSLFKGRYKTTIDLSNGFWAHPIVPEDYWITAFTWQGKQYCWTVLPQGFLNSPGLFNGDVVDLLQGIPNVEVYVDDVYISHDSEKEHLEYLDILFNRLKEAGYIISLKKSNIANSIVDFLGFQITNEGRGLTDTFKEKLENITAPTTLKQLQSILGKLNFARNFIPDFTELIAPLYALIPKSPKNYVPWQIEHSTTLETLITKLNGAEYLQGRKGDKTLIMKVNASYTTGYIRYYNEGEKKPISYVSIVFSKTELKFTELEKLLTTVHKGLLKALDLSMGQNIHVYSPIVSMQNIQKTPQTAKKALASRWLSWLSYLEDPRIRFFYDPQMPALKDLPAVDTGKDNKKHPSNFQHIFYTDGSAITSPTKEGHLNAGMGIVYFINKDGNLQKQQEWSISLGNHTAQFAEIAAFEFALKKCLPLGGNILVVTDSNYVAKAYNEELDVWASNGFVNNRKKPLKHISKWKSVADLKRLRPDVVVTHEPGHQKLDSSPHAYGNNLADQLATQASFKVHAGKRTADGSEFEKRTADGSEFESPKKKAKVE

SEQ ID NO: 7309 - protein, 2095 aa, synthetic construct
MPAAKRVKLDGGDKKYSIGLDIGTNSVGWAVITDEYKVPSKKFKVLGNTDRHSIKKNLIGALLFDSGETAEATRLKRTARRRYTRRKNRICYLQEIFSNEMAKVDDSFFHRLEESFLVEEDKKHERHPIFGNIVDEVAYHEKYPTIYHLRKKLVDSTDKADLRLIYLALAHMIKFRGHFLIEGDLNPDNSDVDKLFIQLVQTYNQLFEENPINASGVDAKAILSARLSKSRRLENLIAQLPGEKKNGLFGNLIALSLGLTPNFKSNFDLAEDAKLQLSKDTYDDDLDNLLAQIGDQYADLFLAAKNLSDAILLSDILRVNTEITKAPLSASMIKRYDEHHQDLTLLKALVRQQLPEKYKEIFFDQSKNGYAGYIDGGASQEEFYKFIKPILEKMDGTEELLVKLNREDLLRKQRTFDNGSIPHQIHLGELHAILRRQEDFYPFLKDNREKIEKILTFRIPYYVGPLARGNSRFAWMTRKSEETITPWNFEEVVDKGASAQSFIERMTNFDKNLPNEKVLPKHSLLYEYFTVYNELTKVKYVTEGMRKPAFLSGEQKKAIVDLLFKTNRKVTVKQLKEDYFKKIECFDSVEISGVEDRFNASLGTYHDLLKIIKDKDFLDNEENEDILEDIVLTLTLFEDREMIEERLKTYAHLFDDKVMKQLKRRRYTGWGRLSRKLINGIRDKQSGKTILDFLKSDGFANRNFMQLIHDDSLTFKEDIQKAQVSGQGDSLHEHIANLAGSPAIKKGILQTVKVVDELVKVMGRHKPENIVIEMARENQTTQKGQKNSRERMKRIEEGIKELGSQILKEHPVENTQLQNEKLYLYYLQNGRDMYVDQELDINRLSDYDVDHIVPQSFLKDDSIDNKVLTRSDKARGKSDNVPSEEVVKKMKNYWRQLLNAKLITQRKFDNLTKAERGGLSELDKAGFIKRQLVETRQITKHVAQILDSRMNTKYDENDKLIREVKVITLKSKLVSDFRKDFQFYKVREINNYHHAHDAYLNAVVGTALIKKYPKLESEFVYGDYKVYDVRKMIAKSEQEIGKATAKYFFYSNIMNFFKTEITLANGEIRKRPLIETNGETGEIVWDKGRDFATVRKVLSMPQVNIVKKTEVQTGGFSKESILPKRNSDKLIARKKDWDPKKYGGFDSPTVAYSVLVVAKVEKGKSKKLKSVKELLGITIMERSSFEKNPIDFLEAKGYKEVKKDLIIKLPKYSLFELENGRKRMLASAGELQKGNELALPSKYVNFLYLASHYEKLKGSPEDNEQKQLFVEQHKHYLDEIIEQISEFSKRVILADANLDKVLSAYNKHRDKPIREQAENIIHLFTLTNLGAPAAFKYFDTTIDRKRYTSTKEVLDATLIHQSITGLYETRIDLSQLGGDGGGSSEAAAKGGGGGTLQLEEEYRLFEPESTQKQEMDIWLKNFPQAWAETGGMGTAHCQAPVLIQLKATATPISIRQYPMPHEAYQGIKPHIRRMLDQGILKPCQSPWNTPLLPVKKPGTEDYRPVQDLREVNKRVEDIHPTVPNPYNLLSTLPPSHPWYTVLDLKDAFFCLRLHSESQLLFAFEWRDPEIGLSGQLTWTRLPQGFKNSPTLFNEALHSDLADFRVRYPALVLLQYVDDLLLAAATRTECLEGTKALLETLGNKGYRASAKKAQICLQEVTYLGYSLKDGQRWLTKARKEAILSIPVPKNSRQVREFLGKAGYCRLFIPGFAELAAPLYPLTRPGTLFQWGTEQQLAFEDIKKALLSSPALGLPDITKPFELFIDENSGFAKGVLVQKLGPWKRPVAYLSKKLDTVASGWPPCLRMVAAIAILVKDAGKLTLGQPLTILTSHPVEALVRQPPNKWLSNARMTHYQAMLLDAERVHFGPTVSLNPATLLPLPSGGNHHDCLQILAETHGTRPDLTDQPLPDADLTWYTDGSSFIRNGEREAGAAVTTESEVIWAAPLPPGTSAQRAELIALTQALKMAEGKKLTVYTDSRYAFATTHVHGEIYRRRGWLTSEGKEIKNKNEILALLEALFLPKRLSIIHCPGHQKGDSPQAKGNRLADDTAKKAATETHSSLTVLPAGKRTADGSEFEKRTADGSEFESPKKKAKVE

SEQ ID NO: 7310 - protein, 2094 aa, synthetic construct
MPAAKRVKLDGGDKKYSIGLDIGTNSVGWAVITDEYKVPSKKFKVLGNTDRHSIKKNLIGALLFDSGETAEATRLKRTARRRYTRRKNRICYLQEIFSNEMAKVDDSFFHRLEESFLVEEDKKHERHPIFGNIVDEVAYHEKYPTIYHLRKKLVDSTDKADLRLIYLALAHMIKFRGHFLIEGDLNPDNSDVDKLFIQLVQTYNQLFEENPINASGVDAKAILSARLSKSRRLENLIAQLPGEKKNGLFGNLIALSLGLTPNFKSNFDLAEDAKLQLSKDTYDDDLDNLLAQIGDQYADLFLAAKNLSDAILLSDILRVNTEITKAPLSASMIKRYDEHHQDLTLLKALVRQQLPEKYKEIFFDQSKNGYAGYIDGGASQEEFYKFIKPILEKMDGTEELLVKLNREDLLRKQRTFDNGSIPHQIHLGELHAILRRQEDFYPFLKDNREKIEKILTFRIPYYVGPLARGNSRFAWMTRKSEETITPWNFEEVVDKGASAQSFIERMTNFDKNLPNEKVLPKHSLLYEYFTVYNELTKVKYVTEGMRKPAFLSGEQKKAIVDLLFKTNRKVTVKQLKEDYFKKIECFDSVEISGVEDRFNASLGTYHDLLKIIKDKDFLDNEENEDILEDIVLTLTLFEDREMIEERLKTYAHLFDDKVMKQLKRRRYTGWGRLSRKLINGIRDKQSGKTILDFLKSDGFANRNFMQLIHDDSLTFKEDIQKAQVSGQGDSLHEHIANLAGSPAIKKGILQTVKVVDELVKVMGRHKPENIVIEMARENQTTQKGQKNSRERMKRIEEGIKELGSQILKEHPVENTQLQNEKLYLYYLQNGRDMYVDQELDINRLSDYDVDHIVPQSFLKDDSIDNKVLTRSDKARGKSDNVPSEEVVKKMKNYWRQLLNAKLITQRKFDNLTKAERGGLSELDKAGFIKRQLVETRQITKHVAQILDSRMNTKYDENDKLIREVKVITLKSKLVSDFRKDFQFYKVREINNYHHAHDAYLNAVVGTALIKKYPKLESEFVYGDYKVYDVRKMIAKSEQEIGKATAKYFFYSNIMNFFKTEITLANGEIRKRPLIETNGETGEIVWDKGRDFATVRKVLSMPQVNIVKKTEVQTGGFSKESILPKRNSDKLIARKKDWDPKKYGGFDSPTVAYSVLVVAKVEKGKSKKLKSVKELLGITIMERSSFEKNPIDFLEAKGYKEVKKDLIIKLPKYSLFELENGRKRMLASAGELQKGNELALPSKYVNFLYLASHYEKLKGSPEDNEQKQLFVEQHKHYLDEIIEQISEFSKRVILADANLDKVLSAYNKHRDKPIREQAENIIHLFTLTNLGAPAAFKYFDTTIDRKRYTSTKEVLDATLIHQSITGLYETRIDLSQLGGDGGGSSEAAAKGGGGGVLNLEEEYRLHEKPVPSSIDPSWLQLFPTVWAERAGMGLANQVPPVVVELRSGASPVAVRQYPMSKEAREGIRPHIQKFLDLGVLVPCRSPWNTPLLPVKKPGTNDYRPVQDLREINKRVQDIHPTVPNPYNLLSSLPPSYTWYSVLDLKDAFFCLRLHPNSQPLFAFEWKDPEKGNTGQLTWTRLPQGFKNSPTLFNEALHRDLAPFRALNPQVVLLQYVDDLLVAAPTYEDCKKGTQKLLQELSKLGYRVSAKKAQLCQREVTYLGYLLKEGKRWLTPARKATVMKIPVPTTPRQVREFLGKAGFCRLFIPGFASLAAPLYPLTKPSIPFIWTEEHQQAFDHIKKALLSAPALALPDLTKPFTLYIDERAGVARGVLTQTLGPWRRPVAYLSKKLDPVASGWPTCLKAVAAVALLLKDADKLTLGQNVTVIASHSLESIVRQPPDRWMTNARMTHYQSLLLNERVSFAPPAVLNPATLLPVESEATPVHRCSEILAEETGTRRDLEDQPLPGVPTWYTDGSSFITEGKRRAGAPIVDGKRTVWASSLPEGTSAQKAELVALTQALRLAEGKNINIYTDSRYAFATAHIHGAIYKQRGWLTSAGKDIKNKEEILALLEAIHLPRRVAIIHCPGHQRGSNPVATGNRRADEAAKQAALSTRVLAGTTKPAGKRTADGSEFEKRTADGSEFESPKKKAKVE

SEQ ID NO: 7311 - protein, 2218 aa, synthetic construct
MPAAKRVKLDGGDKKYSIGLDIGTNSVGWAVITDEYKVPSKKFKVLGNTDRHSIKKNLIGALLFDSGETAEATRLKRTARRRYTRRKNRICYLQEIFSNEMAKVDDSFFHRLEESFLVEEDKKHERHPIFGNIVDEVAYHEKYPTIYHLRKKLVDSTDKADLRLIYLALAHMIKFRGHFLIEGDLNPDNSDVDKLFIQLVQTYNQLFEENPINASGVDAKAILSARLSKSRRLENLIAQLPGEKKNGLFGNLIALSLGLTPNFKSNFDLAEDAKLQLSKDTYDDDLDNLLAQIGDQYADLFLAAKNLSDAILLSDILRVNTEITKAPLSASMIKRYDEHHQDLTLLKALVRQQLPEKYKEIFFDQSKNGYAGYIDGGASQEEFYKFIKPILEKMDGTEELLVKLNREDLLRKQRTFDNGSIPHQIHLGELHAILRRQEDFYPFLKDNREKIEKILTFRIPYYVGPLARGNSRFAWMTRKSEETITPWNFEEVVDKGASAQSFIERMTNFDKNLPNEKVLPKHSLLYEYFTVYNELTKVKYVTEGMRKPAFLSGEQKKAIVDLLFKTNRKVTVKQLKEDYFKKIECFDSVEISGVEDRFNASLGTYHDLLKIIKDKDFLDNEENEDILEDIVLTLTLFEDREMIEERLKTYAHLFDDKVMKQLKRRRYTGWGRLSRKLINGIRDKQSGKTILDFLKSDGFANRNFMQLIHDDSLTFKEDIQKAQVSGQGDSLHEHIANLAGSPAIKKGILQTVKVVDELVKVMGRHKPENIVIEMARENQTTQKGQKNSRERMKRIEEGIKELGSQILKEHPVENTQLQNEKLYLYYLQNGRDMYVDQELDINRLSDYDVDHIVPQSFLKDDSIDNKVLTRSDKARGKSDNVPSEEVVKKMKNYWRQLLNAKLITQRKFDNLTKAERGGLSELDKAGFIKRQLVETRQITKHVAQILDSRMNTKYDENDKLIREVKVITLKSKLVSDFRKDFQFYKVREINNYHHAHDAYLNAVVGTALIKKYPKLESEFVYGDYKVYDVRKMIAKSEQEIGKATAKYFFYSNIMNFFKTEITLANGEIRKRPLIETNGETGEIVWDKGRDFATVRKVLSMPQVNIVKKTEVQTGGFSKESILPKRNSDKLIARKKDWDPKKYGGFDSPTVAYSVLVVAKVEKGKSKKLKSVKELLGITIMERSSFEKNPIDFLEAKGYKEVKKDLIIKLPKYSLFELENGRKRMLASAGELQKGNELALPSKYVNFLYLASHYEKLKGSPEDNEQKQLFVEQHKHYLDEIIEQISEFSKRVILADANLDKVLSAYNKHRDKPIREQAENIIHLFTLTNLGAPAAFKYFDTTIDRKRYTSTKEVLDATLIHQSITGLYETRIDLSQLGGDGGGSSEAAAKGGGGGTLGDQGSRGSDPLPEPRVTLTVEGIPTEFLVNTGAEHSVLTKPMGKMGSKRTVVAGATGSKVYPWTTKRLLKIGQKQVTHSFLVIPECPAPLLGRDLLTKLKAQIQFSTEGPQVTWEDRPAMCLVLNLEEEYRLHEKPVPPSIDPSWLQLFPMVWAEKAGMGLANQVPPVVVELKSDASPVAVRQYPMSKEAREGIRPHIQRFLDLGILVPCQSPWNTPLLPVKKPGTNDYRPVQDLREVNKRVQDIHPTVPNPYNLLSSLPPSHTWYSVLDLKDAFFCLKLHPNSQPLFAFEWRDPEKGNTGQLTWTRLPQGFKNSPTLFNEALHRDLASFRALNPQVVMLQYVDDLLVAAPTYRDCKEGTRRLLQELSKLGYRVSAKKAQLCREEVTYLGYLLKGGKRWLTPARKATVMKIPTPTTPRQVREFLGTAGFCRLWIPGFASLAAPLYPLTRPKVPFTWTEAHQEAFGRIKEALLSAPALALPDLTKPFALYVDEKEGVARGVLTQTLGPWRRPVAYLSKKLDPVASGWPTCLKAIAAVALLLKDADKLTLGQNVLVIAPHNLESIVRQPPDRWMTNARMTHYQSLLLNERVSFAPPAILNPATLLPVESDDTPIHICSEILAEETGTRPDLRDQPLPGVPAWYTDGSSFIMDGRRQAGAAIVDNKRTVWASNLPEGTSAQKAELIALTQALRLAEGKSINIYTDSRYAFATAHVHGAIYKQRGWLTSAGKDIKNKEEILALLEAIHLPKRVAIIHCPGHQRGTDPVATGNRKADEAAKQAAQSTRILTETTKNAGKRTADGSEFEKRTADGSEFESPKKKAKVE

SEQ ID NO: 7312 - protein, 2096 aa, synthetic construct
MPAAKRVKLDGGDKKYSIGLDIGTNSVGWAVITDEYKVPSKKFKVLGNTDRHSIKKNLIGALLFDSGETAEATRLKRTARRRYTRRKNRICYLQEIFSNEMAKVDDSFFHRLEESFLVEEDKKHERHPIFGNIVDEVAYHEKYPTIYHLRKKLVDSTDKADLRLIYLALAHMIKFRGHFLIEGDLNPDNSDVDKLFIQLVQTYNQLFEENPINASGVDAKAILSARLSKSRRLENLIAQLPGEKKNGLFGNLIALSLGLTPNFKSNFDLAEDAKLQLSKDTYDDDLDNLLAQIGDQYADLFLAAKNLSDAILLSDILRVNTEITKAPLSASMIKRYDEHHQDLTLLKALVRQQLPEKYKEIFFDQSKNGYAGYIDGGASQEEFYKFIKPILEKMDGTEELLVKLNREDLLRKQRTFDNGSIPHQIHLGELHAILRRQEDFYPFLKDNREKIEKILTFRIPYYVGPLARGNSRFAWMTRKSEETITPWNFEEVVDKGASAQSFIERMTNFDKNLPNEKVLPKHSLLYEYFTVYNELTKVKYVTEGMRKPAFLSGEQKKAIVDLLFKTNRKVTVKQLKEDYFKKIECFDSVEISGVEDRFNASLGTYHDLLKIIKDKDFLDNEENEDILEDIVLTLTLFEDREMIEERLKTYAHLFDDKVMKQLKRRRYTGWGRLSRKLINGIRDKQSGKTILDFLKSDGFANRNFMQLIHDDSLTFKEDIQKAQVSGQGDSLHEHIANLAGSPAIKKGILQTVKVVDELVKVMGRHKPENIVIEMARENQTTQKGQKNSRERMKRIEEGIKELGSQILKEHPVENTQLQNEKLYLYYLQNGRDMYVDQELDINRLSDYDVDHIVPQSFLKDDSIDNKVLTRSDKARGKSDNVPSEEVVKKMKNYWRQLLNAKLITQRKFDNLTKAERGGLSELDKAGFIKRQLVETRQITKHVAQILDSRMNTKYDENDKLIREVKVITLKSKLVSDFRKDFQFYKVREINNYHHAHDAYLNAVVGTALIKKYPKLESEFVYGDYKVYDVRKMIAKSEQEIGKATAKYFFYSNIMNFFKTEITLANGEIRKRPLIETNGETGEIVWDKGRDFATVRKVLSMPQVNIVKKTEVQTGGFSKESILPKRNSDKLIARKKDWDPKKYGGFDSPTVAYSVLVVAKVEKGKSKKLKSVKELLGITIMERSSFEKNPIDFLEAKGYKEVKKDLIIKLPKYSLFELENGRKRMLASAGELQKGNELALPSKYVNFLYLASHYEKLKGSPEDNEQKQLFVEQHKHYLDEIIEQISEFSKRVILADANLDKVLSAYNKHRDKPIREQAENIIHLFTLTNLGAPAAFKYFDTTIDRKRYTSTKEVLDATLIHQSITGLYETRIDLSQLGGDGGGSSEAAAKGGGGGLGIEDEYRLHETSTEPDVSLGSTWLSDFPQAWAETGGMGLAVRQAPLIIPLKATSTPVSIQQYPMSHEARLGIKPHIQRLLDQGILVPCQSPWNTPLLPVKKPGTNDYRPVQDLREVNKRVEDIHPTVPNPYNLLSGLPPSHQWYTVLDLKDAFFCLRLHPTSQPLFAFEWRDPGMGISGQLTWTRLPQGFKNSPTLFNEALHRDLADFRIQHPDLILLQYVDDILLAATSELDCQQGTRALLQTLGDLGYRASAKKAQICQKQVKYLGYLLREGQRWLTEARKETVMGQPVPKTPRQLREFLGKAGFCRLFIPGFAEMAAPLYPLTKPGTLFSWGPDQQKAYQEIKQALLTAPALGLPDLTKPFELFVDEKQGYAKGVLTQKLGPWRRPVAYLSKKLDPVAAGWPPCLRMVAAIAVLTKDAGKLTMGQPLVILAPHAVEALVKQPPDRWLSNARMTHYQAMLLDTDRVQFGPVVALNPATLLPLPEEGAPHDCLEILAETHGTRPDLTDQPIPDADHTWYTDGSSFLQEGQRKAGAAVTTETEVIWAGALPAGTSAQRAELIALTQALKMAEGKRLNVYTDSRYAFATAHIHGEIYRRRGWLTSEGREIKNKSEILALLKALFLPKRLSIIHCLGHQKGDSAEARGNRLADQAAREAAIKTPPDTSTLLIAGKRTADGSEFEKRTADGSEFESPKKKAKVE

SEQ ID NO: 7313 - protein, 2116 aa, synthetic construct
MPAAKRVKLDGGDKKYSIGLDIGTNSVGWAVITDEYKVPSKKFKVLGNTDRHSIKKNLIGALLFDSGETAEATRLKRTARRRYTRRKNRICYLQEIFSNEMAKVDDSFFHRLEESFLVEEDKKHERHPIFGNIVDEVAYHEKYPTIYHLRKKLVDSTDKADLRLIYLALAHMIKFRGHFLIEGDLNPDNSDVDKLFIQLVQTYNQLFEENPINASGVDAKAILSARLSKSRRLENLIAQLPGEKKNGLFGNLIALSLGLTPNFKSNFDLAEDAKLQLSKDTYDDDLDNLLAQIGDQYADLFLAAKNLSDAILLSDILRVNTEITKAPLSASMIKRYDEHHQDLTLLKALVRQQLPEKYKEIFFDQSKNGYAGYIDGGASQEEFYKFIKPILEKMDGTEELLVKLNREDLLRKQRTFDNGSIPHQIHLGELHAILRRQEDFYPFLKDNREKIEKILTFRIPYYVGPLARGNSRFAWMTRKSEETITPWNFEEVVDKGASAQSFIERMTNFDKNLPNEKVLPKHSLLYEYFTVYNELTKVKYVTEGMRKPAFLSGEQKKAIVDLLFKTNRKVTVKQLKEDYFKKIECFDSVEISGVEDRFNASLGTYHDLLKIIKDKDFLDNEENEDILEDIVLTLTLFEDREMIEERLKTYAHLFDDKVMKQLKRRRYTGWGRLSRKLINGIRDKQSGKTILDFLKSDGFANRNFMQLIHDDSLTFKEDIQKAQVSGQGDSLHEHIANLAGSPAIKKGILQTVKVVDELVKVMGRHKPENIVIEMARENQTTQKGQKNSRERMKRIEEGIKELGSQILKEHPVENTQLQNEKLYLYYLQNGRDMYVDQELDINRLSDYDVDHIVPQSFLKDDSIDNKVLTRSDKARGKSDNVPSEEVVKKMKNYWRQLLNAKLITQRKFDNLTKAERGGLSELDKAGFIKRQLVETRQITKHVAQILDSRMNTKYDENDKLIREVKVITLKSKLVSDFRKDFQFYKVREINNYHHAHDAYLNAVVGTALIKKYPKLESEFVYGDYKVYDVRKMIAKSEQEIGKATAKYFFYSNIMNFFKTEITLANGEIRKRPLIETNGETGEIVWDKGRDFATVRKVLSMPQVNIVKKTEVQTGGFSKESILPKRNSDKLIARKKDWDPKKYGGFDSPTVAYSVLVVAKVEKGKSKKLKSVKELLGITIMERSSFEKNPIDFLEAKGYKEVKKDLIIKLPKYSLFELENGRKRMLASAGELQKGNELALPSKYVNFLYLASHYEKLKGSPEDNEQKQLFVEQHKHYLDEIIEQISEFSKRVILADANLDKVLSAYNKHRDKPIREQAENIIHLFTLTNLGAPAAFKYFDTTIDRKRYTSTKEVLDATLIHQSITGLYETRIDLSQLGGDGGGSSEAAAKGGGGGTLNIEDEYRLHETSKEPDVSLGSTWLSDFPQAWAETGGMGLAVRQAPLIIPLKATSTPVSIKQYPMSQEARLGIKPHIQRLLDQGILVPCQSPWNTPLLPVKKPGTNDYRPVQDLREVNKRVEDIHPTVPNPYNLLSGLPPSHQWYTVLDLKDAFFCLRLHPTSQPLFAFEWRDPEMGISGQLTWTRLPQGFKNSPTLFNEALHRDLADFRIQHPDLILLQYVDDLLLAATSELDCQQGTRALLQTLGNLGYRASAKKAQICQKQVKYLGYLLKEGQRWLTEARKETVMGQPTPKTPRQLREFLGKAGFCRLFIPGFAEMAAPLYPLTKPGTLFNWGPDQQKAYQEIKQALLTAPALGLPDLTKPFELFVDEKQGYAKGVLTQKLGPWRRPVAYLSKKLDPVAAGWPPCLRMVAAIAVLTKDAGKLTMGQPLVILAPHAVEALVKQPPDRWLSNARMTHYQALLLDTDRVQFGPVVALNPATLLPLPEEGLQHNCLDILAEAHGTRPDLTDQPLPDADHTWYTDGSSLLQEGQRKAGAAVTTETEVIWAKALPAGTSAQRAELIALTQALKMAEGKKLNVYTDSRYAFATAHIHGEIYRRRGWLTSEGKEIKNKDEILALLKALFLPKRLSIIHCPGHQKGHSAEARGNRMADQAARKAAITETPDTSTLLIENSSPSGGSKRTADGSEFEAGKRTADGSEFEKRTADGSEFESPKKKAKVE

SEQ ID NO: 7314 - protein, 2116 aa, synthetic construct; identical to SEQ ID NO: 7313

SEQ ID NO: 7315 - protein, 2087 aa, synthetic construct
MPAAKRVKLDGGDKKYSIGLDIGTNSVGWAVITDEYKVPSKKFKVLGNTDRHSIKKNLIGALLFDSGETAEATRLKRTARRRYTRRKNRICYLQEIFSNEMAKVDDSFFHRLEESFLVEEDKKHERHPIFGNIVDEVAYHEKYPTIYHLRKKLVDSTDKADLRLIYLALAHMIKFRGHFLIEGDLNPDNSDVDKLFIQLVQTYNQLFEENPINASGVDAKAILSARLSKSRRLENLIAQLPGEKKNGLFGNLIALSLGLTPNFKSNFDLAEDAKLQLSKDTYDDDLDNLLAQIGDQYADLFLAAKNLSDAILLSDILRVNTEITKAPLSASMIKRYDEHHQDLTLLKALVRQQLPEKYKEIFFDQSKNGYAGYIDGGASQEEFYKFIKPILEKMDGTEELLVKLNREDLLRKQRTFDNGSIPHQIHLGELHAILRRQEDFYPFLKDNREKIEKILTFRIPYYVGPLARGNSRFAWMTRKSEETITPWNFEEVVDKGASAQSFIERMTNFDKNLPNEKVLPKHSLLYEYFTVYNELTKVKYVTEGMRKPAFLSGEQKKAIVDLLFKTNRKVTVKQLKEDYFKKIECFDSVEISGVEDRFNASLGTYHDLLKIIKDKDFLDNEENEDILEDIVLTLTLFEDREMIEERLKTYAHLFDDKVMKQLKRRRYTGWGRLSRKLINGIRDKQSGKTILDFLKSDGFANRNFMQLIHDDSLTFKEDIQKAQVSGQGDSLHEHIANLAGSPAIKKGILQTVKVVDELVKVMGRHKPENIVIEMARENQTTQKGQKNSRERMKRIEEGIKELGSQILKEHPVENTQLQNEKLYLYYLQNGRDMYVDQELDINRLSDYDVDHIVPQSFLKDDSIDNKVLTRSDKARGKSDNVPSEEVVKKMKNYWRQLLNAKLITQRKFDNLTKAERGGLSELDKAGFIKRQLVETRQITKHVAQILDSRMNTKYDENDKLIREVKVITLKSKLVSDFRKDFQFYKVREINNYHHAHDAYLNAVVGTALIKKYPKLESEFVYGDYKVYDVRKMIAKSEQEIGKATAKYFFYSNIMNFFKTEITLANGEIRKRPLIETNGETGEIVWDKGRDFATVRKVLSMPQVNIVKKTEVQTGGFSKESILPKRNSDKLIARKKDWDPKKYGGFDSPTVAYSVLVVAKVEKGKSKKLKSVKELLGITIMERSSFEKNPIDFLEAKGYKEVKKDLIIKLPKYSLFELENGRKRMLASAGELQKGNELALPSKYVNFLYLASHYEKLKGSPEDNEQKQLFVEQHKHYLDEIIEQISEFSKRVILADANLDKVLSAYNKHRDKPIREQAENIIHLFTLTNLGAPAAFKYFDTTIDRKRYTSTKEVLDATLIHQSITGLYETRIDLSQLGGDGGGSSEAAAKGGGGGIPWLMKKPLQLTTLVPLQEYEERLLKQTMLTGSYKEKLQSLFLKYDALWQHWENQVGHRRIKPHHIATGTVNPRPQKQYPINPKAKASIQTVINDLLKQGVLIQQNSIMNTPVYPVPKPDGKWRMVLDYREVNKTIPLIAAQNQHSAGILSSIFRGKYKTTLDLSNGFWAHSITPESYWLTAFTWLGQQYCWTRLPQGFLNSPALFNADVVDLLKEVPNVQVYVDDIYISHDDPREHLEQLEKVFSLLLNAGYVVSLKKSEIAQHEVEFLGFNITKEGRGLTETFKQKLLNITPPRDLKQLQSILGLLNFARNFIPNFSELVKPLYNIIATAPGKYITWTTDNSQQLQNIISMLNSAENLEERNPEVRLIMKVNTSPSAGYIRFYNEFAKRPIMYLNYVYTKAEVKFTNTEKLLTTIHKGLIKALDLGMGQEILVYSPIVSMTKIQKTPLPERKALPIRWITWMSYLEDPRIQFHYDKTLPELQQVPTVTDDIIAKIKHPSEFSMVFYTDGSAIKHPNVNKSHNAGMGIAQVQFKPEFTVINTWSIPLGDHTAQLAEVAAVEFACKKALKIDGPVLIVTDSFYVAESVNKELPYWQSNGFFNNKKKPLKHVSKWKSIADCIQLKPDIIIIHEKGHQPTASTFHTEGNNLADKLATQGSYVVNAGKRTADGSEFEKRTADGSEFESPKKKAKVE

SEQ ID NO: 7316 - protein, 2096 aa, synthetic construct
MPAAKRVKLDGGDKKYSIGLDIGTNSVGWAVITDEYKVPSKKFKVLGNTDRHSIKKNLIGALLFDSGETAEATRLKRTARRRYTRRKNRICYLQEIFSNEMAKVDDSFFHRLEESFLVEEDKKHERHPIFGNIVDEVAYHEKYPTIYHLRKKLVDSTDKADLRLIYLALAHMIKFRGHFLIEGDLNPDNSDVDKLFIQLVQTYNQLFEENPINASGVDAKAILSARLSKSRRLENLIAQLPGEKKNGLFGNLIALSLGLTPNFKSNFDLAEDAKLQLSKDTYDDDLDNLLAQIGDQYADLFLAAKNLSDAILLSDILRVNTEITKAPLSASMIKRYDEHHQDLTLLKALVRQQLPEKYKEIFFDQSKNGYAGYIDGGASQEEFYKFIKPILEKMDGTEELLVKLNREDLLRKQRTFDNGSIPHQIHLGELHAILRRQEDFYPFLKDNREKIEKILTFRIPYYVGPLARGNSRFAWMTRKSEETITPWNFEEVVDKGASAQSFIERMTNFDKNLPNEKVLPKHSLLYEYFTVYNELTKVKYVTEGMRKPAFLSGEQKKAIVDLLFKTNRKVTVKQLKEDYFKKIECFDSVEISGVEDRFNASLGTYHDLLKIIKDKDFLDNEENEDILEDIVLTLTLFEDREMIEERLKTYAHLFDDKVMKQLKRRRYTGWGRLSRKLINGIRDKQSGKTILDFLKSDGFANRNFMQLIHDDSLTFKEDIQKAQVSGQGDSLHEHIANLAGSPAIKKGILQTVKVVDELVKVMGRHKPENIVIEMARENQTTQKGQKNSRERMKRIEEGIKELGSQILKEHPVENTQLQNEKLYLYYLQNGRDMYVDQELDINRLSDYDVDHIVPQSFLKDDSIDNKVLTRSDKARGKSDNVPSEEVVKKMKNYWRQLLNAKLITQRKFDNLTKAERGGLSELDKAGFIKRQLVETRQITKHVAQILDSRMNTKYDENDKLIREVKVITLKSKLVSDFRKDFQFYKVREINNYHHAHDAYLNAVVGTALIKKYPKLESEFVYGDYKVYDVRKMIAKSEQEIGKATAKYFFYSNIMNFFKTEITLANGEIRKRPLIETNGETGEIVWDKGRDFATVRKVLSMPQVNIVKKTEVQTGGFSKESILPKRNSDKLIARKKDWDPKKYGGFDSPTVAYSVLVVAKVEKGKSKKLKSVKELLGITIMERSSFEKNPIDFLEAKGYKEVKKDLIIKLPKYSLFELENGRKRMLASAGELQKGNELALPSKYVNFLYLASHYEKLKGSPEDNEQKQLFVEQHKHYLDEIIEQISEFSKRVILADANLDKVLSAYNKHRDKPIREQAENIIHLFTLTNLGAPAAFKYFDTTIDRKRYTSTKEVLDATLIHQSITGLYETRIDLSQLGGDGGGSSEAAAKGGGGGTLNIEDEYRLHETSKEPDVPLGSTWLSDFPQAWAETGGMGLAVRQAPLIIPLKATSTPVSIKQYPMSQEARLGIKPHIQRLLDQGILVPCQSPWNTPLLPVKKPGTNDYRPVQDLREVNKRVEDIHPTVPNPYNLLSGLPPSHQWYTVLDLKDAFFCLRLHPTSQPLFAFEWRDPEMGISGQLTWTRLPQGFKNSPTLFNEALHRDLADFRIQHPDLILLQYVDDLLLAATSEQDCQRGTRALLQTLGNLGYRASAKKAQICQKQVKYLGYLLKEGQRWLTEARKETVMGQPTPKTPRQLREFLGTAGFCRLWIPGFAEMAAPLYPLTKPGTLFNWGPDQQKAYQEIKQALLTAPALGLPDLTKPFELFVDEKQGYAKGVLTQKLGPWRRPVAYLSKKLDPVAAGWPPCLRMVAAIAVLTKDAGKLTMGQPLVILAPHAVEALVKQPPDRWLSNARMTHYQAMLLDTDRVQFGPVVALNPATLLPLPEKEAPHDCLEILAETHGTRPDLTDQPIPDADYTWYTDGSSFLQEGQRRAGAAVTTETEVIWARALPAGTSAQRAELIALTQALKMAEGKKLNVYTDSRYAFATAHVHGEIYRRRGWLTSEGREIKNKNEILALLKALFLPKRLSIIHCPGHQKGNSAEARGNRMADQAAREAAMKAVLETSTLLAGKRTADGSEFEKRTADGSEFESPKKKAKVE

SEQ ID NO: 7317 - protein, 2096 aa, synthetic construct
MPAAKRVKLDGGDKKYSIGLDIGTNSVGWAVITDEYKVPSKKFKVLGNTDRHSIKKNLIGALLFDSGETAEATRLKRTARRRYTRRKNRICYLQEIFSNEMAKVDDSFFHRLEESFLVEEDKKHERHPIFGNIVDEVAYHEKYPTIYHLRKKLVDSTDKADLRLIYLALAHMIKFRGHFLIEGDLNPDNSDVDKLFIQLVQTYNQLFEENPINASGVDAKAILSARLSKSRRLENLIAQLPGEKKNGLFGNLIALSLGLTPNFKSNFDLAEDAKLQLSKDTYDDDLDNLLAQIGDQYADLFLAAKNLSDAILLSDILRVNTEITKAPLSASMIKRYDEHHQDLTLLKALVRQQLPEKYKEIFFDQSKNGYAGYIDGGASQEEFYKFIKPILEKMDGTEELLVKLNREDLLRKQRTFDNGSIPHQIHLGELHAILRRQEDFYPFLKDNREKIEKILTFRIPYYVGPLARGNSRFAWMTRKSEETITPWNFEEVVDKGASAQSFIERMTNFDKNLPNEKVLPKHSLLYEYFTVYNELTKVKYVTEGMRKPAFLSGEQKKAIVDLLFKTNRKVTVKQLKEDYFKKIECFDSVEISGVEDRFNASLGTYHDLLKIIKDKDFLDNEENEDILEDIVLTLTLFEDREMIEERLKTYAHLFDDKVMKQLKRRRYTGWGRLSRKLINGIRDKQSGKTILDFLKSDGFANRNFMQLIHDDSLTFKEDIQKAQVSGQGDSLHEHIANLAGSPAIKKGILQTVKVVDELVKVMGRHKPENIVIEMARENQTTQKGQKNSRERMKRIEEGIKELGSQILKEHPVENTQLQNEKLYLYYLQNGRDMYVDQELDINRLSDYDVDHIVPQSFLKDDSIDNKVLTRSDKARGKSDNVPSEEVVKKMKNYWRQLLNAKLITQRKFDNLTKAERGGLSELDKAGFIKRQLVETRQITKHVAQILDSRMNTKYDENDKLIREVKVITLKSKLVSDFRKDFQFYKVREINNYHHAHDAYLNAVVGTALIKKYPKLESEFVYGDYKVYDVRKMIAKSEQEIGKATAKYFFYSNIMNFFKTEITLANGEIRKRPLIETNGETGEIVWDKGRDFATVRKVLSMPQVNIVKKTEVQTGGFSKESILPKRNSDKLIARKKDWDPKKYGGFDSPTVAYSVLVVAKVEKGKSKKLKSVKELLGITIMERSSFEKNPIDFLEAKGYKEVKKDLIIKLPKYSLFELENGRKRMLASAGELQKGNELALPSKYVNFLYLASHYEKLKGSPEDNEQKQLFVEQHKHYLDEIIEQISEFSKRVILADANLDKVLSAYNKHRDKPIREQAENIIHLFTLTNLGAPAAFKYFDTTIDRKRYTSTKEVLDATLIHQSITGLYETRIDLSQLGGDGGGSSEAAAKGGGGGTLNIEDEYRLHETSKEPDVPLGSTWLSDFPQAWAETGGMGLAVRQAPLIIPLKATSTPVSIKQYPMSQEARLGIKPHIQRLLDQGILVPCQSPWNTPLLPVKKPGTNDYRPVQDLREVNKRVEDIHPTVPNPYNLLSGLPPSHQWYTVLDLKDAFFCLRLHPTSQPLFAFEWRDPEMGISGQLTWTRLPQGFKNSPTLFNEALHRDLADFRIQHPDLILLQYVDDLLLAATSEQDCQRGTRALLQTLGNLGYRASAKKAQICQKQVKYLGYLLKEGQRWLTEARKETVMGQPTPKTPRQLREFLGKAGFCRLFIPGFAEMAAPLYPLTKPGTLFNWGPDQQKAYQEIKQALLTAPALGLPDLTKPFELFVDEKQGYAKGVLTQKLGPWRRPVAYLSKKLDPVAAGWPPCLRMVAAIAVLTKDAGKLTMGQPLVILAPHAVEALVKQPPDRWLSNARMTHYQAMLLDTDRVQFGPVVALNPATLLPLPEKEAPHDCLEILAETHGTRPDLTDQPIPDADYTWYTDGSSFLQEGQRRAGAAVTTETEVIWARALPAGTSAQRAELIALTQALKMAEGKKLNVYTDSRYAFATAHVHGEIYRRRGWLTSEGREIKNKNEILALLKALFLPKRLSIIHCPGHQKGNSAEARGNRMADQAAREAAMKAVLETSTLLAGKRTADGSEFEKRTADGSEFESPKKKAKVE

SEQ ID NO: 7318 - protein, 2098 aa, synthetic construct
MPAAKRVKLDGGDKKYSIGLDIGTNSVGWAVITDEYKVPSKKFKVLGNTDRHSIKKNLIGALLFDSGETAEATRLKRTARRRYTRRKNRICYLQEIFSNEMAKVDDSFFHRLEESFLVEEDKKHERHPIFGNIVDEVAYHEKYPTIYHLRKKLVDSTDKADLRLIYLALAHMIKFRGHFLIEGDLNPDNSDVDKLFIQLVQTYNQLFEENPINASGVDAKAILSARLSKSRRLENLIAQLPGEKKNGLFGNLIALSLGLTPNFKSNFDLAEDAKLQLSKDTYDDDLDNLLAQIGDQYADLFLAAKNLSDAILLSDILRVNTEITKAPLSASMIKRYDEHHQDLTLLKALVRQQLPEKYKEIFFDQSKNGYAGYIDGGASQEEFYKFIKPILEKMDGTEELLVKLNREDLLRKQRTFDNGSIPHQIHLGELHAILRRQEDFYPFLKDNREKIEKILTFRIPYYVGPLARGNSRFAWMTRKSEETITPWNFEEVVDKGASAQSFIERMTNFDKNLPNEKVLPKHSLLYEYFTVYNELTKVKYVTEGMRKPAFLSGEQKKAIVDLLFKTNRKVTVKQLKEDYFKKIECFDSVEISGVEDRFNASLGTYHDLLKIIKDKDFLDNEENEDILEDIVLTLTLFEDREMIEERLKTYAHLFDDKVMKQLKRRRYTGWGRLSRKLINGIRDKQSGKTILDFLKSDGFANRNFMQLIHDDSLTFKEDIQKAQVSGQGDSLHEHIANLAGSPAIKKGILQTVKVVDELVKVMGRHKPENIVIEMARENQTTQKGQKNSRERMKRIEEGIKELGSQILKEHPVENTQLQNEKLYLYYLQNGRDMYVDQELDINRLSDYDVDHIVPQSFLKDDSIDNKVLTRSDKARGKSDNVPSEEVVKKMKNYWRQLLNAKLITQRKFDNLTKAERGGLSELDKAGFIKRQLVETRQITKHVAQILDSRMNTKYDENDKLIREVKVITLKSKLVSDFRKDFQFYKVREINNYHHAHDAYLNAVVGTALIKKYPKLESEFVYGDYKVYDVRKMIAKSEQEIGKATAKYFFYSNIMNFFKTEITLANGEIRKRPLIETNGETGEIVWDKGRDFATVRKVLSMPQVNIVKKTEVQTGGFSKESILPKRNSDKLIARKKDWDPKKYGGFDSPTVAYSVLVVAKVEKGKSKKLKSVKELLGITIMERSSFEKNPIDFLEAKGYKEVKKDLIIKLPKYSLFELENGRKRMLASAGELQKGNELALPSKYVNFLYLASHYEKLKGSPEDNEQKQLFVEQHKHYLDEIIEQISEFSKRVILADANLDKVLSAYNKHRDKPIREQAENIIHLFTLTNLGAPAAFKYFDTTIDRKRYTSTKEVLDATLIHQSITGLYETRIDLSQLGGDGGEAAAKGGGGSSGGTAPLEEEYRLFLEAPIQNVTLLEQWKREIPKVWAEINPPGLASTQAPIHVQLLSTALPVRVRQYPITLEAKRSLRETIRKFRAAGILRPVHSPWNTPLLPVRKSGTSEYRMVQDLREVNKRVETIHPTVPNPYTLLSLLPPDRIWYSVLDLKDAFFCIPLAPESQLIFAFEWADAEEGESGQLTWTRLPQGFKNSPTLFDEALNRDLQGFRLDHPSVSLLQYVDDLLIAADTQAACLSATRDLLMTLAELGYRVSGKKAQLCQEEVTYLGFKIHKGSRSLSNSRTQAILQIPVPKTKRQVREFLGTIGYCRLWIPGFAELAQPLYAATRGGNDPLVWGEKEEEAFQSLKLALTQPPALALPSLDKPFQLFVEETSGAAKGVLTQALGPWKRPVAYLSKRLDPVAAGWPRCLRAIAAAALLTREASKLTFGQDIEITSSHNLESLLRSPPDKWLTNARITQYQVLLLDPPRVRFKQTAALNPATLLPETDDTLPIHHCLDTLDSLTSTRPDLTDQPLAQAEATLFTDGSSYIRDGKRYAGAAVVTLDSVIWAEPLPIGTSAQKAELIALTKALEWSKDKSVNIYTDSRYAFATLHVHGMIYRERGLLTAGGKAIKNAPEILALLTAVWLPKRVAVMHCKGHQKDDAPTSTGNRRADEVAREVAIRPLSTQATISAGKRTADGSEFEKRTADGSEFESPKKKAKVE

SEQ ID NO: 7319 - protein, 2098 aa, synthetic construct
MPAAKRVKLDGGDKKYSIGLDIGTNSVGWAVITDEYKVPSKKFKVLGNTDRHSIKKNLIGALLFDSGETAEATRLKRTARRRYTRRKNRICYLQEIFSNEMAKVDDSFFHRLEESFLVEEDKKHERHPIFGNIVDEVAYHEKYPTIYHLRKKLVDSTDKADLRLIYLALAHMIKFRGHFLIEGDLNPDNSDVDKLFIQLVQTYNQLFEENPINASGVDAKAILSARLSKSRRLENLIAQLPGEKKNGLFGNLIALSLGLTPNFKSNFDLAEDAKLQLSKDTYDDDLDNLLAQIGDQYADLFLAAKNLSDAILLSDILRVNTEITKAPLSASMIKRYDEHHQDLTLLKALVRQQLPEKYKEIFFDQSKNGYAGYIDGGASQEEFYKFIKPILEKMDGTEELLVKLNREDLLRKQRTFDNGSIPHQIHLGELHAILRRQEDFYPFLKDNREKIEKILTFRIPYYVGPLARGNSRFAWMTRKSEETITPWNFEEVVDKGASAQSFIERMTNFDKNLPNEKVLPKHSLLYEYFTVYNELTKVKYVTEGMRKPAFLSGEQKKAIVDLLFKTNRKVTVKQLKEDYFKKIECFDSVEISGVEDRFNASLGTYHDLLKIIKDKDFLDNEENEDILEDIVLTLTLFEDREMIEERLKTYAHLFDDKVMKQLKRRRYTGWGRLSRKLINGIRDKQSGKTILDFLKSDGFANRNFMQLIHDDSLTFKEDIQKAQVSGQGDSLHEHIANLAGSPAIKKGILQTVKVVDELVKVMGRHKPENIVIEMARENQTTQKGQKNSRERMKRIEEGIKELGSQILKEHPVENTQLQNEKLYLYYLQNGRDMYVDQELDINRLSDYDVDHIVPQSFLKDDSIDNKVLTRSDKARGKSDNVPSEEVVKKMKNYWRQLLNAKLITQRKFDNLTKAERGGLSELDKAGFIKRQLVETRQITKHVAQILDSRMNTKYDENDKLIREVKVITLKSKLVSDFRKDFQFYKVREINNYHHAHDAYLNAVVGTALIKKYPKLESEFVYGDYKVYDVRKMIAKSEQEIGKATAKYFFYSNIMNFFKTEITLANGEIRKRPLIETNGETGEIVWDKGRDFATVRKVLSMPQVNIVKKTEVQTGGFSKESILPKRNSDKLIARKKDWDPKKYGGFDSPTVAYSVLVVAKVEKGKSKKLKSVKELLGITIMERSSFEKNPIDFLEAKGYKEVKKDLIIKLPKYSLFELENGRKRMLASAGELQKGNELALPSKYVNFLYLASHYEKLKGSPEDNEQKQLFVEQHKHYLDEIIEQISEFSKRVILADANLDKVLSAYNKHRDKPIREQAENIIHLFTLTNLGAPAAFKYFDTTIDRKRYTSTKEVLDATLIHQSITGLYETRIDLSQLGGDGGEAAAKGGGGSSGGTAPLEEEYRLFLEAPIQNVTLLEQWKREIPKVWAEINPPGLASTQAPIHVQLLSTALPVRVRQYPITLEAKRSLRETIRKFRAAGILRPVHSPWNTPLLPVRKSGTSEYRMVQDLREVNKRVETIHPTVPNPYTLLSLLPPDRIWYSVLDLKDAFFCIPLAPESQLIFAFEWADAEEGESGQLTWTRLPQGFKNSPTLFNEALNRDLQGFRLDHPSVSLLQYVDDLLIAADTQAACLSATRDLLMTLAELGYRVSGKKAQLCQEEVTYLGFKIHKGSRSLSNSRTQAILQIPVPKTKRQVREFLGTIGYCRLWIPGFAELAQPLYAATRPGNDPLVWGEKEEEAFQSLKLALTQPPALALPSLDKPFQLFVEETSGAAKGVLTQALGPWKRPVAYLSKRLDPVAAGWPRCLRAIAAAALLTREASKLTFGQDIEITSSHNLESLLRSPPDKWLTNARITQYQVLLLDPPRVRFKQTAALNPATLLPETDDTLPIHHCLDTLDSLTSTRPDLTDQPLAQAEATLFTDGSSYIRDGKRYAGAAVVTLDSVIWAEPLPIGTSAQKAELIALTKALEWSKDKSVNIYTDSRYAFATLHVHGMIYRERGWLTAGGKAIKNAPEILALLTAVWLPKRVAVMHCKGHQKDDAPTSTGNRRADEVAREVAIRPLSTQATISAGKRTADGSEFEKRTADGSEFESPKKKAKVE

SEQ ID NO: 7320 - protein, 2098 aa, synthetic construct
MPAAKRVKLDGGDKKYSIGLDIGTNSVGWAVITDEYKVPSKKFKVLGNTDRHSIKKNLIGALLFDSGETAEATRLKRTARRRYTRRKNRICYLQEIFSNEMAKVDDSFFHRLEESFLVEEDKKHERHPIFGNIVDEVAYHEKYPTIYHLRKKLVDSTDKADLRLIYLALAHMIKFRGHFLIEGDLNPDNSDVDKLFIQLVQTYNQLFEENPINASGVDAKAILSARLSKSRRLENLIAQLPGEKKNGLFGNLIALSLGLTPNFKSNFDLAEDAKLQLSKDTYDDDLDNLLAQIGDQYADLFLAAKNLSDAILLSDILRVNTEITKAPLSASMIKRYDEHHQDLTLLKALVRQQLPEKYKEIFFDQSKNGYAGYIDGGASQEEFYKFIKPILEKMDGTEELLVKLNREDLLRKQRTFDNGSIPHQIHLGELHAILRRQEDFYPFLKDNREKIEKILTFRIPYYVGPLARGNSRFAWMTRKSEETITPWNFEEVVDKGASAQSFIERMTNFDKNLPNEKVLPKHSLLYEYFTVYNELTKVKYVTEGMRKPAFLSGEQKKAIVDLLFKTNRKVTVKQLKEDYFKKIECFDSVEISGVEDRFNASLGTYHDLLKIIKDKDFLDNEENEDILEDIVLTLTLFEDREMIEERLKTYAHLFDDKVMKQLKRRRYTGWGRLSRKLINGIRDKQSGKTILDFLKSDGFANRNFMQLIHDDSLTFKEDIQKAQVSGQGDSLHEHIANLAGSPAIKKGILQTVKVVDELVKVMGRHKPENIVIEMARENQTTQKGQKNSRERMKRIEEGIKELGSQILKEHPVENTQLQNEKLYLYYLQNGRDMYVDQELDINRLSDYDVDHIVPQSFLKDDSIDNKVLTRSDKARGKSDNVPSEEVVKKMKNYWRQLLNAKLITQRKFDNLTKAERGGLSELDKAGFIKRQLVETRQITKHVAQILDSRMNTKYDENDKLIREVKVITLKSKLVSDFRKDFQFYKVREINNYHHAHDAYLNAVVGTALIKKYPKLESEFVYGDYKVYDVRKMIAKSEQEIGKATAKYFFYSNIMNFFKTEITLANGEIRKRPLIETNGETGEIVWDKGRDFATVRKVLSMPQVNIVKKTEVQTGGFSKESILPKRNSDKLIARKKDWDPKKYGGFDSPTVAYSVLVVAKVEKGKSKKLKSVKELLGITIMERSSFEKNPIDFLEAKGYKEVKKDLIIKLPKYSLFELENGRKRMLASAGELQKGNELALPSKYVNFLYLASHYEKLKGSPEDNEQKQLFVEQHKHYLDEIIEQISEFSKRVILADANLDKVLSAYNKHRDKPIREQAENIIHLFTLTNLGAPAAFKYFDTTIDRKRYTSTKEVLDATLIHQSITGLYETRIDLSQLGGDGGEAAAKGGGGSSGGTAPLEEEYRLFLEAPIQNVTLLEQWKREIPKVWAEINPPGLASTQAPIHVQLLSTALPVRVRQYPITLEAKRSLRETIRKFRAAGILRPVHSPWNTPLLPVRKSGTSEYRMVQDLREVNKRVETIHPTVPNPYTLLSLLPPDRIWYSVLDLKDAFFCIPLAPESQLIFAFEWADAEEGESGQLTWTRLPQGFKNSPTLFNEALNRDLQGFRLDHPSVSLLQYVDDLLIAADTQAACLSATRDLLMTLAELGYRVSGKKAQLCQEEVTYLGFKIHKGSRSLSNSRTQAILQIPVPKTKRQVREFLGKIGYCRLFIPGFAELAQPLYAATRPGNDPLVWGEKEEEAFQSLKLALTQPPALALPSLDKPFQLFVEETSGAAKGVLTQALGPWKRPVAYLSKRLDPVAAGWPRCLRAIAAAALLTREASKLTFGQDIEITSSHNLESLLRSPPDKWLTNARITQYQVLLLDPPRVRFKQTAALNPATLLPETDDTLPIHHCLDTLDSLTSTRPDLTDQPLAQAEATLFTDGSSYIRDGKRYAGAAVVTLDSVIWAEPLPIGTSAQKAELIALTKALEWSKDKSVNIYTDSRYAFATLHVHGMIYRERGWLTAGGKAIKNAPEILALLTAVWLPKRVAVMHCKGHQKDDAPTSTGNRRADEVAREVAIRPLSTQATISAGKRTADGSEFEKRTADGSEFESPKKKAKVE

SEQ ID NO: 7321 - protein, 2102 aa, synthetic construct
MPAAKRVKLDGGDKKYSIGLDIGTNSVGWAVITDEYKVPSKKFKVLGNTDRHSIKKNLIGALLFDSGETAEATRLKRTARRRYTRRKNRICYLQEIFSNEMAKVDDSFFHRLEESFLVEEDKKHERHPIFGNIVDEVAYHEKYPTIYHLRKKLVDSTDKADLRLIYLALAHMIKFRGHFLIEGDLNPDNSDVDKLFIQLVQTYNQLFEENPINASGVDAKAILSARLSKSRRLENLIAQLPGEKKNGLFGNLIALSLGLTPNFKSNFDLAEDAKLQLSKDTYDDDLDNLLAQIGDQYADLFLAAKNLSDAILLSDILRVNTEITKAPLSASMIKRYDEHHQDLTLLKALVRQQLPEKYKEIFFDQSKNGYAGYIDGGASQEEFYKFIKPILEKMDGTEELLVKLNREDLLRKQRTFDNGSIPHQIHLGELHAILRRQEDFYPFLKDNREKIEKILTFRIPYYVGPLARGNSRFAWMTRKSEETITPWNFEEVVDKGASAQSFIERMTNFDKNLPNEKVLPKHSLLYEYFTVYNELTKVKYVTEGMRKPAFLSGEQKKAIVDLLFKTNRKVTVKQLKEDYFKKIECFDSVEISGVEDRFNASLGTYHDLLKIIKDKDFLDNEENEDILEDIVLTLTLFEDREMIEERLKTYAHLFDDKVMKQLKRRRYTGWGRLSRKLINGIRDKQSGKTILDFLKSDGFANRNFMQLIHDDSLTFKEDIQKAQVSGQGDSLHEHIANLAGSPAIKKGILQTVKVVDELVKVMGRHKPENIVIEMARENQTTQKGQKNSRERMKRIEEGIKELGSQILKEHPVENTQLQNEKLYLYYLQNGRDMYVDQELDINRLSDYDVDHIVPQSFLKDDSIDNKVLTRSDKARGKSDNVPSEEVVKKMKNYWRQLLNAKLITQRKFDNLTKAERGGLSELDKAGFIKRQLVETRQITKHVAQILDSRMNTKYDENDKLIREVKVITLKSKLVSDFRKDFQFYKVREINNYHHAHDAYLNAVVGTALIKKYPKLESEFVYGDYKVYDVRKMIAKSEQEIGKATAKYFFYSNIMNFFKTEITLANGEIRKRPLIETNGETGEIVWDKGRDFATVRKVLSMPQVNIVKKTEVQTGGFSKESILPKRNSDKLIARKKDWDPKKYGGFDSPTVAYSVLVVAKVEKGKSKKLKSVKELLGITIMERSSFEKNPIDFLEAKGYKEVKKDLIIKLPKYSLFELENGRKRMLASAGELQKGNELALPSKYVNFLYLASHYEKLKGSPEDNEQKQLFVEQHKHYLDEIIEQISEFSKRVILADANLDKVLSAYNKHRDKPIREQAENIIHLFTLTNLGAPAAFKYFDTTIDRKRYTSTKEVLDATLIHQSITGLYETRIDLSQLGGDGGEAAAKGGGGSSGGTVSLQDEHRLFDIPVTTSLPDVWLQDFPQAWAETGGLGRAKCQAPIIIDLKPTAVPVSIKQYPMSLEAHMGIRQHIIKFLELGVLRPCRSPWNTPLLPVKKPGTQDYRPVQDLREINKRTVDIHPTVPNPYNLLSTLKPDYSWYTVLDLKDAFFCLPLAPQSQELFAFEWKDPERGISGQLTWTRLPQGFKNSPTLFDEALHRDLTDFRTQHPEVTLLQYVDDLLLAAPTKKACTQGTRHLLQELGEKGYRASAKKAQICQTKVTYLGYILSEGKRWLTPGRIETVARIPPPRNPREVREFLGTAGFCRLWIPGFAELAAPLYALTKESTPFTWQTEHQLAFEALKKALLSAPALGLPDTSKPFTLFLDERQGIAKGVLTQKLGPWKRPVAYLSKKLDPVAAGWPPCLRIMAATAMLVKDSAKLTLGQPLTVITPHTLEAIVRQPPDRWITNARLTHYQALLLDTDRVQFGPPVTLNPATLLPVPENQPSPHDCRQVLAETHGTREDLKDQELPDADHTWYTDGSSYLDSGTRRAGAAVVDGHNTIWAQSLPPGTSAQKAELIALTKALELSKGKKANIYTDSRYAFATAHTHGSIYERRGLLTSEGKEIKNKAEIIALLKALFLPQEVAIIHCPGHQKGQDPVAVGNRQADRVARQAAMAEVLTLATEPDNTSHITAGKRTADGSEFEKRTADGSEFESPKKKAKVE

SEQ ID NO: 7322 - protein, 2087 aa, synthetic construct
MPAAKRVKLDGGDKKYSIGLDIGTNSVGWAVITDEYKVPSKKFKVLGNTDRHSIKKNLIGALLFDSGETAEATRLKRTARRRYTRRKNRICYLQEIFSNEMAKVDDSFFHRLEESFLVEEDKKHERHPIFGNIVDEVAYHEKYPTIYHLRKKLVDSTDKADLRLIYLALAHMIKFRGHFLIEGDLNPDNSDVDKLFIQLVQTYNQLFEENPINASGVDAKAILSARLSKSRRLENLIAQLPGEKKNGLFGNLIALSLGLTPNFKSNFDLAEDAKLQLSKDTYDDDLDNLLAQIGDQYADLFLAAKNLSDAILLSDILRVNTEITKAPLSASMIKRYDEHHQDLTLLKALVRQQLPEKYKEIFFDQSKNGYAGYIDGGASQEEFYKFIKPILEKMDGTEELLVKLNREDLLRKQRTFDNGSIPHQIHLGELHAILRRQEDFYPFLKDNREKIEKILTFRIPYYVGPLARGNSRFAWMTRKSEETITPWNFEEVVDKGASAQSFIERMTNFDKNLPNEKVLPKHSLLYEYFTVYNELTKVKYVTEGMRKPAFLSGEQKKAIVDLLFKTNRKVTVKQLKEDYFKKIECFDSVEISGVEDRFNASLGTYHDLLKIIKDKDFLDNEENEDILEDIVLTLTLFEDREMIEERLKTYAHLFDDKVMKQLKRRRYTGWGRLSRKLINGIRDKQSGKTILDFLKSDGFANRNFMQLIHDDSLTFKEDIQKAQVSGQGDSLHEHIANLAGSPAIKKGILQTVKVVDELVKVMGRHKPENIVIEMARENQTTQKGQKNSRERMKRIEEGIKELGSQILKEHPVENTQLQNEKLYLYYLQNGRDMYVDQELDINRLSDYDVDHIVPQSFLKDDSIDNKVLTRSDKARGKSDNVPSEEVVKKMKNYWRQLLNAKLITQRKFDNLTKAERGGLSELDKAGFIKRQLVETRQITKHVAQILDSRMNTKYDENDKLIREVKVITLKSKLVSDFRKDFQFYKVREINNYHHAHDAYLNAVVGTALIKKYPKLESEFVYGDYKVYDVRKMIAKSEQEIGKATAKYFFYSNIMNFFKTEITLANGEIRKRPLIETNGETGEIVWDKGRDFATVRKVLSMPQVNIVKKTEVQTGGFSKESILPKRNSDKLIARKKDWDPKKYGGFDSPTVAYSVLVVAKVEKGKSKKLKSVKELLGITIMERSSFEKNPIDFLEAKGYKEVKKDLIIKLPKYSLFELENGRKRMLASAGELQKGNELALPSKYVNFLYLASHYEKLKGSPEDNEQKQLFVEQHKHYLDEIIEQISEFSKRVILADANLDKVLSAYNKHRDKPIREQAENIIHLFTLTNLGAPAAFKYFDTTIDRKRYTSTKEVLDATLIHQSITGLYETRIDLSQLGGDGGEAAAKGGGGSSGGVPWILKKPLELTIKLDLEEQQGTLLNNSILSKKGKEELKQLFEKYSALWQSWENQVGHRRIRPHKIATGTVKPTPQKQYHINPKAKPDIQIVINDLLKQGVLIQKESTMNTPVYPVPKPNGRWRMVLDYRAVNKVTPLIAVQNQHSYGILGSLFKGRYKTTIDLSNGFWAHPIVPEDYWITAFTWQGKQYCWTVLPQGFLNSPGLFTGDVVDLLQGIPNVEVYVDDVYISHDSEKEHLEYLDILFNRLKEAGYIISLKKSNIANSIVDFLGFQITNEGRGLTDTFKEKLENITAPTTLKQLQSILGLLNFARNFIPDFTELIAPLYALIPKSTKNYVPWQIEHSTTLETLITKLNGAEYLQGRKGDKTLIMKVNASYTTGYIRYYNEGEKKPISYVSIVFSKTELKFTELEKLLTTVHKGLLKALDLSMGQNIHVYSPIVSMQNIQKTPQTAKKALASRWLSWLSYLEDPRIRFFYDPQMPALKDLPAVDTGKDNKKHPSNFQHIFYTDGSAITSPTKEGHLNAGMGIVYFINKDGNLQKQQEWSISLGNHTAQFAEIAAFEFALKKCLPLGGNILVVTDSNYVAKAYNEELDVWASNGFVNNRKKPLKHISKWKSVADLKRLRPDVVVTHEPGHQKLDSSPHAYGNNLADQLATQASFKVHAGKRTADGSEFEKRTADGSEFESPKKKAKVE

SEQ ID NO: 7323 - protein, 2095 aa, synthetic construct
MPAAKRVKLDGGDKKYSIGLDIGTNSVGWAVITDEYKVPSKKFKVLGNTDRHSIKKNLIGALLFDSGETAEATRLKRTARRRYTRRKNRICYLQEIFSNEMAKVDDSFFHRLEESFLVEEDKKHERHPIFGNIVDEVAYHEKYPTIYHLRKKLVDSTDKADLRLIYLALAHMIKFRGHFLIEGDLNPDNSDVDKLFIQLVQTYNQLFEENPINASGVDAKAILSARLSKSRRLENLIAQLPGEKKNGLFGNLIALSLGLTPNFKSNFDLAEDAKLQLSKDTYDDDLDNLLAQIGDQYADLFLAAKNLSDAILLSDILRVNTEITKAPLSASMIKRYDEHHQDLTLLKALVRQQLPEKYKEIFFDQSKNGYAGYIDGGASQEEFYKFIKPILEKMDGTEELLVKLNREDLLRKQRTFDNGSIPHQIHLGELHAILRRQEDFYPFLKDNREKIEKILTFRIPYYVGPLARGNSRFAWMTRKSEETITPWNFEEVVDKGASAQSFIERMTNFDKNLPNEKVLPKHSLLYEYFTVYNELTKVKYVTEGMRKPAFLSGEQKKAIVDLLFKTNRKVTVKQLKEDYFKKIECFDSVEISGVEDRFNASLGTYHDLLKIIKDKDFLDNEENEDILEDIVLTLTLFEDREMIEERLKTYAHLFDDKVMKQLKRRRYTGWGRLSRKLINGIRDKQSGKTILDFLKSDGFANRNFMQLIHDDSLTFKEDIQKAQVSGQGDSLHEHIANLAGSPAIKKGILQTVKVVDELVKVMGRHKPENIVIEMARENQTTQKGQKNSRERMKRIEEGIKELGSQILKEHPVENTQLQNEKLYLYYLQNGRDMYVDQELDINRLSDYDVDHIVPQSFLKDDSIDNKVLTRSDKARGKSDNVPSEEVVKKMKNYWRQLLNAKLITQRKFDNLTKAERGGLSELDKAGFIKRQLVETRQITKHVAQILDSRMNTKYDENDKLIREVKVITLKSKLVSDFRKDFQFYKVREINNYHHAHDAYLNAVVGTALIKKYPKLESEFVYGDYKVYDVRKMIAKSEQEIGKATAKYFFYSNIMNFFKTEITLANGEIRKRPLIETNGETGEIVWDKGRDFATVRKVLSMPQVNIVKKTEVQTGGFSKESILPKRNSDKLIARKKDWDPKKYGGFDSPTVAYSVLVVAKVEKGKSKKLKSVKELLGITIMERSSFEKNPIDFLEAKGYKEVKKDLIIKLPKYSLFELENGRKRMLASAGELQKGNELALPSKYVNFLYLASHYEKLKGSPEDNEQKQLFVEQHKHYLDEIIEQISEFSKRVILADANLDKVLSAYNKHRDKPIREQAENIIHLFTLTNLGAPAAFKYFDTTIDRKRYTSTKEVLDATLIHQSITGLYETRIDLSQLGGDGGEAAAKGGGGSSGGTLQLEEEYRLFEPESTQKQEMDIWLKNFPQAWAETGGMGTAHCQAPVLIQLKATATPISIRQYPMPHEAYQGIKPHIRRMLDQGILKPCQSPWNTPLLPVKKPGTEDYRPVQDLREVNKRVEDIHPTVPNPYNLLSTLPPSHPWYTVLDLKDAFFCLRLHSESQLLFAFEWRDPEIGLSGQLTWTRLPQGFKNSPTLFNEALHSDLADFRVRYPALVLLQYVDDLLLAAATRTECLEGTKALLETLGNKGYRASAKKAQICLQEVTYLGYSLKDGQRWLTKARKEAILSIPVPKNSRQVREFLGTAGYCRLWIPGFAELAAPLYPLTRPGTLFQWGTEQQLAFEDIKKALLSSPALGLPDITKPFELFIDENSGFAKGVLVQKLGPWKRPVAYLSKKLDTVASGWPPCLRMVAAIAILVKDAGKLTLGQPLTILTSHPVEALVRQPPNKWLSNARMTHYQAMLLDAERVHFGPTVSLNPATLLPLPSGGNHHDCLQILAETHGTRPDLTDQPLPDADLTWYTDGSSFIRNGEREAGAAVTTESEVIWAAPLPPGTSAQRAELIALTQALKMAEGKKLTVYTDSRYAFATTHVHGEIYRRRGWLTSEGKEIKNKNEILALLEALFLPKRLSIIHCPGHQKGDSPQAKGNRLADDTAKKAATETHSSLTVLPAGKRTADGSEFEKRTADGSEFESPKKKAKVE

SEQ ID NO: 7324 - protein, 2095 aa, synthetic construct
MPAAKRVKLDGGDKKYSIGLDIGTNSVGWAVITDEYKVPSKKFKVLGNTDRHSIKKNLIGALLFDSGETAEATRLKRTARRRYTRRKNRICYLQEIFSNEMAKVDDSFFHRLEESFLVEEDKKHERHPIFGNIVDEVAYHEKYPTIYHLRKKLVDSTDKADLRLIYLALAHMIKFRGHFLIEGDLNPDNSDVDKLFIQLVQTYNQLFEENPINASGVDAKAILSARLSKSRRLENLIAQLPGEKKNGLFGNLIALSLGLTPNFKSNFDLAEDAKLQLSKDTYDDDLDNLLAQIGDQYADLFLAAKNLSDAILLSDILRVNTEITKAPLSASMIKRYDEHHQDLTLLKALVRQQLPEKYKEIFFDQSKNGYAGYIDGGASQEEFYKFIKPILEKMDGTEELLVKLNREDLLRKQRTFDNGSIPHQIHLGELHAILRRQEDFYPFLKDNREKIEKILTFRIPYYVGPLARGNSRFAWMTRKSEETITPWNFEEVVDKGASAQSFIERMTNFDKNLPNEKVLPKHSLLYEYFTVYNELTKVKYVTEGMRKPAFLSGEQKKAIVDLLFKTNRKVTVKQLKEDYFKKIECFDSVEISGVEDRFNASLGTYHDLLKIIKDKDFLDNEENEDILEDIVLTLTLFEDREMIEERLKTYAHLFDDKVMKQLKRRRYTGWGRLSRKLINGIRDKQSGKTILDFLKSDGFANRNFMQLIHDDSLTFKEDIQKAQVSGQGDSLHEHIANLAGSPAIKKGILQTVKVVDELVKVMGRHKPENIVIEMARENQTTQKGQKNSRERMKRIEEGIKELGSQILKEHPVENTQLQNEKLYLYYLQNGRDMYVDQELDINRLSDYDVDHIVPQSFLKDDSIDNKVLTRSDKARGKSDNVPSEEVVKKMKNYWRQLLNAKLITQRKFDNLTKAERGGLSELDKAGFIKRQLVETRQITKHVAQILDSRMNTKYDENDKLIREVKVITLKSKLVSDFRKDFQFYKVREINNYHHAHDAYLNAVVGTALIKKYPKLESEFVYGDYKVYDVRKMIAKSEQEIGKATAKYFFYSNIMNFFKTEITLANGEIRKRPLIETNGETGEIVWDKGRDFATVRKVLSMPQVNIVKKTEVQTGGFSKESILPKRNSDKLIARKKDWDPKKYGGFDSPTVAYSVLVVAKVEKGKSKKLKSVKELLGITIMERSSFEKNPIDFLEAKGYKEVKKDLIIKLPKYSLFELENGRKRMLASAGELQKGNELALPSKYVNFLYLASHYEKLKGSPEDNEQKQLFVEQHKHYLDEIIEQISEFSKRVILADANLDKVLSAYNKHRDKPIREQAENIIHLFTLTNLGAPAAFKYFDTTIDRKRYTSTKEVLDATLIHQSITGLYETRIDLSQLGGDGGEAAAKGGGGSSGGTLQLEEEYRLFEPESTQKQEMDIWLKNFPQAWAETGGMGTAHCQAPVLIQLKATATPISIRQYPMPHEAYQGIKPHIRRMLDQGILKPCQSPWNTPLLPVKKPGTEDYRPVQDLREVNKRVEDIHPTVPNPYNLLSTLPPSHPWYTVLDLKDAFFCLRLHSESQLLFAFEWRDPEIGLSGQLTWTRLPQGFKNSPTLFNEALHSDLADFRVRYPALVLLQYVDDLLLAAATRTECLEGTKALLETLGNKGYRASAKKAQICLQEVTYLGYSLKDGQRWLTKARKEAILSIPVPKNSRQVREFLGKAGYCRLFIPGFAELAAPLYPLTRPGTLFQWGTEQQLAFEDIKKALLSSPALGLPDITKPFELFIDENSGFAKGVLVQKLGPWKRPVAYLSKKLDTVASGWPPCLRMVAAIAILVKDAGKLTLGQPLTILTSHPVEALVRQPPNKWLSNARMTHYQAMLLDAERVHFGPTVSLNPATLLPLPSGGNHHDCLQILAETHGTRPDLTDQPLPDADLTWYTDGSSFIRNGEREAGAAVTTESEVIWAAPLPPGTSAQRAELIALTQALKMAEGKKLTVYTDSRYAFATTHVHGEIYRRRGWLTSEGKEIKNKNEILALLEALFLPKRLSIIHCPGHQKGDSPQAKGNRLADDTAKKAATETHSSLTVLPAGKRTADGSEFEKRTADGSEFESPKKKAKVE

SEQ ID NO: 7325 - protein, 2176 aa, synthetic construct
MPAAKRVKLDGGDKKYSIGLDIGTNSVGWAVITDEYKVPSKKFKVLGNTDRHSIKKNLIGALLFDSGETAEATRLKRTARRRYTRRKNRICYLQEIFSNEMAKVDDSFFHRLEESFLVEEDKKHERHPIFGNIVDEVAYHEKYPTIYHLRKKLVDSTDKADLRLIYLALAHMIKFRGHFLIEGDLNPDNSDVDKLFIQLVQTYNQLFEENPINASGVDAKAILSARLSKSRRLENLIAQLPGEKKNGLFGNLIALSLGLTPNFKSNFDLAEDAKLQLSKDTYDDDLDNLLAQIGDQYADLFLAAKNLSDAILLSDILRVNTEITKAPLSASMIKRYDEHHQDLTLLKALVRQQLPEKYKEIFFDQSKNGYAGYIDGGASQEEFYKFIKPILEKMDGTEELLVKLNREDLLRKQRTFDNGSIPHQIHLGELHAILRRQEDFYPFLKDNREKIEKILTFRIPYYVGPLARGNSRFAWMTRKSEETITPWNFEEVVDKGASAQSFIERMTNFDKNLPNEKVLPKHSLLYEYFTVYNELTKVKYVTEGMRKPAFLSGEQKKAIVDLLFKTNRKVTVKQLKEDYFKKIECFDSVEISGVEDRFNASLGTYHDLLKIIKDKDFLDNEENEDILEDIVLTLTLFEDREMIEERLKTYAHLFDDKVMKQLKRRRYTGWGRLSRKLINGIRDKQSGKTILDFLKSDGFANRNFMQLIHDDSLTFKEDIQKAQVSGQGDSLHEHIANLAGSPAIKKGILQTVKVVDELVKVMGRHKPENIVIEMARENQTTQKGQKNSRERMKRIEEGIKELGSQILKEHPVENTQLQNEKLYLYYLQNGRDMYVDQELDINRLSDYDVDHIVPQSFLKDDSIDNKVLTRSDKARGKSDNVPSEEVVKKMKNYWRQLLNAKLITQRKFDNLTKAERGGLSELDKAGFIKRQLVETRQITKHVAQILDSRMNTKYDENDKLIREVKVITLKSKLVSDFRKDFQFYKVREINNYHHAHDAYLNAVVGTALIKKYPKLESEFVYGDYKVYDVRKMIAKSEQEIGKATAKYFFYSNIMNFFKTEITLANGEIRKRPLIETNGETGEIVWDKGRDFATVRKVLSMPQVNIVKKTEVQTGGFSKESILPKRNSDKLIARKKDWDPKKYGGFDSPTVAYSVLVVAKVEKGKSKKLKSVKELLGITIMERSSFEKNPIDFLEAKGYKEVKKDLIIKLPKYSLFELENGRKRMLASAGELQKGNELALPSKYVNFLYLASHYEKLKGSPEDNEQKQLFVEQHKHYLDEIIEQISEFSKRVILADANLDKVLSAYNKHRDKPIREQAENIIHLFTLTNLGAPAAFKYFDTTIDRKRYTSTKEVLDATLIHQSITGLYETRIDLSQLGGDGGEAAAKGGGGSSGGMNPLQLLQPLPAEIKGTKLLAHWNSGATITCIPESFLEDEQPIKKTLIKTIHGEKQQNVYYVTFKVKGRKVEAEVIASPYEYILLSPTDVPWLTQQPLQLTILVPLQEYQEKILSKTALPEDQKQQLKTLFVKYDNLWQHWENQVGHRKIRPHNIATGDYPPRPQKQYPINPKAKPSIQIVIDDLLKQGVLTPQNSTMNTPVYPVPKPDGRWRMVLDYREVNKTIPLTAAQNQHSAGILATIVRQKYKTTLDLANGFWAHPITPESYWLTAFTWQGKQYCWTRLPQGFLNSPALFTADVVDLLKEIPNVQVYVDDIYLSHDDPKEHVQQLEKVFQILLQAGYVVSLKKSEIGQKTVEFLGFNITKEGRGLTDTFKTKLLNITPPKDLKQLQSILGLLNFARNFIPNFAELVQPLYNLIASAKGKYIEWSEENTKQLNMVIEALNTASNLEERLPEQRLVIKVNTSPSAGYVRYYNETGKKPIMYLNYVFSKAELKFSMLEKLLTTMHKALIKAMDLAMGQEILVYSPIVSMTKIQKTPLPERKALPIRWITWMTYLEDPRIQFHYDKTLPELKHIPDVYTSSQSPVKHPSQYEGVFYTDGSAIKSPDPTKSNNAGMGIVHATYKPEYQVLNQWSIPLGNHTAQMAEIAAVEFACKKALKIPGPVLVITDSFYVAESANKELPYWKSNGFVNNKKKPLKHISKWKSIAECLSMKPDITIQHEKGISLQIPVFILKGNALADKLATQGSYVVNAGKRTADGSEFEKRTADGSEFESPKKKAKVE

SEQ ID NO: 7326 - protein, 2094 aa, synthetic construct
MPAAKRVKLDGGDKKYSIGLDIGTNSVGWAVITDEYKVPSKKFKVLGNTDRHSIKKNLIGALLFDSGETAEATRLKRTARRRYTRRKNRICYLQEIFSNEMAKVDDSFFHRLEESFLVEEDKKHERHPIFGNIVDEVAYHEKYPTIYHLRKKLVDSTDKADLRLIYLALAHMIKFRGHFLIEGDLNPDNSDVDKLFIQLVQTYNQLFEENPINASGVDAKAILSARLSKSRRLENLIAQLPGEKKNGLFGNLIALSLGLTPNFKSNFDLAEDAKLQLSKDTYDDDLDNLLAQIGDQYADLFLAAKNLSDAILLSDILRVNTEITKAPLSASMIKRYDEHHQDLTLLKALVRQQLPEKYKEIFFDQSKNGYAGYIDGGASQEEFYKFIKPILEKMDGTEELLVKLNREDLLRKQRTFDNGSIPHQIHLGELHAILRRQEDFYPFLKDNREKIEKILTFRIPYYVGPLARGNSRFAWMTRKSEETITPWNFEEVVDKGASAQSFIERMTNFDKNLPNEKVLPKHSLLYEYFTVYNELTKVKYVTEGMRKPAFLSGEQKKAIVDLLFKTNRKVTVKQLKEDYFKKIECFDSVEISGVEDRFNASLGTYHDLLKIIKDKDFLDNEENEDILEDIVLTLTLFEDREMIEERLKTYAHLFDDKVMKQLKRRRYTGWGRLSRKLINGIRDKQSGKTILDFLKSDGFANRNFMQLIHDDSLTFKEDIQKAQVSGQGDSLHEHIANLAGSPAIKKGILQTVKVVDELVKVMGRHKPENIVIEMARENQTTQKGQKNSRERMKRIEEGIKELGSQILKEHPVENTQLQNEKLYLYYLQNGRDMYVDQELDINRLSDYDVDHIVPQSFLKDDSIDNKVLTRSDKARGKSDNVPSEEVVKKMKNYWRQLLNAKLITQRKFDNLTKAERGGLSELDKAGFIKRQLVETRQITKHVAQILDSRMNTKYDENDKLIREVKVITLKSKLVSDFRKDFQFYKVREINNYHHAHDAYLNAVVGTALIKKYPKLESEFVYGDYKVYDVRKMIAKSEQEIGKATAKYFFYSNIMNFFKTEITLANGEIRKRPLIETNGETGEIVWDKGRDFATVRKVLSMPQVNIVKKTEVQTGGFSKESILPKRNSDKLIARKKDWDPKKYGGFDSPTVAYSVLVVAKVEKGKSKKLKSVKELLGITIMERSSFEKNPIDFLEAKGYKEVKKDLIIKLPKYSLFELENGRKRMLASAGELQKGNELALPSKYVNFLYLASHYEKLKGSPEDNEQKQLFVEQHKHYLDEIIEQISEFSKRVILADANLDKVLSAYNKHRDKPIREQAENIIHLFTLTNLGAPAAFKYFDTTIDRKRYTSTKEVLDATLIHQSITGLYETRIDLSQLGGDGGEAAAKGGGGSSGGVLNLEEEYRLHEKPVPSSIDPSWLQLFPTVWAERAGMGLANQVPPVVVELRSGASPVAVRQYPMSKEAREGIRPHIQKFLDLGVLVPCRSPWNTPLLPVKKPGTNDYRPVQDLREINKRVQDIHPTVPNPYNLLSSLPPSYTWYSVLDLKDAFFCLRLHPNSQPLFAFEWKDPEKGNTGQLTWTRLPQGFKNSPTLFNEALHRDLAPFRALNPQVVLLQYVDDLLVAAPTYEDCKKGTQKLLQELSKLGYRVSAKKAQLCQREVTYLGYLLKEGKRWLTPARKATVMKIPVPTTPRQVREFLGTAGFCRLWIPGFASLAAPLYPLTKPSIPFIWTEEHQQAFDHIKKALLSAPALALPDLTKPFTLYIDERAGVARGVLTQTLGPWRRPVAYLSKKLDPVASGWPTCLKAVAAVALLLKDADKLTLGQNVTVIASHSLESIVRQPPDRWMTNARMTHYQSLLLNERVSFAPPAVLNPATLLPVESEATPVHRCSEILAEETGTRRDLEDQPLPGVPTWYTDGSSFITEGKRRAGAPIVDGKRTVWASSLPEGTSAQKAELVALTQALRLAEGKNINIYTDSRYAFATAHIHGAIYKQRGWLTSAGKDIKNKEEILALLEAIHLPRRVAIIHCPGHQRGSNPVATGNRRADEAAKQAALSTRVLAGTTKPAGKRTADGSEFEKRTADGSEFESPKKKAKVE

SEQ ID NO: 7327 - protein, 2218 aa, synthetic construct
MPAAKRVKLDGGDKKYSIGLDIGTNSVGWAVITDEYKVPSKKFKVLGNTDRHSIKKNLIGALLFDSGETAEATRLKRTARRRYTRRKNRICYLQEIFSNEMAKVDDSFFHRLEESFLVEEDKKHERHPIFGNIVDEVAYHEKYPTIYHLRKKLVDSTDKADLRLIYLALAHMIKFRGHFLIEGDLNPDNSDVDKLFIQLVQTYNQLFEENPINASGVDAKAILSARLSKSRRLENLIAQLPGEKKNGLFGNLIALSLGLTPNFKSNFDLAEDAKLQLSKDTYDDDLDNLLAQIGDQYADLFLAAKNLSDAILLSDILRVNTEITKAPLSASMIKRYDEHHQDLTLLKALVRQQLPEKYKEIFFDQSKNGYAGYIDGGASQEEFYKFIKPILEKMDGTEELLVKLNREDLLRKQRTFDNGSIPHQIHLGELHAILRRQEDFYPFLKDNREKIEKILTFRIPYYVGPLARGNSRFAWMTRKSEETITPWNFEEVVDKGASAQSFIERMTNFDKNLPNEKVLPKHSLLYEYFTVYNELTKVKYVTEGMRKPAFLSGEQKKAIVDLLFKTNRKVTVKQLKEDYFKKIECFDSVEISGVEDRFNASLGTYHDLLKIIKDKDFLDNEENEDILEDIVLTLTLFEDREMIEERLKTYAHLFDDKVMKQLKRRRYTGWGRLSRKLINGIRDKQSGKTILDFLKSDGFANRNFMQLIHDDSLTFKEDIQKAQVSGQGDSLHEHIANLAGSPAIKKGILQTVKVVDELVKVMGRHKPENIVIEMARENQTTQKGQKNSRERMKRIEEGIKELGSQILKEHPVENTQLQNEKLYLYYLQNGRDMYVDQELDINRLSDYDVDHIVPQSFLKDDSIDNKVLTRSDKARGKSDNVPSEEVVKKMKNYWRQLLNAKLITQRKFDNLTKAERGGLSELDKAGFIKRQLVETRQITKHVAQILDSRMNTKYDENDKLIREVKVITLKSKLVSDFRKDFQFYKVREINNYHHAHDAYLNAVVGTALIKKYPKLESEFVYGDYKVYDVRKMIAKSEQEIGKATAKYFFYSNIMNFFKTEITLANGEIRKRPLIETNGETGEIVWDKGRDFATVRKVLSMPQVNIVKKTEVQTGGFSKESILPKRNSDKLIARKKDWDPKKYGGFDSPTVAYSVLVVAKVEKGKSKKLKSVKELLGITIMERSSFEKNPIDFLEAKGYKEVKKDLIIKLPKYSLFELENGRKRMLASAGELQKGNELALPSKYVNFLYLASHYEKLKGSPEDNEQKQLFVEQHKHYLDEIIEQISEFSKRVILADANLDKVLSAYNKHRDKPIREQAENIIHLFTLTNLGAPAAFKYFDTTIDRKRYTSTKEVLDATLIHQSITGLYETRIDLSQLGGDGGEAAAKGGGGSSGGTLGDQGSRGSDPLPEPRVTLTVEGIPTEFLVNTGAEHSVLTKPMGKMGSKRTVVAGATGSKVYPWTTKRLLKIGQKQVTHSFLVIPECPAPLLGRDLLTKLKAQIQFSTEGPQVTWEDRPAMCLVLNLEEEYRLHEKPVPPSIDPSWLQLFPMVWAEKAGMGLANQVPPVVVELKSDASPVAVRQYPMSKEAREGIRPHIQRFLDLGILVPCQSPWNTPLLPVKKPGTNDYRPVQDLREVNKRVQDIHPTVPNPYNLLSSLPPSHTWYSVLDLKDAFFCLKLHPNSQPLFAFEWRDPEKGNTGQLTWTRLPQGFKNSPTLFNEALHRDLASFRALNPQVVMLQYVDDLLVAAPTYRDCKEGTRRLLQELSKLGYRVSAKKAQLCREEVTYLGYLLKGGKRWLTPARKATVMKIPTPTTPRQVREFLGTAGFCRLWIPGFASLAAPLYPLTRPKVPFTWTEAHQEAFGRIKEALLSAPALALPDLTKPFALYVDEKEGVARGVLTQTLGPWRRPVAYLSKKLDPVASGWPTCLKAIAAVALLLKDADKLTLGQNVLVIAPHNLESIVRQPPDRWMTNARMTHYQSLLLNERVSFAPPAILNPATLLPVESDDTPIHICSEILAEETGTRPDLRDQPLPGVPAWYTDGSSFIMDGRRQAGAAIVDNKRTVWASNLPEGTSAQKAELIALTQALRLAEGKSINIYTDSRYAFATAHVHGAIYKQRGWLTSAGKDIKNKEEILALLEAIHLPKRVAIIHCPGHQRGTDPVATGNRKADEAAKQAAQSTRILTETTKNAGKRTADGSEFEKRTADGSEFESPKKKAKVE

SEQ ID NO: 7328 - protein, 2096 aa, synthetic construct
MPAAKRVKLDGGDKKYSIGLDIGTNSVGWAVITDEYKVPSKKFKVLGNTDRHSIKKNLIGALLFDSGETAEATRLKRTARRRYTRRKNRICYLQEIFSNEMAKVDDSFFHRLEESFLVEEDKKHERHPIFGNIVDEVAYHEKYPTIYHLRKKLVDSTDKADLRLIYLALAHMIKFRGHFLIEGDLNPDNSDVDKLFIQLVQTYNQLFEENPINASGVDAKAILSARLSKSRRLENLIAQLPGEKKNGLFGNLIALSLGLTPNFKSNFDLAEDAKLQLSKDTYDDDLDNLLAQIGDQYADLFLAAKNLSDAILLSDILRVNTEITKAPLSASMIKRYDEHHQDLTLLKALVRQQLPEKYKEIFFDQSKNGYAGYIDGGASQEEFYKFIKPILEKMDGTEELLVKLNREDLLRKQRTFDNGSIPHQIHLGELHAILRRQEDFYPFLKDNREKIEKILTFRIPYYVGPLARGNSRFAWMTRKSEETITPWNFEEVVDKGASAQSFIERMTNFDKNLPNEKVLPKHSLLYEYFTVYNELTKVKYVTEGMRKPAFLSGEQKKAIVDLLFKTNRKVTVKQLKEDYFKKIECFDSVEISGVEDRFNASLGTYHDLLKIIKDKDFLDNEENEDILEDIVLTLTLFEDREMIEERLKTYAHLFDDKVMKQLKRRRYTGWGRLSRKLINGIRDKQSGKTILDFLKSDGFANRNFMQLIHDDSLTFKEDIQKAQVSGQGDSLHEHIANLAGSPAIKKGILQTVKVVDELVKVMGRHKPENIVIEMARENQTTQKGQKNSRERMKRIEEGIKELGSQILKEHPVENTQLQNEKLYLYYLQNGRDMYVDQELDINRLSDYDVDHIVPQSFLKDDSIDNKVLTRSDKARGKSDNVPSEEVVKKMKNYWRQLLNAKLITQRKFDNLTKAERGGLSELDKAGFIKRQLVETRQITKHVAQILDSRMNTKYDENDKLIREVKVITLKSKLVSDFRKDFQFYKVREINNYHHAHDAYLNAVVGTALIKKYPKLESEFVYGDYKVYDVRKMIAKSEQEIGKATAKYFFYSNIMNFFKTEITLANGEIRKRPLIETNGETGEIVWDKGRDFATVRKVLSMPQVNIVKKTEVQTGGFSKESILPKRNSDKLIARKKDWDPKKYGGFDSPTVAYSVLVVAKVEKGKSKKLKSVKELLGITIMERSSFEKNPIDFLEAKGYKEVKKDLIIKLPKYSLFELENGRKRMLASAGELQKGNELALPSKYVNFLYLASHYEKLKGSPEDNEQKQLFVEQHKHYLDEIIEQISEFSKRVILADANLDKVLSAYNKHRDKPIREQAENIIHLFTLTNLGAPAAFKYFDTTIDRKRYTSTKEVLDATLIHQSITGLYETRIDLSQLGGDGGEAAAKGGGGSSGGTLGIEDEYRLHETSTEPDVSLGSTWLSDFPQAWAETGGMGLAVRQAPLIIPLKATSTPVSIQQYPMSHEARLGIKPHIQRLLDQGILVPCQSPWNTPLLPVKKPGTNDYRPVQDLREVNKRVEDIHPTVPNPYNLLSGLPPSHQWYTVLDLKDAFFCLRLHPTSQPLFAFEWRDPGMGISGQLTWTRLPQGFKNSPTLFNEALHRDLADFRIQHPDLILLQYVDDILLAATSELDCQQGTRALLQTLGDLGYRASAKKAQICQKQVKYLGYLLREGQRWLTEARKETVMGQPVPKTPRQLREFLGTAGFCRLWIPGFAEMAAPLYPLTKPGTLFSWGPDQQKAYQEIKQALLTAPALGLPDLTKPFELFVDEKQGYAKGVLTQKLGPWRRPVAYLSKKLDPVAAGWPPCLRMVAAIAVLTKDAGKLTMGQPLVILAPHAVEALVKQPPDRWLSNARMTHYQAMLLDTDRVQFGPVVALNPATLLPLPEEGAPHDCLEILAETHGTRPDLTDQPIPDADHTWYTDGSSFLQEGQRKAGAAVTTETEVIWAGALPAGTSAQRAELIALTQALKMAEGKRLNVYTDSRYAFATAHIHGEIYRRRGWLTSEGREIKNKSEILALLKALFLPKRLSIIHCLGHQKGDSAEARGNRLADQAAREAAIKTPPDTSTLLAGKRTADGSEFEKRTADGSEFESPKKKAKVE

SEQ ID NO: 7329 - protein, 2096 aa, synthetic construct
MPAAKRVKLDGGDKKYSIGLDIGTNSVGWAVITDEYKVPSKKFKVLGNTDRHSIKKNLIGALLFDSGETAEATRLKRTARRRYTRRKNRICYLQEIFSNEMAKVDDSFFHRLEESFLVEEDKKHERHPIFGNIVDEVAYHEKYPTIYHLRKKLVDSTDKADLRLIYLALAHMIKFRGHFLIEGDLNPDNSDVDKLFIQLVQTYNQLFEENPINASGVDAKAILSARLSKSRRLENLIAQLPGEKKNGLFGNLIALSLGLTPNFKSNFDLAEDAKLQLSKDTYDDDLDNLLAQIGDQYADLFLAAKNLSDAILLSDILRVNTEITKAPLSASMIKRYDEHHQDLTLLKALVRQQLPEKYKEIFFDQSKNGYAGYIDGGASQEEFYKFIKPILEKMDGTEELLVKLNREDLLRKQRTFDNGSIPHQIHLGELHAILRRQEDFYPFLKDNREKIEKILTFRIPYYVGPLARGNSRFAWMTRKSEETITPWNFEEVVDKGASAQSFIERMTNFDKNLPNEKVLPKHSLLYEYFTVYNELTKVKYVTEGMRKPAFLSGEQKKAIVDLLFKTNRKVTVKQLKEDYFKKIECFDSVEISGVEDRFNASLGTYHDLLKIIKDKDFLDNEENEDILEDIVLTLTLFEDREMIEERLKTYAHLFDDKVMKQLKRRRYTGWGRLSRKLINGIRDKQSGKTILDFLKSDGFANRNFMQLIHDDSLTFKEDIQKAQVSGQGDSLHEHIANLAGSPAIKKGILQTVKVVDELVKVMGRHKPENIVIEMARENQTTQKGQKNSRERMKRIEEGIKELGSQILKEHPVENTQLQNEKLYLYYLQNGRDMYVDQELDINRLSDYDVDHIVPQSFLKDDSIDNKVLTRSDKARGKSDNVPSEEVVKKMKNYWRQLLNAKLITQRKFDNLTKAERGGLSELDKAGFIKRQLVETRQITKHVAQILDSRMNTKYDENDKLIREVKVITLKSKLVSDFRKDFQFYKVREINNYHHAHDAYLNAVVGTALIKKYPKLESEFVYGDYKVYDVRKMIAKSEQEIGKATAKYFFYSNIMNFFKTEITLANGEIRKRPLIETNGETGEIVWDKGRDFATVRKVLSMPQVNIVKKTEVQTGGFSKESILPKRNSDKLIARKKDWDPKKYGGFDSPTVAYSVLVVAKVEKGKSKKLKSVKELLGITIMERSSFEKNPIDFLEAKGYKEVKKDLIIKLPKYSLFELENGRKRMLASAGELQKGNELALPSKYVNFLYLASHYEKLKGSPEDNEQKQLFVEQHKHYLDEIIEQISEFSKRVILADANLDKVLSAYNKHRDKPIREQAENIIHLFTLTNLGAPAAFKYFDTTIDRKRYTSTKEVLDATLIHQSITGLYETRIDLSQLGGDGGEAAAKGGGGSSGGTLNIEDEYRLHETSKGPDVPLGSTWLSDFPQAWAETGGMGLAVRQAPLIIPLKATSTPVSIKQYPMSQEARLGIKPHIQRLLDQGILVPCQSPWNTPLLPVKKPGTNDYRPVQDLREVNKRVEDIHPTVPNPYNLLSGLPPSHQWYTVLDLKDAFFCLRLHPTSQSLFAFEWRDPEMGISGQLTWTRLPQGFKNSPTLFNEALHRDLADFRIQHPDLILLQYVDDLLLAATSELDCQQGTRALLQTLGDLGYRASAKKAQICQKQVKYLGYLLKEGQRWLTEARKETVMGQPTPKTPRQLREFLGKAGFCRLFIPGFAEMAAPLYPLTKPGTLFEWGPDQQKAYQEIKQALLTAPALGLPDLTKPFELFVDEKQGYAKGVLTQKLGPWRRPVAYLSKKLDPVAAGWPPCLRMVAAIAVLTKDAGKLTMGQPLVILAPHAVEALVKQPPDRWLSNARMTHYQALLLDTDRVQFGPIVALNPATLLPLPEEGLQHDCLDILAEAHGTRPDLTDQPLPDADHTWYTDGSSFLQEGQRKAGAAVTTETEVVWAKALPAGTSAQRAELIALTQALKMAEGKKLNVYTDSRYAFATAHIHGEIYRRRGWLTSEGKEIKNKDEILALLKALFLPKRLSIIHCPGHQKGNRAEARGNRMADQAAREVATRETPETSTLLAGKRTADGSEFEKRTADGSEFESPKKKAKVE

SEQ ID NO: 7330 - protein, 2096 aa, synthetic construct
MPAAKRVKLDGGDKKYSIGLDIGTNSVGWAVITDEYKVPSKKFKVLGNTDRHSIKKNLIGALLFDSGETAEATRLKRTARRRYTRRKNRICYLQEIFSNEMAKVDDSFFHRLEESFLVEEDKKHERHPIFGNIVDEVAYHEKYPTIYHLRKKLVDSTDKADLRLIYLALAHMIKFRGHFLIEGDLNPDNSDVDKLFIQLVQTYNQLFEENPINASGVDAKAILSARLSKSRRLENLIAQLPGEKKNGLFGNLIALSLGLTPNFKSNFDLAEDAKLQLSKDTYDDDLDNLLAQIGDQYADLFLAAKNLSDAILLSDILRVNTEITKAPLSASMIKRYDEHHQDLTLLKALVRQQLPEKYKEIFFDQSKNGYAGYIDGGASQEEFYKFIKPILEKMDGTEELLVKLNREDLLRKQRTFDNGSIPHQIHLGELHAILRRQEDFYPFLKDNREKIEKILTFRIPYYVGPLARGNSRFAWMTRKSEETITPWNFEEVVDKGASAQSFIERMTNFDKNLPNEKVLPKHSLLYEYFTVYNELTKVKYVTEGMRKPAFLSGEQKKAIVDLLFKTNRKVTVKQLKEDYFKKIECFDSVEISGVEDRFNASLGTYHDLLKIIKDKDFLDNEENEDILEDIVLTLTLFEDREMIEERLKTYAHLFDDKVMKQLKRRRYTGWGRLSRKLINGIRDKQSGKTILDFLKSDGFANRNFMQLIHDDSLTFKEDIQKAQVSGQGDSLHEHIANLAGSPAIKKGILQTVKVVDELVKVMGRHKPENIVIEMARENQTTQKGQKNSRERMKRIEEGIKELGSQILKEHPVENTQLQNEKLYLYYLQNGRDMYVDQELDINRLSDYDVDHIVPQSFLKDDSIDNKVLTRSDKARGKSDNVPSEEVVKKMKNYWRQLLNAKLITQRKFDNLTKAERGGLSELDKAGFIKRQLVETRQITKHVAQILDSRMNTKYDENDKLIREVKVITLKSKLVSDFRKDFQFYKVREINNYHHAHDAYLNAVVGTALIKKYPKLESEFVYGDYKVYDVRKMIAKSEQEIGKATAKYFFYSNIMNFFKTEITLANGEIRKRPLIETNGETGEIVWDKGRDFATVRKVLSMPQVNIVKKTEVQTGGFSKESILPKRNSDKLIARKKDWDPKKYGGFDSPTVAYSVLVVAKVEKGKSKKLKSVKELLGITIMERSSFEKNPIDFLEAKGYKEVKKDLIIKLPKYSLFELENGRKRMLASAGELQKGNELALPSKYVNFLYLASHYEKLKGSPEDNEQKQLFVEQHKHYLDEIIEQISEFSKRVILADANLDKVLSAYNKHRDKPIREQAENIIHLFTLTNLGAPAAFKYFDTTIDRKRYTSTKEVLDATLIHQSITGLYETRIDLSQLGGDGGEAAAKGGGGSSGGTLNIEDEHRLHETSKEPDVSLGSTWLSDFPQAWAETGGMGLAVRQAPLIIPLKATSTPVSIKQYPMSQEARLGIKPHIQRLLDQGILVPCQSPWNTPLLPVKKPGTNDYRPVQDLREVNKRVEDIHPTVPNPYNLLSGLPPSHQWYTVLDLKDAFFCLRLHPTSQPLFAFEWRDPEMGISGQLTWTRLPQGFKNSPTLFDEALHRDLADFRIQHPDLILLQYVDDLLLAATSELDCQQGTRALLQTLGNLGYRASAKKAQICQKQVKYLGYLLKEGQRWLTEARKETVMGQPTPKTPRQLREFLGTAGFCRLWIPGFAEMAAPLYPLTKTGTLFNWGPDQQKAYQEIKQALLTAPALGLPDLTKPFELFVDEKQGYAKGVLTQKLGPWRRPVAYLSKKLDPVAAGWPPCLRMVAAIAVLTKDAGKLTMGQPLVILAPHAVEALVKQPPDRWLSNARMTHYQALLLDTDRVQFGPVVALNPATLLPLPEEGLQHNCLDILAEAHGTRPDLTDQPLPDADHTWYTDGSSLLQEGQRKAGAAVTTETEVIWAKALPAGTSAQRAELIALTQALKMAEGKKLNVYTDSRYAFATAHIHGEIYRRRGLLTSEGKEIKNKDEILALLKALFLPKRLSIIHCPGHQKGHSAEARGNRMADQAARKAAITETPDTSTLLAGKRTADGSEFEKRTADGSEFESPKKKAKVE

SEQ ID NO: 7331 - protein, 2096 aa, synthetic construct
MPAAKRVKLDGGDKKYSIGLDIGTNSVGWAVITDEYKVPSKKFKVLGNTDRHSIKKNLIGALLFDSGETAEATRLKRTARRRYTRRKNRICYLQEIFSNEMAKVDDSFFHRLEESFLVEEDKKHERHPIFGNIVDEVAYHEKYPTIYHLRKKLVDSTDKADLRLIYLALAHMIKFRGHFLIEGDLNPDNSDVDKLFIQLVQTYNQLFEENPINASGVDAKAILSARLSKSRRLENLIAQLPGEKKNGLFGNLIALSLGLTPNFKSNFDLAEDAKLQLSKDTYDDDLDNLLAQIGDQYADLFLAAKNLSDAILLSDILRVNTEITKAPLSASMIKRYDEHHQDLTLLKALVRQQLPEKYKEIFFDQSKNGYAGYIDGGASQEEFYKFIKPILEKMDGTEELLVKLNREDLLRKQRTFDNGSIPHQIHLGELHAILRRQEDFYPFLKDNREKIEKILTFRIPYYVGPLARGNSRFAWMTRKSEETITPWNFEEVVDKGASAQSFIERMTNFDKNLPNEKVLPKHSLLYEYFTVYNELTKVKYVTEGMRKPAFLSGEQKKAIVDLLFKTNRKVTVKQLKEDYFKKIECFDSVEISGVEDRFNASLGTYHDLLKIIKDKDFLDNEENEDILEDIVLTLTLFEDREMIEERLKTYAHLFDDKVMKQLKRRRYTGWGRLSRKLINGIRDKQSGKTILDFLKSDGFANRNFMQLIHDDSLTFKEDIQKAQVSGQGDSLHEHIANLAGSPAIKKGILQTVKVVDELVKVMGRHKPENIVIEMARENQTTQKGQKNSRERMKRIEEGIKELGSQILKEHPVENTQLQNEKLYLYYLQNGRDMYVDQELDINRLSDYDVDHIVPQSFLKDDSIDNKVLTRSDKARGKSDNVPSEEVVKKMKNYWRQLLNAKLITQRKFDNLTKAERGGLSELDKAGFIKRQLVETRQITKHVAQILDSRMNTKYDENDKLIREVKVITLKSKLVSDFRKDFQFYKVREINNYHHAHDAYLNAVVGTALIKKYPKLESEFVYGDYKVYDVRKMIAKSEQEIGKATAKYFFYSNIMNFFKTEITLANGEIRKRPLIETNGETGEIVWDKGRDFATVRKVLSMPQVNIVKKTEVQTGGFSKESILPKRNSDKLIARKKDWDPKKYGGFDSPTVAYSVLVVAKVEKGKSKKLKSVKELLGITIMERSSFEKNPIDFLEAKGYKEVKKDLIIKLPKYSLFELENGRKRMLASAGELQKGNELALPSKYVNFLYLASHYEKLKGSPEDNEQKQLFVEQHKHYLDEIIEQISEFSKRVILADANLDKVLSAYNKHRDKPIREQAENIIHLFTLTNLGAPAAFKYFDTTIDRKRYTSTKEVLDATLIHQSITGLYETRIDLSQLGGDGGEAAAKGGGGSSGGTLNIEDEYRLHEISTEPDVSPGSTWLSDFPQAWAETGGMGLAVRQAPLIIPLKATSTPVSIKQYPMSQEAKLGIKPHIQRLLDQGILVPCQSPWNTPLLPVKKPGTNDYRPVQGLREVNKRVEDIHPTVPNPYNLLSGLPTSHRWYTVLDLKDAFFCLRLHPTSQPLFASEWRDPGMGISGQLTWTRLPQGFKNSPTLFNEALHRGLADFRIQHPDLILLQYVDDLLLAATSELDCQQGTRALLKTLGNLGYRASAKKAQICQKQVKYLGYLLREGQRWLTEARKETVMGQPTPKTPRQLREFLGTAGFCRLWIPRFAEMAAPLYPLTKPGTLFNWGPDQQKAYHEIKQALLTAPALGLPDLTKPFELFVDEKQGYAKGVLTQKLGPWRRPVAYLSKKLDPVAAGWPPCLRMVAAIAVLTKDAGKLTMGQPLVILAPHAVEALVKQPPDRWLSNARMTHYQAMLLDTDRVQFGPVVALNPATLLPLPEEGAPHDCLEILAETHGTEPDLTDQPIPDADHTWYTDGSSFLQEGQRKAGAAVTTETEVIWARALPAGTSAQRAELIALTQALKMAEGKRLNVYTDSRYAFATAHIHGEIYKRRGWLTSEGREIKNKSEILALLKALFLPKRLSIIHCLGHQKGDSAEARGNRLADQAAREAAIKTPPDTSTLLAGKRTADGSEFEKRTADGSEFESPKKKAKVE

SEQ ID NO: 7332 - protein, 2087 aa, synthetic construct
MPAAKRVKLDGGDKKYSIGLDIGTNSVGWAVITDEYKVPSKKFKVLGNTDRHSIKKNLIGALLFDSGETAEATRLKRTARRRYTRRKNRICYLQEIFSNEMAKVDDSFFHRLEESFLVEEDKKHERHPIFGNIVDEVAYHEKYPTIYHLRKKLVDSTDKADLRLIYLALAHMIKFRGHFLIEGDLNPDNSDVDKLFIQLVQTYNQLFEENPINASGVDAKAILSARLSKSRRLENLIAQLPGEKKNGLFGNLIALSLGLTPNFKSNFDLAEDAKLQLSKDTYDDDLDNLLAQIGDQYADLFLAAKNLSDAILLSDILRVNTEITKAPLSASMIKRYDEHHQDLTLLKALVRQQLPEKYKEIFFDQSKNGYAGYIDGGASQEEFYKFIKPILEKMDGTEELLVKLNREDLLRKQRTFDNGSIPHQIHLGELHAILRRQEDFYPFLKDNREKIEKILTFRIPYYVGPLARGNSRFAWMTRKSEETITPWNFEEVVDKGASAQSFIERMTNFDKNLPNEKVLPKHSLLYEYFTVYNELTKVKYVTEGMRKPAFLSGEQKKAIVDLLFKTNRKVTVKQLKEDYFKKIECFDSVEISGVEDRFNASLGTYHDLLKIIKDKDFLDNEENEDILEDIVLTLTLFEDREMIEERLKTYAHLFDDKVMKQLKRRRYTGWGRLSRKLINGIRDKQSGKTILDFLKSDGFANRNFMQLIHDDSLTFKEDIQKAQVSGQGDSLHEHIANLAGSPAIKKGILQTVKVVDELVKVMGRHKPENIVIEMARENQTTQKGQKNSRERMKRIEEGIKELGSQILKEHPVENTQLQNEKLYLYYLQNGRDMYVDQELDINRLSDYDVDHIVPQSFLKDDSIDNKVLTRSDKARGKSDNVPSEEVVKKMKNYWRQLLNAKLITQRKFDNLTKAERGGLSELDKAGFIKRQLVETRQITKHVAQILDSRMNTKYDENDKLIREVKVITLKSKLVSDFRKDFQFYKVREINNYHHAHDAYLNAVVGTALIKKYPKLESEFVYGDYKVYDVRKMIAKSEQEIGKATAKYFFYSNIMNFFKTEITLANGEIRKRPLIETNGETGEIVWDKGRDFATVRKVLSMPQVNIVKKTEVQTGGFSKESILPKRNSDKLIARKKDWDPKKYGGFDSPTVAYSVLVVAKVEKGKSKKLKSVKELLGITIMERSSFEKNPIDFLEAKGYKEVKKDLIIKLPKYSLFELENGRKRMLASAGELQKGNELALPSKYVNFLYLASHYEKLKGSPEDNEQKQLFVEQHKHYLDEIIEQISEFSKRVILADANLDKVLSAYNKHRDKPIREQAENIIHLFTLTNLGAPAAFKYFDTTIDRKRYTSTKEVLDATLIHQSITGLYETRIDLSQLGGDGGEAAAKGGGGSSGGIPWLMKKPLQLTTLVPLQEYEERLLKQTMLTGSYKEKLQSLFLKYDALWQHWENQVGHRRIKPHHIATGTVNPRPQKQYPINPKAKASIQTVINDLLKQGVLIQQNSIMNTPVYPVPKPDGKWRMVLDYREVNKTIPLIAAQNQHSAGILSSIFRGKYKTTLDLSNGFWAHSITPESYWLTAFTWLGQQYCWTRLPQGFLNSPALFNADVVDLLKEVPNVQVYVDDIYISHDDPREHLEQLEKVFSLLLNAGYVVSLKKSEIAQHEVEFLGFNITKEGRGLTETFKQKLLNITPPRDLKQLQSILGLLNFARNFIPNFSELVKPLYNIIATAPGKYITWTTDNSQQLQNIISMLNSAENLEERNPEVRLIMKVNTSPSAGYIRFYNEFAKRPIMYLNYVYTKAEVKFTNTEKLLTTIHKGLIKALDLGMGQEILVYSPIVSMTKIQKTPLPERKALPIRWITWMSYLEDPRIQFHYDKTLPELQQVPTVTDDIIAKIKHPSEFSMVFYTDGSAIKHPNVNKSHNAGMGIAQVQFKPEFTVINTWSIPLGDHTAQLAEVAAVEFACKKALKIDGPVLIVTDSFYVAESVNKELPYWQSNGFFNNKKKPLKHVSKWKSIADCIQLKPDIIIIHEKGHQPTASTFHTEGNNLADKLATQGSYVVNAGKRTADGSEFEKRTADGSEFESPKKKAKVE

SEQ ID NO: 7333 - protein, 2176 aa, synthetic construct
MPAAKRVKLDGGDKKYSIGLDIGTNSVGWAVITDEYKVPSKKFKVLGNTDRHSIKKNLIGALLFDSGETAEATRLKRTARRRYTRRKNRICYLQEIFSNEMAKVDDSFFHRLEESFLVEEDKKHERHPIFGNIVDEVAYHEKYPTIYHLRKKLVDSTDKADLRLIYLALAHMIKFRGHFLIEGDLNPDNSDVDKLFIQLVQTYNQLFEENPINASGVDAKAILSARLSKSRRLENLIAQLPGEKKNGLFGNLIALSLGLTPNFKSNFDLAEDAKLQLSKDTYDDDLDNLLAQIGDQYADLFLAAKNLSDAILLSDILRVNTEITKAPLSASMIKRYDEHHQDLTLLKALVRQQLPEKYKEIFFDQSKNGYAGYIDGGASQEEFYKFIKPILEKMDGTEELLVKLNREDLLRKQRTFDNGSIPHQIHLGELHAILRRQEDFYPFLKDNREKIEKILTFRIPYYVGPLARGNSRFAWMTRKSEETITPWNFEEVVDKGASAQSFIERMTNFDKNLPNEKVLPKHSLLYEYFTVYNELTKVKYVTEGMRKPAFLSGEQKKAIVDLLFKTNRKVTVKQLKEDYFKKIECFDSVEISGVEDRFNASLGTYHDLLKIIKDKDFLDNEENEDILEDIVLTLTLFEDREMIEERLKTYAHLFDDKVMKQLKRRRYTGWGRLSRKLINGIRDKQSGKTILDFLKSDGFANRNFMQLIHDDSLTFKEDIQKAQVSGQGDSLHEHIANLAGSPAIKKGILQTVKVVDELVKVMGRHKPENIVIEMARENQTTQKGQKNSRERMKRIEEGIKELGSQILKEHPVENTQLQNEKLYLYYLQNGRDMYVDQELDINRLSDYDVDHIVPQSFLKDDSIDNKVLTRSDKARGKSDNVPSEEVVKKMKNYWRQLLNAKLITQRKFDNLTKAERGGLSELDKAGFIKRQLVETRQITKHVAQILDSRMNTKYDENDKLIREVKVITLKSKLVSDFRKDFQFYKVREINNYHHAHDAYLNAVVGTALIKKYPKLESEFVYGDYKVYDVRKMIAKSEQEIGKATAKYFFYSNIMNFFKTEITLANGEIRKRPLIETNGETGEIVWDKGRDFATVRKVLSMPQVNIVKKTEVQTGGFSKESILPKRNSDKLIARKKDWDPKKYGGFDSPTVAYSVLVVAKVEKGKSKKLKSVKELLGITIMERSSFEKNPIDFLEAKGYKEVKKDLIIKLPKYSLFELENGRKRMLASAGELQKGNELALPSKYVNFLYLASHYEKLKGSPEDNEQKQLFVEQHKHYLDEIIEQISEFSKRVILADANLDKVLSAYNKHRDKPIREQAENIIHLFTLTNLGAPAAFKYFDTTIDRKRYTSTKEVLDATLIHQSITGLYETRIDLSQLGGDGGEAAAKGGGGSSGGMDPLQLLQPLEAEIKGTKLKAHWNSGATITCVPQAFLEEEVPIKNIWIKTIHGEKEQPVYYLTFKIQGRKVEAEVISSPYDYILVSPSDIPWLMKKPLQLTTLVPLQEYEERLLKQTMLTGSYKEKLQSLFLKYDALWQHWENQVGHRRIKPHHIATGTVNPRPQKQYPINPKAKASIQTVINDLLKQGVLIQQNSIMNTPVYPVPKPDGKWRMVLDYREVNKTIPLIAAQNQHSAGILSSIFRGKYKTTLDLSNGFWAHSITPESYWLTAFTWLGQQYCWTRLPQGFLNSPALFNADVVDLLKEVPNVQVYVDDIYISHDDPREHLEQLEKVFSLLLNAGYVVSLKKSEIAQHEVEFLGFNITKEGRGLTETFKQKLLNITPPRDLKQLQSILGKLNFARNFIPNFSELVKPLYNIIATAPGKYITWTTDNSQQLQNIISMLNSAENLEERNPEVRLIMKVNTSPSAGYIRFYNEFAKRPIMYLNYVYTKAEVKFTNTEKLLTTIHKGLIKALDLGMGQEILVYSPIVSMTKIQKTPLPERKALPIRWITWMSYLEDPRIQFHYDKTLPELQQVPTVTDDIIAKIKHPSEFSMVFYTDGSAIKHPNVNKSHNAGMGIAQVQFKPEFTVINTWSIPLGDHTAQLAEVAAVEFACKKALKIDGPVLIVTDSFYVAESVNKELPYWQSNGFFNNKKKPLKHVSKWKSIADCIQLKPDIIIIHEKGHQPTASTFHTEGNNLADKLATQGSYVVNAGKRTADGSEFEKRTADGSEFESPKKKAKVE

SEQ ID NO: 7334 - protein, 2087 aa, synthetic construct
MPAAKRVKLDGGDKKYSIGLDIGTNSVGWAVITDEYKVPSKKFKVLGNTDRHSIKKNLIGALLFDSGETAEATRLKRTARRRYTRRKNRICYLQEIFSNEMAKVDDSFFHRLEESFLVEEDKKHERHPIFGNIVDEVAYHEKYPTIYHLRKKLVDSTDKADLRLIYLALAHMIKFRGHFLIEGDLNPDNSDVDKLFIQLVQTYNQLFEENPINASGVDAKAILSARLSKSRRLENLIAQLPGEKKNGLFGNLIALSLGLTPNFKSNFDLAEDAKLQLSKDTYDDDLDNLLAQIGDQYADLFLAAKNLSDAILLSDILRVNTEITKAPLSASMIKRYDEHHQDLTLLKALVRQQLPEKYKEIFFDQSKNGYAGYIDGGASQEEFYKFIKPILEKMDGTEELLVKLNREDLLRKQRTFDNGSIPHQIHLGELHAILRRQEDFYPFLKDNREKIEKILTFRIPYYVGPLARGNSRFAWMTRKSEETITPWNFEEVVDKGASAQSFIERMTNFDKNLPNEKVLPKHSLLYEYFTVYNELTKVKYVTEGMRKPAFLSGEQKKAIVDLLFKTNRKVTVKQLKEDYFKKIECFDSVEISGVEDRFNASLGTYHDLLKIIKDKDFLDNEENEDILEDIVLTLTLFEDREMIEERLKTYAHLFDDKVMKQLKRRRYTGWGRLSRKLINGIRDKQSGKTILDFLKSDGFANRNFMQLIHDDSLTFKEDIQKAQVSGQGDSLHEHIANLAGSPAIKKGILQTVKVVDELVKVMGRHKPENIVIEMARENQTTQKGQKNSRERMKRIEEGIKELGSQILKEHPVENTQLQNEKLYLYYLQNGRDMYVDQELDINRLSDYDVDHIVPQSFLKDDSIDNKVLTRSDKARGKSDNVPSEEVVKKMKNYWRQLLNAKLITQRKFDNLTKAERGGLSELDKAGFIKRQLVETRQITKHVAQILDSRMNTKYDENDKLIREVKVITLKSKLVSDFRKDFQFYKVREINNYHHAHDAYLNAVVGTALIKKYPKLESEFVYGDYKVYDVRKMIAKSEQEIGKATAKYFFYSNIMNFFKTEITLANGEIRKRPLIETNGETGEIVWDKGRDFATVRKVLSMPQVNIVKKTEVQTGGFSKESILPKRNSDKLIARKKDWDPKKYGGFDSPTVAYSVLVVAKVEKGKSKKLKSVKELLGITIMERSSFEKNPIDFLEAKGYKEVKKDLIIKLPKYSLFELENGRKRMLASAGELQKGNELALPSKYVNFLYLASHYEKLKGSPEDNEQKQLFVEQHKHYLDEIIEQISEFSKRVILADANLDKVLSAYNKHRDKPIREQAENIIHLFTLTNLGAPAAFKYFDTTIDRKRYTSTKEVLDATLIHQSITGLYETRIDLSQLGGDGGEAAAKGGGGSSGGVPWLTQQPLQLTILVPLQEYQDRILNKTALPEEQKQQLKALFTKYDNLWQHWENQVGHRKIRPHNIATGDYPPRPQKQYPINPKAKPSIQIVIDDLLKQGVLTPQNSTMNTPVYPVPKPDGRWRMVLDYREVNKTIPLTAAQNQHSAGILATIVRQKYKTTLDLANGFWAHPITPDSYWLTAFTWQGKQYCWTRLPQGFLNSPALFNADAVDLLKEVPNVQVYVDDIYLSHDNPHEHIQQLEKVFQILLQAGYVVSLKKSEIGQRTVEFLGFNITKEGRGLTDTFKTKLLNVTPPKDLKQLQSILGKLNFARNFIPNFAELVQTLYNLIASSPGKYIEWTEDNTKQLNKVIEALNTASNLEERLPDQRLVIKVNTSPSAGYVRYYNESGKKPIMYLNYVFSKAELKFSMLEKLLTTMHKALIKAMDLAMGQEILVYSPIVSMTKIQKTPLPERKALPIRWITWMTYLEDPRIQFHYDKTLPELKHIPDVYTSSIPPLKHPSQYEGVFCTDGSAIKSPDPTKSNNAGMGIVHAIYNPEYKILNQWSIPLGHHTAQMAEIAAVEFACKKALKVPGPVLVITDSFYVAESANKELPYWKSNGFVNNKKEPLKHISKWKSIAECLSIKPDITIQHEKGHQPINTSIHTEGNALADKLATQGSYVVNAGKRTADGSEFEKRTADGSEFESPKKKAKVE

SEQ ID NO: 7335 - protein, 2094 aa, synthetic construct; identical to SEQ ID NO: 4531

SEQ ID NO: 7336 - protein, 2098 aa, synthetic construct
MPAAKRVKLDGGDKKYSIGLDIGTNSVGWAVITDEYKVPSKKFKVLGNTDRHSIKKNLIGALLFDSGETAEATRLKRTARRRYTRRKNRICYLQEIFSNEMAKVDDSFFHRLEESFLVEEDKKHERHPIFGNIVDEVAYHEKYPTIYHLRKKLVDSTDKADLRLIYLALAHMIKFRGHFLIEGDLNPDNSDVDKLFIQLVQTYNQLFEENPINASGVDAKAILSARLSKSRRLENLIAQLPGEKKNGLFGNLIALSLGLTPNFKSNFDLAEDAKLQLSKDTYDDDLDNLLAQIGDQYADLFLAAKNLSDAILLSDILRVNTEITKAPLSASMIKRYDEHHQDLTLLKALVRQQLPEKYKEIFFDQSKNGYAGYIDGGASQEEFYKFIKPILEKMDGTEELLVKLNREDLLRKQRTFDNGSIPHQIHLGELHAILRRQEDFYPFLKDNREKIEKILTFRIPYYVGPLARGNSRFAWMTRKSEETITPWNFEEVVDKGASAQSFIERMTNFDKNLPNEKVLPKHSLLYEYFTVYNELTKVKYVTEGMRKPAFLSGEQKKAIVDLLFKTNRKVTVKQLKEDYFKKIECFDSVEISGVEDRFNASLGTYHDLLKIIKDKDFLDNEENEDILEDIVLTLTLFEDREMIEERLKTYAHLFDDKVMKQLKRRRYTGWGRLSRKLINGIRDKQSGKTILDFLKSDGFANRNFMQLIHDDSLTFKEDIQKAQVSGQGDSLHEHIANLAGSPAIKKGILQTVKVVDELVKVMGRHKPENIVIEMARENQTTQKGQKNSRERMKRIEEGIKELGSQILKEHPVENTQLQNEKLYLYYLQNGRDMYVDQELDINRLSDYDVDHIVPQSFLKDDSIDNKVLTRSDKARGKSDNVPSEEVVKKMKNYWRQLLNAKLITQRKFDNLTKAERGGLSELDKAGFIKRQLVETRQITKHVAQILDSRMNTKYDENDKLIREVKVITLKSKLVSDFRKDFQFYKVREINNYHHAHDAYLNAVVGTALIKKYPKLESEFVYGDYKVYDVRKMIAKSEQEIGKATAKYFFYSNIMNFFKTEITLANGEIRKRPLIETNGETGEIVWDKGRDFATVRKVLSMPQVNIVKKTEVQTGGFSKESILPKRNSDKLIARKKDWDPKKYGGFDSPTVAYSVLVVAKVEKGKSKKLKSVKELLGITIMERSSFEKNPIDFLEAKGYKEVKKDLIIKLPKYSLFELENGRKRMLASAGELQKGNELALPSKYVNFLYLASHYEKLKGSPEDNEQKQLFVEQHKHYLDEIIEQISEFSKRVILADANLDKVLSAYNKHRDKPIREQAENIIHLFTLTNLGAPAAFKYFDTTIDRKRYTSTKEVLDATLIHQSITGLYETRIDLSQLGGDGGEAAAKGSSGGGGGTAPLEEEYRLFLEAPIQNVTLLEQWKREIPKVWAEINPPGLASTQAPIHVQLLSTALPVRVRQYPITLEAKRSLRETIRKFRAAGILRPVHSPWNTPLLPVRKSGTSEYRMVQDLREVNKRVETIHPTVPNPYTLLSLLPPDRIWYSVLDLKDAFFCIPLAPESQLIFAFEWADAEEGESGQLTWTRLPQGFKNSPTLFNEALNRDLQGFRLDHPSVSLLQYVDDLLIAADTQAACLSATRDLLMTLAELGYRVSGKKAQLCQEEVTYLGFKIHKGSRSLSNSRTQAILQIPVPKTKRQVREFLGTIGYCRLWIPGFAELAQPLYAATRPGNDPLVWGEKEEEAFQSLKLALTQPPALALPSLDKPFQLFVEETSGAAKGVLTQALGPWKRPVAYLSKRLDPVAAGWPRCLRAIAAAALLTREASKLTFGQDIEITSSHNLESLLRSPPDKWLTNARITQYQVLLLDPPRVRFKQTAALNPATLLPETDDTLPIHHCLDTLDSLTSTRPDLTDQPLAQAEATLFTDGSSYIRDGKRYAGAAVVTLDSVIWAEPLPIGTSAQKAELIALTKALEWSKDKSVNIYTDSRYAFATLHVHGMIYRERGWLTAGGKAIKNAPEILALLTAVWLPKRVAVMHCKGHQKDDAPTSTGNRRADEVAREVAIRPLSTQATISAGKRTADGSEFEKRTADGSEFESPKKKAKVE

SEQ ID NO: 7337 - protein, 2173 aa, synthetic construct
MPAAKRVKLDGGDKKYSIGLDIGTNSVGWAVITDEYKVPSKKFKVLGNTDRHSIKKNLIGALLFDSGETAEATRLKRTARRRYTRRKNRICYLQEIFSNEMAKVDDSFFHRLEESFLVEEDKKHERHPIFGNIVDEVAYHEKYPTIYHLRKKLVDSTDKADLRLIYLALAHMIKFRGHFLIEGDLNPDNSDVDKLFIQLVQTYNQLFEENPINASGVDAKAILSARLSKSRRLENLIAQLPGEKKNGLFGNLIALSLGLTPNFKSNFDLAEDAKLQLSKDTYDDDLDNLLAQIGDQYADLFLAAKNLSDAILLSDILRVNTEITKAPLSASMIKRYDEHHQDLTLLKALVRQQLPEKYKEIFFDQSKNGYAGYIDGGASQEEFYKFIKPILEKMDGTEELLVKLNREDLLRKQRTFDNGSIPHQIHLGELHAILRRQEDFYPFLKDNREKIEKILTFRIPYYVGPLARGNSRFAWMTRKSEETITPWNFEEVVDKGASAQSFIERMTNFDKNLPNEKVLPKHSLLYEYFTVYNELTKVKYVTEGMRKPAFLSGEQKKAIVDLLFKTNRKVTVKQLKEDYFKKIECFDSVEISGVEDRFNASLGTYHDLLKIIKDKDFLDNEENEDILEDIVLTLTLFEDREMIEERLKTYAHLFDDKVMKQLKRRRYTGWGRLSRKLINGIRDKQSGKTILDFLKSDGFANRNFMQLIHDDSLTFKEDIQKAQVSGQGDSLHEHIANLAGSPAIKKGILQTVKVVDELVKVMGRHKPENIVIEMARENQTTQKGQKNSRERMKRIEEGIKELGSQILKEHPVENTQLQNEKLYLYYLQNGRDMYVDQELDINRLSDYDVDHIVPQSFLKDDSIDNKVLTRSDKARGKSDNVPSEEVVKKMKNYWRQLLNAKLITQRKFDNLTKAERGGLSELDKAGFIKRQLVETRQITKHVAQILDSRMNTKYDENDKLIREVKVITLKSKLVSDFRKDFQFYKVREINNYHHAHDAYLNAVVGTALIKKYPKLESEFVYGDYKVYDVRKMIAKSEQEIGKATAKYFFYSNIMNFFKTEITLANGEIRKRPLIETNGETGEIVWDKGRDFATVRKVLSMPQVNIVKKTEVQTGGFSKESILPKRNSDKLIARKKDWDPKKYGGFDSPTVAYSVLVVAKVEKGKSKKLKSVKELLGITIMERSSFEKNPIDFLEAKGYKEVKKDLIIKLPKYSLFELENGRKRMLASAGELQKGNELALPSKYVNFLYLASHYEKLKGSPEDNEQKQLFVEQHKHYLDEIIEQISEFSKRVILADANLDKVLSAYNKHRDKPIREQAENIIHLFTLTNLGAPAAFKYFDTTIDRKRYTSTKEVLDATLIHQSITGLYETRIDLSQLGGDGGEAAAKGSSGGGGGMDLLKPLTVERKGVKIKGYWNSQADITCVPKDLLQGEEPVRQQNVTTIHGTQEGDVYYVNLKIDGRRINTEVIGTTLDYAIITPGDVPWILKKPLELTIKLDLEEQQGTLLNNSILSKKGKEELKQLFEKYSALWQSWENQVGHRRIRPHKIATGTVKPTPQKQYHINPKAKPDIQIVINDLLKQGVLIQKESTMNTPVYPVPKPNGRWRMVLDYRAVNKVTPLIAVQNQHSYGILGSLFKGRYKTTIDLSNGFWAHPIVPEDYWITAFTWQGKQYCWTVLPQGFLNSPGLFTGDVVDLLQGIPNVEVYVDDVYISHDSEKEHLEYLDILFNRLKEAGYIISLKKSNIANSIVDFLGFQITNEGRGLTDTFKEKLENITAPTTLKQLQSILGLLNFARNFIPDFTELIAPLYALIPKSTKNYVPWQIEHSTTLETLITKLNGAEYLQGRKGDKTLIMKVNASYTTGYIRYYNEGEKKPISYVSIVFSKTELKFTELEKLLTTVHKGLLKALDLSMGQNIHVYSPIVSMQNIQKTPQTAKKALASRWLSWLSYLEDPRIRFFYDPQMPALKDLPAVDTGKDNKKHPSNFQHIFYTDGSAITSPTKEGHLNAGMGIVYFINKDGNLQKQQEWSISLGNHTAQFAEIAAFEFALKKCLPLGGNILVVTDSNYVAKAYNEELDVWASNGFVNNRKKPLKHISKWKSVADLKRLRPDVVVTHEPGHQKLDSSPHAYGNNLADQLATQASFKVHAGKRTADGSEFEKRTADGSEFESPKKKAKVE

SEQ ID NO: 7338 - protein, 2127 aa, synthetic construct
MPAAKRVKLDGGDKKYSIGLDIGTNSVGWAVITDEYKVPSKKFKVLGNTDRHSIKKNLIGALLFDSGETAEATRLKRTARRRYTRRKNRICYLQEIFSNEMAKVDDSFFHRLEESFLVEEDKKHERHPIFGNIVDEVAYHEKYPTIYHLRKKLVDSTDKADLRLIYLALAHMIKFRGHFLIEGDLNPDNSDVDKLFIQLVQTYNQLFEENPINASGVDAKAILSARLSKSRRLENLIAQLPGEKKNGLFGNLIALSLGLTPNFKSNFDLAEDAKLQLSKDTYDDDLDNLLAQIGDQYADLFLAAKNLSDAILLSDILRVNTEITKAPLSASMIKRYDEHHQDLTLLKALVRQQLPEKYKEIFFDQSKNGYAGYIDGGASQEEFYKFIKPILEKMDGTEELLVKLNREDLLRKQRTFDNGSIPHQIHLGELHAILRRQEDFYPFLKDNREKIEKILTFRIPYYVGPLARGNSRFAWMTRKSEETITPWNFEEVVDKGASAQSFIERMTNFDKNLPNEKVLPKHSLLYEYFTVYNELTKVKYVTEGMRKPAFLSGEQKKAIVDLLFKTNRKVTVKQLKEDYFKKIECFDSVEISGVEDRFNASLGTYHDLLKIIKDKDFLDNEENEDILEDIVLTLTLFEDREMIEERLKTYAHLFDDKVMKQLKRRRYTGWGRLSRKLINGIRDKQSGKTILDFLKSDGFANRNFMQLIHDDSLTFKEDIQKAQVSGQGDSLHEHIANLAGSPAIKKGILQTVKVVDELVKVMGRHKPENIVIEMARENQTTQKGQKNSRERMKRIEEGIKELGSQILKEHPVENTQLQNEKLYLYYLQNGRDMYVDQELDINRLSDYDVDHIVPQSFLKDDSIDNKVLTRSDKARGKSDNVPSEEVVKKMKNYWRQLLNAKLITQRKFDNLTKAERGGLSELDKAGFIKRQLVETRQITKHVAQILDSRMNTKYDENDKLIREVKVITLKSKLVSDFRKDFQFYKVREINNYHHAHDAYLNAVVGTALIKKYPKLESEFVYGDYKVYDVRKMIAKSEQEIGKATAKYFFYSNIMNFFKTEITLANGEIRKRPLIETNGETGEIVWDKGRDFATVRKVLSMPQVNIVKKTEVQTGGFSKESILPKRNSDKLIARKKDWDPKKYGGFDSPTVAYSVLVVAKVEKGKSKKLKSVKELLGITIMERSSFEKNPIDFLEAKGYKEVKKDLIIKLPKYSLFELENGRKRMLASAGELQKGNELALPSKYVNFLYLASHYEKLKGSPEDNEQKQLFVEQHKHYLDEIIEQISEFSKRVILADANLDKVLSAYNKHRDKPIREQAENIIHLFTLTNLGAPAAFKYFDTTIDRKRYTSTKEVLDATLIHQSITGLYETRIDLSQLGGDGGEAAAKGSSGGGGGLLGRDLLTKLKAQIQFSTEGPQVTWEDRPAMCLVLNLEEEYRLHEKPVPPSIDPSWLQLFPMVWAEKAGMGLANQVPPVVVELKSDASPVAVRQYPMSKEAREGIRPHIQRFLDLGILVPCQSPWNTPLLPVKKPGTNDYRPVQDLREVNKRVQDIHPTVPNPYNLLSSLPPSHTWYSVLDLKDAFFCLKLHPNSQPLFAFEWRDPEKGNTGQLTWTRLPQGFKNSPTLFNEALHRDLASFRALNPQVVMLQYVDDLLVAAPTYRDCKEGTRRLLQELSKLGYRVSAKKAQLCREEVTYLGYLLKGGKRWLTPARKATVMKIPTPTTPRQVREFLGTAGFCRLWIPGFASLAAPLYPLTRPKVPFTWTEAHQEAFGRIKEALLSAPALALPDLTKPFALYVDEKEGVARGVLTQTLGPWRRPVAYLSKKLDPVASGWPTCLKAIAAVALLLKDADKLTLGQNVLVIAPHNLESIVRQPPDRWMTNARMTHYQSLLLNERVSFAPPAILNPATLLPVESDDTPIHICSEILAEETGTRPDLRDQPLPGVPAWYTDGSSFIMDGRRQAGAAIVDNKRTVWASNLPEGTSAQKAELIALTQALRLAEGKSINIYTDSRYAFATAHVHGAIYKQRGWLTSAGKDIKNKEEILALLEAIHLPKRVAIIHCPGHQRGTDPVATGNRKADEAAKQAAQSTRILTETTKNAGKRTADGSEFEKRTADGSEFESPKKKAKVE

SEQ ID NO: 7339 - protein, 2218 aa, synthetic construct
MPAAKRVKLDGGDKKYSIGLDIGTNSVGWAVITDEYKVPSKKFKVLGNTDRHSIKKNLIGALLFDSGETAEATRLKRTARRRYTRRKNRICYLQEIFSNEMAKVDDSFFHRLEESFLVEEDKKHERHPIFGNIVDEVAYHEKYPTIYHLRKKLVDSTDKADLRLIYLALAHMIKFRGHFLIEGDLNPDNSDVDKLFIQLVQTYNQLFEENPINASGVDAKAILSARLSKSRRLENLIAQLPGEKKNGLFGNLIALSLGLTPNFKSNFDLAEDAKLQLSKDTYDDDLDNLLAQIGDQYADLFLAAKNLSDAILLSDILRVNTEITKAPLSASMIKRYDEHHQDLTLLKALVRQQLPEKYKEIFFDQSKNGYAGYIDGGASQEEFYKFIKPILEKMDGTEELLVKLNREDLLRKQRTFDNGSIPHQIHLGELHAILRRQEDFYPFLKDNREKIEKILTFRIPYYVGPLARGNSRFAWMTRKSEETITPWNFEEVVDKGASAQSFIERMTNFDKNLPNEKVLPKHSLLYEYFTVYNELTKVKYVTEGMRKPAFLSGEQKKAIVDLLFKTNRKVTVKQLKEDYFKKIECFDSVEISGVEDRFNASLGTYHDLLKIIKDKDFLDNEENEDILEDIVLTLTLFEDREMIEERLKTYAHLFDDKVMKQLKRRRYTGWGRLSRKLINGIRDKQSGKTILDFLKSDGFANRNFMQLIHDDSLTFKEDIQKAQVSGQGDSLHEHIANLAGSPAIKKGILQTVKVVDELVKVMGRHKPENIVIEMARENQTTQKGQKNSRERMKRIEEGIKELGSQILKEHPVENTQLQNEKLYLYYLQNGRDMYVDQELDINRLSDYDVDHIVPQSFLKDDSIDNKVLTRSDKARGKSDNVPSEEVVKKMKNYWRQLLNAKLITQRKFDNLTKAERGGLSELDKAGFIKRQLVETRQITKHVAQILDSRMNTKYDENDKLIREVKVITLKSKLVSDFRKDFQFYKVREINNYHHAHDAYLNAVVGTALIKKYPKLESEFVYGDYKVYDVRKMIAKSEQEIGKATAKYFFYSNIMNFFKTEITLANGEIRKRPLIETNGETGEIVWDKGRDFATVRKVLSMPQVNIVKKTEVQTGGFSKESILPKRNSDKLIARKKDWDPKKYGGFDSPTVAYSVLVVAKVEKGKSKKLKSVKELLGITIMERSSFEKNPIDFLEAKGYKEVKKDLIIKLPKYSLFELENGRKRMLASAGELQKGNELALPSKYVNFLYLASHYEKLKGSPEDNEQKQLFVEQHKHYLDEIIEQISEFSKRVILADANLDKVLSAYNKHRDKPIREQAENIIHLFTLTNLGAPAAFKYFDTTIDRKRYTSTKEVLDATLIHQSITGLYETRIDLSQLGGDGGEAAAKGSSGGGGGTLGDQGSRGSDPLPEPRVTLTVEGIPTEFLVNTGAEHSVLTKPMGKMGSKRTVVAGATGSKVYPWTTKRLLKIGQKQVTHSFLVIPECPAPLLGRDLLTKLKAQIQFSTEGPQVTWEDRPAMCLVLNLEEEYRLHEKPVPPSIDPSWLQLFPMVWAEKAGMGLANQVPPVVVELKSDASPVAVRQYPMSKEAREGIRPHIQRFLDLGILVPCQSPWNTPLLPVKKPGTNDYRPVQDLREVNKRVQDIHPTVPNPYNLLSSLPPSHTWYSVLDLKDAFFCLKLHPNSQPLFAFEWRDPEKGNTGQLTWTRLPQGFKNSPTLFNEALHRDLASFRALNPQVVMLQYVDDLLVAAPTYRDCKEGTRRLLQELSKLGYRVSAKKAQLCREEVTYLGYLLKGGKRWLTPARKATVMKIPTPTTPRQVREFLGKAGFCRLFIPGFASLAAPLYPLTRPKVPFTWTEAHQEAFGRIKEALLSAPALALPDLTKPFALYVDEKEGVARGVLTQTLGPWRRPVAYLSKKLDPVASGWPTCLKAIAAVALLLKDADKLTLGQNVLVIAPHNLESIVRQPPDRWMTNARMTHYQSLLLNERVSFAPPAILNPATLLPVESDDTPIHICSEILAEETGTRPDLRDQPLPGVPAWYTDGSSFIMDGRRQAGAAIVDNKRTVWASNLPEGTSAQKAELIALTQALRLAEGKSINIYTDSRYAFATAHVHGAIYKQRGWLTSAGKDIKNKEEILALLEAIHLPKRVAIIHCPGHQRGTDPVATGNRKADEAAKQAAQSTRILTETTKNAGKRTADGSEFEKRTADGSEFESPKKKAKVE

SEQ ID NO: 7340 - protein, 2096 aa, synthetic construct
MPAAKRVKLDGGDKKYSIGLDIGTNSVGWAVITDEYKVPSKKFKVLGNTDRHSIKKNLIGALLFDSGETAEATRLKRTARRRYTRRKNRICYLQEIFSNEMAKVDDSFFHRLEESFLVEEDKKHERHPIFGNIVDEVAYHEKYPTIYHLRKKLVDSTDKADLRLIYLALAHMIKFRGHFLIEGDLNPDNSDVDKLFIQLVQTYNQLFEENPINASGVDAKAILSARLSKSRRLENLIAQLPGEKKNGLFGNLIALSLGLTPNFKSNFDLAEDAKLQLSKDTYDDDLDNLLAQIGDQYADLFLAAKNLSDAILLSDILRVNTEITKAPLSASMIKRYDEHHQDLTLLKALVRQQLPEKYKEIFFDQSKNGYAGYIDGGASQEEFYKFIKPILEKMDGTEELLVKLNREDLLRKQRTFDNGSIPHQIHLGELHAILRRQEDFYPFLKDNREKIEKILTFRIPYYVGPLARGNSRFAWMTRKSEETITPWNFEEVVDKGASAQSFIERMTNFDKNLPNEKVLPKHSLLYEYFTVYNELTKVKYVTEGMRKPAFLSGEQKKAIVDLLFKTNRKVTVKQLKEDYFKKIECFDSVEISGVEDRFNASLGTYHDLLKIIKDKDFLDNEENEDILEDIVLTLTLFEDREMIEERLKTYAHLFDDKVMKQLKRRRYTGWGRLSRKLINGIRDKQSGKTILDFLKSDGFANRNFMQLIHDDSLTFKEDIQKAQVSGQGDSLHEHIANLAGSPAIKKGILQTVKVVDELVKVMGRHKPENIVIEMARENQTTQKGQKNSRERMKRIEEGIKELGSQILKEHPVENTQLQNEKLYLYYLQNGRDMYVDQELDINRLSDYDVDHIVPQSFLKDDSIDNKVLTRSDKARGKSDNVPSEEVVKKMKNYWRQLLNAKLITQRKFDNLTKAERGGLSELDKAGFIKRQLVETRQITKHVAQILDSRMNTKYDENDKLIREVKVITLKSKLVSDFRKDFQFYKVREINNYHHAHDAYLNAVVGTALIKKYPKLESEFVYGDYKVYDVRKMIAKSEQEIGKATAKYFFYSNIMNFFKTEITLANGEIRKRPLIETNGETGEIVWDKGRDFATVRKVLSMPQVNIVKKTEVQTGGFSKESILPKRNSDKLIARKKDWDPKKYGGFDSPTVAYSVLVVAKVEKGKSKKLKSVKELLGITIMERSSFEKNPIDFLEAKGYKEVKKDLIIKLPKYSLFELENGRKRMLASAGELQKGNELALPSKYVNFLYLASHYEKLKGSPEDNEQKQLFVEQHKHYLDEIIEQISEFSKRVILADANLDKVLSAYNKHRDKPIREQAENIIHLFTLTNLGAPAAFKYFDTTIDRKRYTSTKEVLDATLIHQSITGLYETRIDLSQLGGDGGEAAAKGSSGGGGGTLGIEDEYRLHETSTEPDVSLGSTWLSDFPQAWAETGGMGLAVRQAPLIIPLKATSTPVSIQQYPMSHEARLGIKPHIQRLLDQGILVPCQSPWNTPLLPVKKPGTNDYRPVQDLREVNKRVEDIHPTVPNPYNLLSGLPPSHQWYTVLDLKDAFFCLRLHPTSQPLFAFEWRDPGMGISGQLTWTRLPQGFKNSPTLFNEALHRDLADFRIQHPDLILLQYVDDILLAATSELDCQQGTRALLQTLGDLGYRASAKKAQICQKQVKYLGYLLREGQRWLTEARKETVMGQPVPKTPRQLREFLGTAGFCRLWIPGFAEMAAPLYPLTKPGTLFSWGPDQQKAYQEIKQALLTAPALGLPDLTKPFELFVDEKQGYAKGVLTQKLGPWRRPVAYLSKKLDPVAAGWPPCLRMVAAIAVLTKDAGKLTMGQPLVILAPHAVEALVKQPPDRWLSNARMTHYQAMLLDTDRVQFGPVVALNPATLLPLPEEGAPHDCLEILAETHGTRPDLTDQPIPDADHTWYTDGSSFLQEGQRKAGAAVTTETEVIWAGALPAGTSAQRAELIALTQALKMAEGKRLNVYTDSRYAFATAHIHGEIYRRRGWLTSEGREIKNKSEILALLKALFLPKRLSIIHCLGHQKGDSAEARGNRLADQAAREAAIKTPPDTSTLLAGKRTADGSEFEKRTADGSEFESPKKKAKVE

SEQ ID NO: 7341 - protein, 2096 aa, synthetic construct
MPAAKRVKLDGGDKKYSIGLDIGTNSVGWAVITDEYKVPSKKFKVLGNTDRHSIKKNLIGALLFDSGETAEATRLKRTARRRYTRRKNRICYLQEIFSNEMAKVDDSFFHRLEESFLVEEDKKHERHPIFGNIVDEVAYHEKYPTIYHLRKKLVDSTDKADLRLIYLALAHMIKFRGHFLIEGDLNPDNSDVDKLFIQLVQTYNQLFEENPINASGVDAKAILSARLSKSRRLENLIAQLPGEKKNGLFGNLIALSLGLTPNFKSNFDLAEDAKLQLSKDTYDDDLDNLLAQIGDQYADLFLAAKNLSDAILLSDILRVNTEITKAPLSASMIKRYDEHHQDLTLLKALVRQQLPEKYKEIFFDQSKNGYAGYIDGGASQEEFYKFIKPILEKMDGTEELLVKLNREDLLRKQRTFDNGSIPHQIHLGELHAILRRQEDFYPFLKDNREKIEKILTFRIPYYVGPLARGNSRFAWMTRKSEETITPWNFEEVVDKGASAQSFIERMTNFDKNLPNEKVLPKHSLLYEYFTVYNELTKVKYVTEGMRKPAFLSGEQKKAIVDLLFKTNRKVTVKQLKEDYFKKIECFDSVEISGVEDRFNASLGTYHDLLKIIKDKDFLDNEENEDILEDIVLTLTLFEDREMIEERLKTYAHLFDDKVMKQLKRRRYTGWGRLSRKLINGIRDKQSGKTILDFLKSDGFANRNFMQLIHDDSLTFKEDIQKAQVSGQGDSLHEHIANLAGSPAIKKGILQTVKVVDELVKVMGRHKPENIVIEMARENQTTQKGQKNSRERMKRIEEGIKELGSQILKEHPVENTQLQNEKLYLYYLQNGRDMYVDQELDINRLSDYDVDHIVPQSFLKDDSIDNKVLTRSDKARGKSDNVPSEEVVKKMKNYWRQLLNAKLITQRKFDNLTKAERGGLSELDKAGFIKRQLVETRQITKHVAQILDSRMNTKYDENDKLIREVKVITLKSKLVSDFRKDFQFYKVREINNYHHAHDAYLNAVVGTALIKKYPKLESEFVYGDYKVYDVRKMIAKSEQEIGKATAKYFFYSNIMNFFKTEITLANGEIRKRPLIETNGETGEIVWDKGRDFATVRKVLSMPQVNIVKKTEVQTGGFSKESILPKRNSDKLIARKKDWDPKKYGGFDSPTVAYSVLVVAKVEKGKSKKLKSVKELLGITIMERSSFEKNPIDFLEAKGYKEVKKDLIIKLPKYSLFELENGRKRMLASAGELQKGNELALPSKYVNFLYLASHYEKLKGSPEDNEQKQLFVEQHKHYLDEIIEQISEFSKRVILADANLDKVLSAYNKHRDKPIREQAENIIHLFTLTNLGAPAAFKYFDTTIDRKRYTSTKEVLDATLIHQSITGLYETRIDLSQLGGDGGEAAAKGSSGGGGGTLGIEDEYRLHETSTEPDVSLGSTWLSDFPQAWAETGGMGLAVRQAPLIIPLKATSTPVSIQQYPMSHEARLGIKPHIQRLLDQGILVPCQSPWNTPLLPVKKPGTNDYRPVQDLREVNKRVEDIHPTVPNPYNLLSGLPPSHQWYTVLDLKDAFFCLRLHPTSQPLFAFEWRDPGMGISGQLTWTRLPQGFKNSPTLFDEALHRDLADFRIQHPDLILLQYVDDILLAATSELDCQQGTRALLQTLGDLGYRASAKKAQICQKQVKYLGYLLREGQRWLTEARKETVMGQPVPKTPRQLREFLGTAGFCRLWIPGFAEMAAPLYPLTKTGTLFSWGPDQQKAYQEIKQALLTAPALGLPDLTKPFELFVDEKQGYAKGVLTQKLGPWRRPVAYLSKKLDPVAAGWPPCLRMVAAIAVLTKDAGKLTMGQPLVILAPHAVEALVKQPPDRWLSNARMTHYQAMLLDTDRVQFGPVVALNPATLLPLPEEGAPHDCLEILAETHGTRPDLTDQPIPDADHTWYTDGSSFLQEGQRKAGAAVTTETEVIWAGALPAGTSAQRAELIALTQALKMAEGKRLNVYTDSRYAFATAHIHGEIYRRRGLLTSEGREIKNKSEILALLKALFLPKRLSIIHCLGHQKGDSAEARGNRLADQAAREAAIKTPPDTSTLLAGKRTADGSEFEKRTADGSEFESPKKKAKVE

SEQ ID NO: 7342 - protein, 2096 aa, synthetic construct
MPAAKRVKLDGGDKKYSIGLDIGTNSVGWAVITDEYKVPSKKFKVLGNTDRHSIKKNLIGALLFDSGETAEATRLKRTARRRYTRRKNRICYLQEIFSNEMAKVDDSFFHRLEESFLVEEDKKHERHPIFGNIVDEVAYHEKYPTIYHLRKKLVDSTDKADLRLIYLALAHMIKFRGHFLIEGDLNPDNSDVDKLFIQLVQTYNQLFEENPINASGVDAKAILSARLSKSRRLENLIAQLPGEKKNGLFGNLIALSLGLTPNFKSNFDLAEDAKLQLSKDTYDDDLDNLLAQIGDQYADLFLAAKNLSDAILLSDILRVNTEITKAPLSASMIKRYDEHHQDLTLLKALVRQQLPEKYKEIFFDQSKNGYAGYIDGGASQEEFYKFIKPILEKMDGTEELLVKLNREDLLRKQRTFDNGSIPHQIHLGELHAILRRQEDFYPFLKDNREKIEKILTFRIPYYVGPLARGNSRFAWMTRKSEETITPWNFEEVVDKGASAQSFIERMTNFDKNLPNEKVLPKHSLLYEYFTVYNELTKVKYVTEGMRKPAFLSGEQKKAIVDLLFKTNRKVTVKQLKEDYFKKIECFDSVEISGVEDRFNASLGTYHDLLKIIKDKDFLDNEENEDILEDIVLTLTLFEDREMIEERLKTYAHLFDDKVMKQLKRRRYTGWGRLSRKLINGIRDKQSGKTILDFLKSDGFANRNFMQLIHDDSLTFKEDIQKAQVSGQGDSLHEHIANLAGSPAIKKGILQTVKVVDELVKVMGRHKPENIVIEMARENQTTQKGQKNSRERMKRIEEGIKELGSQILKEHPVENTQLQNEKLYLYYLQNGRDMYVDQELDINRLSDYDVDHIVPQSFLKDDSIDNKVLTRSDKARGKSDNVPSEEVVKKMKNYWRQLLNAKLITQRKFDNLTKAERGGLSELDKAGFIKRQLVETRQITKHVAQILDSRMNTKYDENDKLIREVKVITLKSKLVSDFRKDFQFYKVREINNYHHAHDAYLNAVVGTALIKKYPKLESEFVYGDYKVYDVRKMIAKSEQEIGKATAKYFFYSNIMNFFKTEITLANGEIRKRPLIETNGETGEIVWDKGRDFATVRKVLSMPQVNIVKKTEVQTGGFSKESILPKRNSDKLIARKKDWDPKKYGGFDSPTVAYSVLVVAKVEKGKSKKLKSVKELLGITIMERSSFEKNPIDFLEAKGYKEVKKDLIIKLPKYSLFELENGRKRMLASAGELQKGNELALPSKYVNFLYLASHYEKLKGSPEDNEQKQLFVEQHKHYLDEIIEQISEFSKRVILADANLDKVLSAYNKHRDKPIREQAENIIHLFTLTNLGAPAAFKYFDTTIDRKRYTSTKEVLDATLIHQSITGLYETRIDLSQLGGDGGEAAAKGSSGGGGGTLNIEDEYRLHETSKEPDVSLGSTWLSDFPQAWAETGGMGLAVRQAPLIIPLKATSTPVSIKQYPMSQEARLGIKPHIQRLLDQGILVPCQSPWNTPLLPVKKPGTNDYRPVQDLREVNKRVEDIHPTVPNPYNLLSGLPPSHQWYTVLDLKDAFFCLRLHPTSQPLFAFEWRDPEMGISGQLTWTRLPQGFKNSPTLFNEALHRDLAGFRIQHPDLILLQYVDDLLLAATSELDCQQGTRALLQTLGDLGYRASAKKAQICQKQVKYLGYLLKEGQRWLTEARKETVMGQPIPKTPRQLREFLGTAGFCRLWIPGFAEMAAPLYPLTKPGTLFNWGPDQQKAFQEIKQALLTAPALGLPDLTKPFELFVDEKQGYAKGVLTQKLGPWRRPVAYLSKKLDPVAAGWPPCLRMVAAIAVLTKDAGKLTMGQPLVILAPHAVEALVKQPPDRWLSNARMTHYQALLLDTDRVQFGPVVALNPATLLPLPEEGLQHDCLDILAEAHGTRSDLMDQPLPDADHTWYTDGSSFLQEGQRKAGAAVTTETEVIWARALPAGTSAQRAELIALTQALKMAEGKKLNVYTDSRYAFATAHIHGEIYRRRGWLTSEGKEIKNKDEILALLKALFLPKRLSIIHCPGHQKGNSAEARGNRMADQAAREVATRETPETSTLLAGKRTADGSEFEKRTADGSEFESPKKKAKVE

SEQ ID NO: 7343 - protein, 2096 aa, synthetic construct
MPAAKRVKLDGGDKKYSIGLDIGTNSVGWAVITDEYKVPSKKFKVLGNTDRHSIKKNLIGALLFDSGETAEATRLKRTARRRYTRRKNRICYLQEIFSNEMAKVDDSFFHRLEESFLVEEDKKHERHPIFGNIVDEVAYHEKYPTIYHLRKKLVDSTDKADLRLIYLALAHMIKFRGHFLIEGDLNPDNSDVDKLFIQLVQTYNQLFEENPINASGVDAKAILSARLSKSRRLENLIAQLPGEKKNGLFGNLIALSLGLTPNFKSNFDLAEDAKLQLSKDTYDDDLDNLLAQIGDQYADLFLAAKNLSDAILLSDILRVNTEITKAPLSASMIKRYDEHHQDLTLLKALVRQQLPEKYKEIFFDQSKNGYAGYIDGGASQEEFYKFIKPILEKMDGTEELLVKLNREDLLRKQRTFDNGSIPHQIHLGELHAILRRQEDFYPFLKDNREKIEKILTFRIPYYVGPLARGNSRFAWMTRKSEETITPWNFEEVVDKGASAQSFIERMTNFDKNLPNEKVLPKHSLLYEYFTVYNELTKVKYVTEGMRKPAFLSGEQKKAIVDLLFKTNRKVTVKQLKEDYFKKIECFDSVEISGVEDRFNASLGTYHDLLKIIKDKDFLDNEENEDILEDIVLTLTLFEDREMIEERLKTYAHLFDDKVMKQLKRRRYTGWGRLSRKLINGIRDKQSGKTILDFLKSDGFANRNFMQLIHDDSLTFKEDIQKAQVSGQGDSLHEHIANLAGSPAIKKGILQTVKVVDELVKVMGRHKPENIVIEMARENQTTQKGQKNSRERMKRIEEGIKELGSQILKEHPVENTQLQNEKLYLYYLQNGRDMYVDQELDINRLSDYDVDHIVPQSFLKDDSIDNKVLTRSDKARGKSDNVPSEEVVKKMKNYWRQLLNAKLITQRKFDNLTKAERGGLSELDKAGFIKRQLVETRQITKHVAQILDSRMNTKYDENDKLIREVKVITLKSKLVSDFRKDFQFYKVREINNYHHAHDAYLNAVVGTALIKKYPKLESEFVYGDYKVYDVRKMIAKSEQEIGKATAKYFFYSNIMNFFKTEITLANGEIRKRPLIETNGETGEIVWDKGRDFATVRKVLSMPQVNIVKKTEVQTGGFSKESILPKRNSDKLIARKKDWDPKKYGGFDSPTVAYSVLVVAKVEKGKSKKLKSVKELLGITIMERSSFEKNPIDFLEAKGYKEVKKDLIIKLPKYSLFELENGRKRMLASAGELQKGNELALPSKYVNFLYLASHYEKLKGSPEDNEQKQLFVEQHKHYLDEIIEQISEFSKRVILADANLDKVLSAYNKHRDKPIREQAENIIHLFTLTNLGAPAAFKYFDTTIDRKRYTSTKEVLDATLIHQSITGLYETRIDLSQLGGDGGEAAAKGSSGGGGGTLNIEDEHRLHETSKEPDVSLGSTWLSDFPQAWAETGGMGLAVRQAPLIIPLKATSTPVSIKQYPMSQEARLGIKPHIQRLLDQGILVPCQSPWNTPLLPVKKPGTNDYRPVQDLREVNKRVEDIHPTVPNPYNLLSGLPPSHQWYTVLDLKDAFFCLRLHPTSQPLFAFEWRDPEMGISGQLTWTRLPQGFKNSPTLFNEALHRDLADFRIQHPDLILLQYVDDLLLAATSELDCQQGTRALLQTLGNLGYRASAKKAQICQKQVKYLGYLLKEGQRWLTEARKETVMGQPTPKTPRQLREFLGTAGFCRLWIPGFAEMAAPLYPLTKPGTLFNWGPDQQKAYQEIKQALLTAPALGLPDLTKPFELFVDEKQGYAKGVLTQKLGPWRRPVAYLSKKLDPVAAGWPPCLRMVAAIAVLTKDAGKLTMGQPLVILAPHAVEALVKQPPDRWLSNARMTHYQALLLDTDRVQFGPVVALNPATLLPLPEEGLQHNCLDILAEAHGTRPDLTDQPLPDADHTWYTDGSSLLQEGQRKAGAAVTTETEVIWAKALPAGTSAQRAELIALTQALKMAEGKKLNVYTDSRYAFATAHIHGEIYRRRGWLTSEGKEIKNKDEILALLKALFLPKRLSIIHCPGHQKGHSAEARGNRMADQAARKAAITETPDTSTLLAGKRTADGSEFEKRTADGSEFESPKKKAKVE

SEQ ID NO: 7344 - protein, 2116 aa, synthetic construct
MPAAKRVKLDGGDKKYSIGLDIGTNSVGWAVITDEYKVPSKKFKVLGNTDRHSIKKNLIGALLFDSGETAEATRLKRTARRRYTRRKNRICYLQEIFSNEMAKVDDSFFHRLEESFLVEEDKKHERHPIFGNIVDEVAYHEKYPTIYHLRKKLVDSTDKADLRLIYLALAHMIKFRGHFLIEGDLNPDNSDVDKLFIQLVQTYNQLFEENPINASGVDAKAILSARLSKSRRLENLIAQLPGEKKNGLFGNLIALSLGLTPNFKSNFDLAEDAKLQLSKDTYDDDLDNLLAQIGDQYADLFLAAKNLSDAILLSDILRVNTEITKAPLSASMIKRYDEHHQDLTLLKALVRQQLPEKYKEIFFDQSKNGYAGYIDGGASQEEFYKFIKPILEKMDGTEELLVKLNREDLLRKQRTFDNGSIPHQIHLGELHAILRRQEDFYPFLKDNREKIEKILTFRIPYYVGPLARGNSRFAWMTRKSEETITPWNFEEVVDKGASAQSFIERMTNFDKNLPNEKVLPKHSLLYEYFTVYNELTKVKYVTEGMRKPAFLSGEQKKAIVDLLFKTNRKVTVKQLKEDYFKKIECFDSVEISGVEDRFNASLGTYHDLLKIIKDKDFLDNEENEDILEDIVLTLTLFEDREMIEERLKTYAHLFDDKVMKQLKRRRYTGWGRLSRKLINGIRDKQSGKTILDFLKSDGFANRNFMQLIHDDSLTFKEDIQKAQVSGQGDSLHEHIANLAGSPAIKKGILQTVKVVDELVKVMGRHKPENIVIEMARENQTTQKGQKNSRERMKRIEEGIKELGSQILKEHPVENTQLQNEKLYLYYLQNGRDMYVDQELDINRLSDYDVDHIVPQSFLKDDSIDNKVLTRSDKARGKSDNVPSEEVVKKMKNYWRQLLNAKLITQRKFDNLTKAERGGLSELDKAGFIKRQLVETRQITKHVAQILDSRMNTKYDENDKLIREVKVITLKSKLVSDFRKDFQFYKVREINNYHHAHDAYLNAVVGTALIKKYPKLESEFVYGDYKVYDVRKMIAKSEQEIGKATAKYFFYSNIMNFFKTEITLANGEIRKRPLIETNGETGEIVWDKGRDFATVRKVLSMPQVNIVKKTEVQTGGFSKESILPKRNSDKLIARKKDWDPKKYGGFDSPTVAYSVLVVAKVEKGKSKKLKSVKELLGITIMERSSFEKNPIDFLEAKGYKEVKKDLIIKLPKYSLFELENGRKRMLASAGELQKGNELALPSKYVNFLYLASHYEKLKGSPEDNEQKQLFVEQHKHYLDEIIEQISEFSKRVILADANLDKVLSAYNKHRDKPIREQAENIIHLFTLTNLGAPAAFKYFDTTIDRKRYTSTKEVLDATLIHQSITGLYETRIDLSQLGGDGGEAAAKGSSGGGGGVQEISDSRPMLHIYLNGRRFLGLLDTGADKTCIAGRDWPANWPIHQTESSLQGLGMACGVARSSQPLRWQHEDKSGIIHPFVIPTLPFTLWGRDIMKDIKVRLMTDSPDDSQDLMIGAIESNLFADQISWKSDQPVWLNQWPLKQEKLQALQQLVTEQLQLGHLEESNSPWNTPVFVIKKKSGKWRLLQDLRAVNATMHDMGALQPGLPSPVAVPKGWEIIIIDLQDCFFNIKLHPEDCKRFAFSVPSPNFKRPYQRFQWKVLPQGMKNSPTLCQKFVDKAILTVRDKYQDSYIVHYMDDILLAHPSRSIVDEILTSMIQALNKHGLVVSTEKIQKYDNLKYLGTHIQGDSVSYQKLQIRTDKLRTLNDFQKLLGNINWIRPFLKLTTGELKPLFEILNGDSNPISTRKLTPEACKALQLMNERLSTARVKRLDLSQPWSLCILKTEYTPTACLWQDGVVEWIHLPHISPKVITPYDIFCTQLIIKGRHRSKELFSKDPDYIVVPYTKVQFDLLLQEKEDWPISLLGFLGEVHFHLPKDPLLTFTLQTAIIFPHMTSTTPLEKGIVIFTDGSANGRSVTYIQGREPIIKENTQNTAQQAEIVAVITAFEEVSQPFNLYTDSKYVTGLFPEIETATLSPRTKIYTELKHLQRLIHKRQEKFYIGHIRGHTGLPGPLAQGNAYADSLTRILTAAGKRTADGSEFEKRTADGSEFESPKKKAKVE

SEQ ID NO: 7345 - protein, 2088 aa, synthetic construct
MPAAKRVKLDGGDKKYSIGLDIGTNSVGWAVITDEYKVPSKKFKVLGNTDRHSIKKNLIGALLFDSGETAEATRLKRTARRRYTRRKNRICYLQEIFSNEMAKVDDSFFHRLEESFLVEEDKKHERHPIFGNIVDEVAYHEKYPTIYHLRKKLVDSTDKADLRLIYLALAHMIKFRGHFLIEGDLNPDNSDVDKLFIQLVQTYNQLFEENPINASGVDAKAILSARLSKSRRLENLIAQLPGEKKNGLFGNLIALSLGLTPNFKSNFDLAEDAKLQLSKDTYDDDLDNLLAQIGDQYADLFLAAKNLSDAILLSDILRVNTEITKAPLSASMIKRYDEHHQDLTLLKALVRQQLPEKYKEIFFDQSKNGYAGYIDGGASQEEFYKFIKPILEKMDGTEELLVKLNREDLLRKQRTFDNGSIPHQIHLGELHAILRRQEDFYPFLKDNREKIEKILTFRIPYYVGPLARGNSRFAWMTRKSEETITPWNFEEVVDKGASAQSFIERMTNFDKNLPNEKVLPKHSLLYEYFTVYNELTKVKYVTEGMRKPAFLSGEQKKAIVDLLFKTNRKVTVKQLKEDYFKKIECFDSVEISGVEDRFNASLGTYHDLLKIIKDKDFLDNEENEDILEDIVLTLTLFEDREMIEERLKTYAHLFDDKVMKQLKRRRYTGWGRLSRKLINGIRDKQSGKTILDFLKSDGFANRNFMQLIHDDSLTFKEDIQKAQVSGQGDSLHEHIANLAGSPAIKKGILQTVKVVDELVKVMGRHKPENIVIEMARENQTTQKGQKNSRERMKRIEEGIKELGSQILKEHPVENTQLQNEKLYLYYLQNGRDMYVDQELDINRLSDYDVDHIVPQSFLKDDSIDNKVLTRSDKARGKSDNVPSEEVVKKMKNYWRQLLNAKLITQRKFDNLTKAERGGLSELDKAGFIKRQLVETRQITKHVAQILDSRMNTKYDENDKLIREVKVITLKSKLVSDFRKDFQFYKVREINNYHHAHDAYLNAVVGTALIKKYPKLESEFVYGDYKVYDVRKMIAKSEQEIGKATAKYFFYSNIMNFFKTEITLANGEIRKRPLIETNGETGEIVWDKGRDFATVRKVLSMPQVNIVKKTEVQTGGFSKESILPKRNSDKLIARKKDWDPKKYGGFDSPTVAYSVLVVAKVEKGKSKKLKSVKELLGITIMERSSFEKNPIDFLEAKGYKEVKKDLIIKLPKYSLFELENGRKRMLASAGELQKGNELALPSKYVNFLYLASHYEKLKGSPEDNEQKQLFVEQHKHYLDEIIEQISEFSKRVILADANLDKVLSAYNKHRDKPIREQAENIIHLFTLTNLGAPAAFKYFDTTIDRKRYTSTKEVLDATLIHQSITGLYETRIDLSQLGGDGGEAAAKGSSGGGGGLDDEYRLYSPLVKPDQNIQFWLEQFPQAWAETAGMGLAKQVPPQVIQLKASATPVSVRQYPLSKEAQEGIRPHVQRLIQQGILVPVQSPWNTPLLPVRKPGTNDYRPVQDLREVNKRVQDIHPTVPNPYNLLCALPPQRSWYTVLDLKDAFFCLRLHPTSQPLFAFEWRDPGTGRTGQLTWTRLPQGFKNSPTIFNEALHRDLANFRIQHPQVTLLQYVDDLLLAGATKQDCLEGTKALLLELSDLGYRASAKKAQICRREVTYLGYSLRDGQRWLTEARKKTVVQIPAPTTAKQVREFLGKAGFCRLFIPGFATLAAPLYPLTKPKGEFSWAPEHQKAFDAIKKALLSAPALALPDVTKPFTLYVDERKGVARGVLTQTLGPWRRPVAYLSKKLDPVASGWPVCLKAIAAVAILVKDADKLTLGQNITVIAPHALENIVRQPPDRWMTNARMTHYQSLLLTERVTFAPPAALNPATLLPEETDEPVTHDCHQLLIEETGVRKDLTDIPLTGEVLTWFTDGSSYVVEGKRMAGAAVVDGTRTIWASSLPEGTSAQKAELMALTQALRLAEGKSINIYTDSRYAFATAHVHGAIYKQRGWLTSAGREIKNKEEILSLLEALHLPKRLAIIHCPGHQKAKDPISRGNQMADRVAKQAAQGVNLLPAGKRTADGSEFEKRTADGSEFESPKKKAKVE

SEQ ID NO: 7346 - protein, 2088 aa, synthetic construct; identical to SEQ ID NO: 7345

SEQ ID NO: 7347 - protein, 2087 aa, synthetic construct
MPAAKRVKLDGGDKKYSIGLDIGTNSVGWAVITDEYKVPSKKFKVLGNTDRHSIKKNLIGALLFDSGETAEATRLKRTARRRYTRRKNRICYLQEIFSNEMAKVDDSFFHRLEESFLVEEDKKHERHPIFGNIVDEVAYHEKYPTIYHLRKKLVDSTDKADLRLIYLALAHMIKFRGHFLIEGDLNPDNSDVDKLFIQLVQTYNQLFEENPINASGVDAKAILSARLSKSRRLENLIAQLPGEKKNGLFGNLIALSLGLTPNFKSNFDLAEDAKLQLSKDTYDDDLDNLLAQIGDQYADLFLAAKNLSDAILLSDILRVNTEITKAPLSASMIKRYDEHHQDLTLLKALVRQQLPEKYKEIFFDQSKNGYAGYIDGGASQEEFYKFIKPILEKMDGTEELLVKLNREDLLRKQRTFDNGSIPHQIHLGELHAILRRQEDFYPFLKDNREKIEKILTFRIPYYVGPLARGNSRFAWMTRKSEETITPWNFEEVVDKGASAQSFIERMTNFDKNLPNEKVLPKHSLLYEYFTVYNELTKVKYVTEGMRKPAFLSGEQKKAIVDLLFKTNRKVTVKQLKEDYFKKIECFDSVEISGVEDRFNASLGTYHDLLKIIKDKDFLDNEENEDILEDIVLTLTLFEDREMIEERLKTYAHLFDDKVMKQLKRRRYTGWGRLSRKLINGIRDKQSGKTILDFLKSDGFANRNFMQLIHDDSLTFKEDIQKAQVSGQGDSLHEHIANLAGSPAIKKGILQTVKVVDELVKVMGRHKPENIVIEMARENQTTQKGQKNSRERMKRIEEGIKELGSQILKEHPVENTQLQNEKLYLYYLQNGRDMYVDQELDINRLSDYDVDHIVPQSFLKDDSIDNKVLTRSDKARGKSDNVPSEEVVKKMKNYWRQLLNAKLITQRKFDNLTKAERGGLSELDKAGFIKRQLVETRQITKHVAQILDSRMNTKYDENDKLIREVKVITLKSKLVSDFRKDFQFYKVREINNYHHAHDAYLNAVVGTALIKKYPKLESEFVYGDYKVYDVRKMIAKSEQEIGKATAKYFFYSNIMNFFKTEITLANGEIRKRPLIETNGETGEIVWDKGRDFATVRKVLSMPQVNIVKKTEVQTGGFSKESILPKRNSDKLIARKKDWDPKKYGGFDSPTVAYSVLVVAKVEKGKSKKLKSVKELLGITIMERSSFEKNPIDFLEAKGYKEVKKDLIIKLPKYSLFELENGRKRMLASAGELQKGNELALPSKYVNFLYLASHYEKLKGSPEDNEQKQLFVEQHKHYLDEIIEQISEFSKRVILADANLDKVLSAYNKHRDKPIREQAENIIHLFTLTNLGAPAAFKYFDTTIDRKRYTSTKEVLDATLIHQSITGLYETRIDLSQLGGDGGEAAAKGSSGGGGGIPWLMKKPLQLTTLVPLQEYEERLLKQTMLTGSYKEKLQSLFLKYDALWQHWENQVGHRRIKPHHIATGTVNPRPQKQYPINPKAKASIQTVINDLLKQGVLIQQNSIMNTPVYPVPKPDGKWRMVLDYREVNKTIPLIAAQNQHSAGILSSIFRGKYKTTLDLSNGFWAHSITPESYWLTAFTWLGQQYCWTRLPQGFLNSPALFNADVVDLLKEVPNVQVYVDDIYISHDDPREHLEQLEKVFSLLLNAGYVVSLKKSEIAQHEVEFLGFNITKEGRGLTETFKQKLLNITPPRDLKQLQSILGKLNFARNFIPNFSELVKPLYNIIATAPGKYITWTTDNSQQLQNIISMLNSAENLEERNPEVRLIMKVNTSPSAGYIRFYNEFAKRPIMYLNYVYTKAEVKFTNTEKLLTTIHKGLIKALDLGMGQEILVYSPIVSMTKIQKTPLPERKALPIRWITWMSYLEDPRIQFHYDKTLPELQQVPTVTDDIIAKIKHPSEFSMVFYTDGSAIKHPNVNKSHNAGMGIAQVQFKPEFTVINTWSIPLGDHTAQLAEVAAVEFACKKALKIDGPVLIVTDSFYVAESVNKELPYWQSNGFFNNKKKPLKHVSKWKSIADCIQLKPDIIIIHEKGHQPTASTFHTEGNNLADKLATQGSYVVNAGKRTADGSEFEKRTADGSEFESPKKKAKVE

SEQ ID NO: 7348 - protein, 2094 aa, synthetic construct
MPAAKRVKLDGGDKKYSIGLDIGTNSVGWAVITDEYKVPSKKFKVLGNTDRHSIKKNLIGALLFDSGETAEATRLKRTARRRYTRRKNRICYLQEIFSNEMAKVDDSFFHRLEESFLVEEDKKHERHPIFGNIVDEVAYHEKYPTIYHLRKKLVDSTDKADLRLIYLALAHMIKFRGHFLIEGDLNPDNSDVDKLFIQLVQTYNQLFEENPINASGVDAKAILSARLSKSRRLENLIAQLPGEKKNGLFGNLIALSLGLTPNFKSNFDLAEDAKLQLSKDTYDDDLDNLLAQIGDQYADLFLAAKNLSDAILLSDILRVNTEITKAPLSASMIKRYDEHHQDLTLLKALVRQQLPEKYKEIFFDQSKNGYAGYIDGGASQEEFYKFIKPILEKMDGTEELLVKLNREDLLRKQRTFDNGSIPHQIHLGELHAILRRQEDFYPFLKDNREKIEKILTFRIPYYVGPLARGNSRFAWMTRKSEETITPWNFEEVVDKGASAQSFIERMTNFDKNLPNEKVLPKHSLLYEYFTVYNELTKVKYVTEGMRKPAFLSGEQKKAIVDLLFKTNRKVTVKQLKEDYFKKIECFDSVEISGVEDRFNASLGTYHDLLKIIKDKDFLDNEENEDILEDIVLTLTLFEDREMIEERLKTYAHLFDDKVMKQLKRRRYTGWGRLSRKLINGIRDKQSGKTILDFLKSDGFANRNFMQLIHDDSLTFKEDIQKAQVSGQGDSLHEHIANLAGSPAIKKGILQTVKVVDELVKVMGRHKPENIVIEMARENQTTQKGQKNSRERMKRIEEGIKELGSQILKEHPVENTQLQNEKLYLYYLQNGRDMYVDQELDINRLSDYDVDHIVPQSFLKDDSIDNKVLTRSDKARGKSDNVPSEEVVKKMKNYWRQLLNAKLITQRKFDNLTKAERGGLSELDKAGFIKRQLVETRQITKHVAQILDSRMNTKYDENDKLIREVKVITLKSKLVSDFRKDFQFYKVREINNYHHAHDAYLNAVVGTALIKKYPKLESEFVYGDYKVYDVRKMIAKSEQEIGKATAKYFFYSNIMNFFKTEITLANGEIRKRPLIETNGETGEIVWDKGRDFATVRKVLSMPQVNIVKKTEVQTGGFSKESILPKRNSDKLIARKKDWDPKKYGGFDSPTVAYSVLVVAKVEKGKSKKLKSVKELLGITIMERSSFEKNPIDFLEAKGYKEVKKDLIIKLPKYSLFELENGRKRMLASAGELQKGNELALPSKYVNFLYLASHYEKLKGSPEDNEQKQLFVEQHKHYLDEIIEQISEFSKRVILADANLDKVLSAYNKHRDKPIREQAENIIHLFTLTNLGAPAAFKYFDTTIDRKRYTSTKEVLDATLIHQSITGLYETRIDLSQLGGDGGEAAAKGSSGGGGGVLNLEEEYRLHEKPVPSSIDPSWLQLFPTVWAERAGMGLANQVPPVVVELRSGASPVAVRQYPMSKEAREGIRPHIQRFLDLGVLVPCQSPWNTPLLPVKKPGTNDYRPVQDLREINKRVQDIHPTVPNPYNLLSSLPPSHTWYSVLDLKDAFFCLKLHPNSQPLFAFEWRDPEKGNTGQLTWTRLPQGFKNSPTLFDEALHRDLAPFRALNPQVVLLQYVDDLLVAAPTYRDCKEGTQKLLQELSKLGYRVSAKKAQLCQKEVTYLGYLLKEGKRWLTPARKATVMKIPPPTTPRQVREFLGTAGFCRLWIPGFASLAAPLYPLTKESIPFIWTEEHQKAFDRIKEALLSAPALALPDLTKPFTLYVDERAGVARGVLTQTLGPWRRPVAYLSKKLDPVASGWPTCLKAVAAVALLLKDADKLTLGQNVTVIASHSLESIVRQPPDRWMTNARMTHYQSLLLNERVSFAPPAVLNPATLLPVESEATPVHRCSEILAEETGTRRDLKDQPLPGVPAWYTDGSSFIAEGKRRAGAAIVDGKRTVWASSLPEGTSAQKAELVALTQALRLAEGKDINIYTDSRYAFATAHIHGAIYKQRGLLTSAGKDIKNKEEILALLEAIHLPKRVAIIHCPGHQKGNDPVATGNRRADEAAKQAALSTRVLAETTKPAGKRTADGSEFEKRTADGSEFESPKKKAKVE

SEQ ID NO: 7349 - protein, 2094 aa, synthetic construct
MPAAKRVKLDGGDKKYSIGLDIGTNSVGWAVITDEYKVPSKKFKVLGNTDRHSIKKNLIGALLFDSGETAEATRLKRTARRRYTRRKNRICYLQEIFSNEMAKVDDSFFHRLEESFLVEEDKKHERHPIFGNIVDEVAYHEKYPTIYHLRKKLVDSTDKADLRLIYLALAHMIKFRGHFLIEGDLNPDNSDVDKLFIQLVQTYNQLFEENPINASGVDAKAILSARLSKSRRLENLIAQLPGEKKNGLFGNLIALSLGLTPNFKSNFDLAEDAKLQLSKDTYDDDLDNLLAQIGDQYADLFLAAKNLSDAILLSDILRVNTEITKAPLSASMIKRYDEHHQDLTLLKALVRQQLPEKYKEIFFDQSKNGYAGYIDGGASQEEFYKFIKPILEKMDGTEELLVKLNREDLLRKQRTFDNGSIPHQIHLGELHAILRRQEDFYPFLKDNREKIEKILTFRIPYYVGPLARGNSRFAWMTRKSEETITPWNFEEVVDKGASAQSFIERMTNFDKNLPNEKVLPKHSLLYEYFTVYNELTKVKYVTEGMRKPAFLSGEQKKAIVDLLFKTNRKVTVKQLKEDYFKKIECFDSVEISGVEDRFNASLGTYHDLLKIIKDKDFLDNEENEDILEDIVLTLTLFEDREMIEERLKTYAHLFDDKVMKQLKRRRYTGWGRLSRKLINGIRDKQSGKTILDFLKSDGFANRNFMQLIHDDSLTFKEDIQKAQVSGQGDSLHEHIANLAGSPAIKKGILQTVKVVDELVKVMGRHKPENIVIEMARENQTTQKGQKNSRERMKRIEEGIKELGSQILKEHPVENTQLQNEKLYLYYLQNGRDMYVDQELDINRLSDYDVDHIVPQSFLKDDSIDNKVLTRSDKARGKSDNVPSEEVVKKMKNYWRQLLNAKLITQRKFDNLTKAERGGLSELDKAGFIKRQLVETRQITKHVAQILDSRMNTKYDENDKLIREVKVITLKSKLVSDFRKDFQFYKVREINNYHHAHDAYLNAVVGTALIKKYPKLESEFVYGDYKVYDVRKMIAKSEQEIGKATAKYFFYSNIMNFFKTEITLANGEIRKRPLIETNGETGEIVWDKGRDFATVRKVLSMPQVNIVKKTEVQTGGFSKESILPKRNSDKLIARKKDWDPKKYGGFDSPTVAYSVLVVAKVEKGKSKKLKSVKELLGITIMERSSFEKNPIDFLEAKGYKEVKKDLIIKLPKYSLFELENGRKRMLASAGELQKGNELALPSKYVNFLYLASHYEKLKGSPEDNEQKQLFVEQHKHYLDEIIEQISEFSKRVILADANLDKVLSAYNKHRDKPIREQAENIIHLFTLTNLGAPAAFKYFDTTIDRKRYTSTKEVLDATLIHQSITGLYETRIDLSQLGGDGGEAAAKGSSGGGGGVLNLEEEYRLHEKPVPSSIDPSWLQLFPTVWAERAGMGLANQVPPVVVELRSGASPVAVRQYPMSKEAREGIRPHIQRFLDLGVLVPCQSPWNTPLLPVKKPGTNDYRPVQDLREINKRVQDIHPTVPNPYNLLSSLPPSHTWYSVLDLKDAFFCLKLHPNSQPLFAFEWRDPEKGNTGQLTWTRLPQGFKNSPTLFNEALHRDLAPFRALNPQVVLLQYVDDLLVAAPTYRDCKEGTQKLLQELSKLGYRVSAKKAQLCQKEVTYLGYLLKEGKRWLTPARKATVMKIPPPTTPRQVREFLGTAGFCRLWIPGFASLAAPLYPLTKPSIPFIWTEEHQKAFDRIKEALLSAPALALPDLTKPFTLYVDERAGVARGVLTQTLGPWRRPVAYLSKKLDPVASGWPTCLKAVAAVALLLKDADKLTLGQNVTVIASHSLESIVRQPPDRWMTNARMTHYQSLLLNERVSFAPPAVLNPATLLPVESEATPVHRCSEILAEETGTRRDLKDQPLPGVPAWYTDGSSFIAEGKRRAGAAIVDGKRTVWASSLPEGTSAQKAELVALTQALRLAEGKDINIYTDSRYAFATAHIHGAIYKQRGWLTSAGKDIKNKEEILALLEAIHLPKRVAIIHCPGHQKGNDPVATGNRRADEAAKQAALSTRVLAETTKPAGKRTADGSEFEKRTADGSEFESPKKKAKVE

SEQ ID NO: 7350 - protein, 2096 aa, synthetic construct
MPAAKRVKLDGGDKKYSIGLDIGTNSVGWAVITDEYKVPSKKFKVLGNTDRHSIKKNLIGALLFDSGETAEATRLKRTARRRYTRRKNRICYLQEIFSNEMAKVDDSFFHRLEESFLVEEDKKHERHPIFGNIVDEVAYHEKYPTIYHLRKKLVDSTDKADLRLIYLALAHMIKFRGHFLIEGDLNPDNSDVDKLFIQLVQTYNQLFEENPINASGVDAKAILSARLSKSRRLENLIAQLPGEKKNGLFGNLIALSLGLTPNFKSNFDLAEDAKLQLSKDTYDDDLDNLLAQIGDQYADLFLAAKNLSDAILLSDILRVNTEITKAPLSASMIKRYDEHHQDLTLLKALVRQQLPEKYKEIFFDQSKNGYAGYIDGGASQEEFYKFIKPILEKMDGTEELLVKLNREDLLRKQRTFDNGSIPHQIHLGELHAILRRQEDFYPFLKDNREKIEKILTFRIPYYVGPLARGNSRFAWMTRKSEETITPWNFEEVVDKGASAQSFIERMTNFDKNLPNEKVLPKHSLLYEYFTVYNELTKVKYVTEGMRKPAFLSGEQKKAIVDLLFKTNRKVTVKQLKEDYFKKIECFDSVEISGVEDRFNASLGTYHDLLKIIKDKDFLDNEENEDILEDIVLTLTLFEDREMIEERLKTYAHLFDDKVMKQLKRRRYTGWGRLSRKLINGIRDKQSGKTILDFLKSDGFANRNFMQLIHDDSLTFKEDIQKAQVSGQGDSLHEHIANLAGSPAIKKGILQTVKVVDELVKVMGRHKPENIVIEMARENQTTQKGQKNSRERMKRIEEGIKELGSQILKEHPVENTQLQNEKLYLYYLQNGRDMYVDQELDINRLSDYDVDHIVPQSFLKDDSIDNKVLTRSDKARGKSDNVPSEEVVKKMKNYWRQLLNAKLITQRKFDNLTKAERGGLSELDKAGFIKRQLVETRQITKHVAQILDSRMNTKYDENDKLIREVKVITLKSKLVSDFRKDFQFYKVREINNYHHAHDAYLNAVVGTALIKKYPKLESEFVYGDYKVYDVRKMIAKSEQEIGKATAKYFFYSNIMNFFKTEITLANGEIRKRPLIETNGETGEIVWDKGRDFATVRKVLSMPQVNIVKKTEVQTGGFSKESILPKRNSDKLIARKKDWDPKKYGGFDSPTVAYSVLVVAKVEKGKSKKLKSVKELLGITIMERSSFEKNPIDFLEAKGYKEVKKDLIIKLPKYSLFELENGRKRMLASAGELQKGNELALPSKYVNFLYLASHYEKLKGSPEDNEQKQLFVEQHKHYLDEIIEQISEFSKRVILADANLDKVLSAYNKHRDKPIREQAENIIHLFTLTNLGAPAAFKYFDTTIDRKRYTSTKEVLDATLIHQSITGLYETRIDLSQLGGDGGEAAAKGSSGGGGGTLNIEDEYRLHETSKEPDVPLGSTWLSDFPQAWAETGGMGLAVRQAPLIIPLKATSTPVSIKQYPMSQEARLGIKPHIQRLLDQGILVPCQSPWNTPLLPVKKPGTNDYRPVQDLREVNKRVEDIHPTVPNPYNLLSGLPPSHQWYTVLDLKDAFFCLRLHPTSQPLFAFEWRDPEMGISGQLTWTRLPQGFKNSPTLFNEALHRDLADFRIQHPDLILLQYVDDLLLAATSEQDCQRGTRALLQTLGNLGYRASAKKAQICQKQVKYLGYLLKEGQRWLTEARKETVMGQPTPKTPRQLREFLGTAGFCRLWIPGFAEMAAPLYPLTKPGTLFNWGPDQQKAYQEIKQALLTAPALGLPDLTKPFELFVDEKQGYAKGVLTQKLGPWRRPVAYLSKKLDPVAAGWPPCLRMVAAIAVLTKDAGKLTMGQPLVILAPHAVEALVKQPPDRWLSNARMTHYQAMLLDTDRVQFGPVVALNPATLLPLPEKEAPHDCLEILAETHGTRPDLTDQPIPDADYTWYTDGSSFLQEGQRRAGAAVTTETEVIWARALPAGTSAQRAELIALTQALKMAEGKKLNVYTDSRYAFATAHVHGEIYRRRGWLTSEGREIKNKNEILALLKALFLPKRLSIIHCPGHQKGNSAEARGNRMADQAAREAAMKAVLETSTLLAGKRTADGSEFEKRTADGSEFESPKKKAKVE

SEQ ID NO: 7351 - protein, 2096 aa, synthetic construct
MPAAKRVKLDGGDKKYSIGLDIGTNSVGWAVITDEYKVPSKKFKVLGNTDRHSIKKNLIGALLFDSGETAEATRLKRTARRRYTRRKNRICYLQEIFSNEMAKVDDSFFHRLEESFLVEEDKKHERHPIFGNIVDEVAYHEKYPTIYHLRKKLVDSTDKADLRLIYLALAHMIKFRGHFLIEGDLNPDNSDVDKLFIQLVQTYNQLFEENPINASGVDAKAILSARLSKSRRLENLIAQLPGEKKNGLFGNLIALSLGLTPNFKSNFDLAEDAKLQLSKDTYDDDLDNLLAQIGDQYADLFLAAKNLSDAILLSDILRVNTEITKAPLSASMIKRYDEHHQDLTLLKALVRQQLPEKYKEIFFDQSKNGYAGYIDGGASQEEFYKFIKPILEKMDGTEELLVKLNREDLLRKQRTFDNGSIPHQIHLGELHAILRRQEDFYPFLKDNREKIEKILTFRIPYYVGPLARGNSRFAWMTRKSEETITPWNFEEVVDKGASAQSFIERMTNFDKNLPNEKVLPKHSLLYEYFTVYNELTKVKYVTEGMRKPAFLSGEQKKAIVDLLFKTNRKVTVKQLKEDYFKKIECFDSVEISGVEDRFNASLGTYHDLLKIIKDKDFLDNEENEDILEDIVLTLTLFEDREMIEERLKTYAHLFDDKVMKQLKRRRYTGWGRLSRKLINGIRDKQSGKTILDFLKSDGFANRNFMQLIHDDSLTFKEDIQKAQVSGQGDSLHEHIANLAGSPAIKKGILQTVKVVDELVKVMGRHKPENIVIEMARENQTTQKGQKNSRERMKRIEEGIKELGSQILKEHPVENTQLQNEKLYLYYLQNGRDMYVDQELDINRLSDYDVDHIVPQSFLKDDSIDNKVLTRSDKARGKSDNVPSEEVVKKMKNYWRQLLNAKLITQRKFDNLTKAERGGLSELDKAGFIKRQLVETRQITKHVAQILDSRMNTKYDENDKLIREVKVITLKSKLVSDFRKDFQFYKVREINNYHHAHDAYLNAVVGTALIKKYPKLESEFVYGDYKVYDVRKMIAKSEQEIGKATAKYFFYSNIMNFFKTEITLANGEIRKRPLIETNGETGEIVWDKGRDFATVRKVLSMPQVNIVKKTEVQTGGFSKESILPKRNSDKLIARKKDWDPKKYGGFDSPTVAYSVLVVAKVEKGKSKKLKSVKELLGITIMERSSFEKNPIDFLEAKGYKEVKKDLIIKLPKYSLFELENGRKRMLASAGELQKGNELALPSKYVNFLYLASHYEKLKGSPEDNEQKQLFVEQHKHYLDEIIEQISEFSKRVILADANLDKVLSAYNKHRDKPIREQAENIIHLFTLTNLGAPAAFKYFDTTIDRKRYTSTKEVLDATLIHQSITGLYETRIDLSQLGGDGGGGGGSSPAPGGTAPLEEEYRLFLEAPIQNVTLLEQWKREIPKVWAEINPPGLASTQAPIHVQLLSTALPVRVRQYPITLEAKRSLRETIRKFRAAGILRPVHSPWNTPLLPVRKSGTSEYRMVQDLREVNKRVETIHPTVPNPYTLLSLLPPDRIWYSVLDLKDAFFCIPLAPESQLIFAFEWADAEEGESGQLTWTRLPQGFKNSPTLFNEALNRDLQGFRLDHPSVSLLQYVDDLLIAADTQAACLSATRDLLMTLAELGYRVSGKKAQLCQEEVTYLGFKIHKGSRSLSNSRTQAILQIPVPKTKRQVREFLGKIGYCRLFIPGFAELAQPLYAATRPGNDPLVWGEKEEEAFQSLKLALTQPPALALPSLDKPFQLFVEETSGAAKGVLTQALGPWKRPVAYLSKRLDPVAAGWPRCLRAIAAAALLTREASKLTFGQDIEITSSHNLESLLRSPPDKWLTNARITQYQVLLLDPPRVRFKQTAALNPATLLPETDDTLPIHHCLDTLDSLTSTRPDLTDQPLAQAEATLFTDGSSYIRDGKRYAGAAVVTLDSVIWAEPLPIGTSAQKAELIALTKALEWSKDKSVNIYTDSRYAFATLHVHGMIYRERGWLTAGGKAIKNAPEILALLTAVWLPKRVAVMHCKGHQKDDAPTSTGNRRADEVAREVAIRPLSTQATISAGKRTADGSEFEKRTADGSEFESPKKKAKVE

SEQ ID NO: 7352 - protein, 2093 aa, synthetic construct
MPAAKRVKLDGGDKKYSIGLDIGTNSVGWAVITDEYKVPSKKFKVLGNTDRHSIKKNLIGALLFDSGETAEATRLKRTARRRYTRRKNRICYLQEIFSNEMAKVDDSFFHRLEESFLVEEDKKHERHPIFGNIVDEVAYHEKYPTIYHLRKKLVDSTDKADLRLIYLALAHMIKFRGHFLIEGDLNPDNSDVDKLFIQLVQTYNQLFEENPINASGVDAKAILSARLSKSRRLENLIAQLPGEKKNGLFGNLIALSLGLTPNFKSNFDLAEDAKLQLSKDTYDDDLDNLLAQIGDQYADLFLAAKNLSDAILLSDILRVNTEITKAPLSASMIKRYDEHHQDLTLLKALVRQQLPEKYKEIFFDQSKNGYAGYIDGGASQEEFYKFIKPILEKMDGTEELLVKLNREDLLRKQRTFDNGSIPHQIHLGELHAILRRQEDFYPFLKDNREKIEKILTFRIPYYVGPLARGNSRFAWMTRKSEETITPWNFEEVVDKGASAQSFIERMTNFDKNLPNEKVLPKHSLLYEYFTVYNELTKVKYVTEGMRKPAFLSGEQKKAIVDLLFKTNRKVTVKQLKEDYFKKIECFDSVEISGVEDRFNASLGTYHDLLKIIKDKDFLDNEENEDILEDIVLTLTLFEDREMIEERLKTYAHLFDDKVMKQLKRRRYTGWGRLSRKLINGIRDKQSGKTILDFLKSDGFANRNFMQLIHDDSLTFKEDIQKAQVSGQGDSLHEHIANLAGSPAIKKGILQTVKVVDELVKVMGRHKPENIVIEMARENQTTQKGQKNSRERMKRIEEGIKELGSQILKEHPVENTQLQNEKLYLYYLQNGRDMYVDQELDINRLSDYDVDHIVPQSFLKDDSIDNKVLTRSDKARGKSDNVPSEEVVKKMKNYWRQLLNAKLITQRKFDNLTKAERGGLSELDKAGFIKRQLVETRQITKHVAQILDSRMNTKYDENDKLIREVKVITLKSKLVSDFRKDFQFYKVREINNYHHAHDAYLNAVVGTALIKKYPKLESEFVYGDYKVYDVRKMIAKSEQEIGKATAKYFFYSNIMNFFKTEITLANGEIRKRPLIETNGETGEIVWDKGRDFATVRKVLSMPQVNIVKKTEVQTGGFSKESILPKRNSDKLIARKKDWDPKKYGGFDSPTVAYSVLVVAKVEKGKSKKLKSVKELLGITIMERSSFEKNPIDFLEAKGYKEVKKDLIIKLPKYSLFELENGRKRMLASAGELQKGNELALPSKYVNFLYLASHYEKLKGSPEDNEQKQLFVEQHKHYLDEIIEQISEFSKRVILADANLDKVLSAYNKHRDKPIREQAENIIHLFTLTNLGAPAAFKYFDTTIDRKRYTSTKEVLDATLIHQSITGLYETRIDLSQLGGDGGGGGGSSPAPGGTLQLEEEYRLFEPESTQKQEMDIWLKNFPQAWAETGGMGTAHCQAPVLIQLKATATPISIRQYPMPHEAYQGIKPHIRRMLDQGILKPCQSPWNTPLLPVKKPGTEDYRPVQDLREVNKRVEDIHPTVPNPYNLLSTLPPSHPWYTVLDLKDAFFCLRLHSESQLLFAFEWRDPEIGLSGQLTWTRLPQGFKNSPTLFNEALHSDLADFRVRYPALVLLQYVDDLLLAAATRTECLEGTKALLETLGNKGYRASAKKAQICLQEVTYLGYSLKDGQRWLTKARKEAILSIPVPKNSRQVREFLGKAGYCRLFIPGFAELAAPLYPLTRPGTLFQWGTEQQLAFEDIKKALLSSPALGLPDITKPFELFIDENSGFAKGVLVQKLGPWKRPVAYLSKKLDTVASGWPPCLRMVAAIAILVKDAGKLTLGQPLTILTSHPVEALVRQPPNKWLSNARMTHYQAMLLDAERVHFGPTVSLNPATLLPLPSGGNHHDCLQILAETHGTRPDLTDQPLPDADLTWYTDGSSFIRNGEREAGAAVTTESEVIWAAPLPPGTSAQRAELIALTQALKMAEGKKLTVYTDSRYAFATTHVHGEIYRRRGWLTSEGKEIKNKNEILALLEALFLPKRLSIIHCPGHQKGDSPQAKGNRLADDTAKKAATETHSSLTVLPAGKRTADGSEFEKRTADGSEFESPKKKAKVE

SEQ ID NO: 7353 - protein, 2216 aa, synthetic construct
MPAAKRVKLDGGDKKYSIGLDIGTNSVGWAVITDEYKVPSKKFKVLGNTDRHSIKKNLIGALLFDSGETAEATRLKRTARRRYTRRKNRICYLQEIFSNEMAKVDDSFFHRLEESFLVEEDKKHERHPIFGNIVDEVAYHEKYPTIYHLRKKLVDSTDKADLRLIYLALAHMIKFRGHFLIEGDLNPDNSDVDKLFIQLVQTYNQLFEENPINASGVDAKAILSARLSKSRRLENLIAQLPGEKKNGLFGNLIALSLGLTPNFKSNFDLAEDAKLQLSKDTYDDDLDNLLAQIGDQYADLFLAAKNLSDAILLSDILRVNTEITKAPLSASMIKRYDEHHQDLTLLKALVRQQLPEKYKEIFFDQSKNGYAGYIDGGASQEEFYKFIKPILEKMDGTEELLVKLNREDLLRKQRTFDNGSIPHQIHLGELHAILRRQEDFYPFLKDNREKIEKILTFRIPYYVGPLARGNSRFAWMTRKSEETITPWNFEEVVDKGASAQSFIERMTNFDKNLPNEKVLPKHSLLYEYFTVYNELTKVKYVTEGMRKPAFLSGEQKKAIVDLLFKTNRKVTVKQLKEDYFKKIECFDSVEISGVEDRFNASLGTYHDLLKIIKDKDFLDNEENEDILEDIVLTLTLFEDREMIEERLKTYAHLFDDKVMKQLKRRRYTGWGRLSRKLINGIRDKQSGKTILDFLKSDGFANRNFMQLIHDDSLTFKEDIQKAQVSGQGDSLHEHIANLAGSPAIKKGILQTVKVVDELVKVMGRHKPENIVIEMARENQTTQKGQKNSRERMKRIEEGIKELGSQILKEHPVENTQLQNEKLYLYYLQNGRDMYVDQELDINRLSDYDVDHIVPQSFLKDDSIDNKVLTRSDKARGKSDNVPSEEVVKKMKNYWRQLLNAKLITQRKFDNLTKAERGGLSELDKAGFIKRQLVETRQITKHVAQILDSRMNTKYDENDKLIREVKVITLKSKLVSDFRKDFQFYKVREINNYHHAHDAYLNAVVGTALIKKYPKLESEFVYGDYKVYDVRKMIAKSEQEIGKATAKYFFYSNIMNFFKTEITLANGEIRKRPLIETNGETGEIVWDKGRDFATVRKVLSMPQVNIVKKTEVQTGGFSKESILPKRNSDKLIARKKDWDPKKYGGFDSPTVAYSVLVVAKVEKGKSKKLKSVKELLGITIMERSSFEKNPIDFLEAKGYKEVKKDLIIKLPKYSLFELENGRKRMLASAGELQKGNELALPSKYVNFLYLASHYEKLKGSPEDNEQKQLFVEQHKHYLDEIIEQISEFSKRVILADANLDKVLSAYNKHRDKPIREQAENIIHLFTLTNLGAPAAFKYFDTTIDRKRYTSTKEVLDATLIHQSITGLYETRIDLSQLGGDGGGGGGSSPAPGGTLGDQGSRGSDPLPEPRVTLTVEGIPTEFLVNTGAEHSVLTKPMGKMGSKRTVVAGATGSKVYPWTTKRLLKIGQKQVTHSFLVIPECPAPLLGRDLLTKLKAQIQFSTEGPQVTWEDRPAMCLVLNLEEEYRLHEKPVPPSIDPSWLQLFPMVWAEKAGMGLANQVPPVVVELKSDASPVAVRQYPMSKEAREGIRPHIQRFLDLGILVPCQSPWNTPLLPVKKPGTNDYRPVQDLREVNKRVQDIHPTVPNPYNLLSSLPPSHTWYSVLDLKDAFFCLKLHPNSQPLFAFEWRDPEKGNTGQLTWTRLPQGFKNSPTLFDEALHRDLASFRALNPQVVMLQYVDDLLVAAPTYRDCKEGTRRLLQELSKLGYRVSAKKAQLCREEVTYLGYLLKGGKRWLTPARKATVMKIPTPTTPRQVREFLGTAGFCRLWIPGFASLAAPLYPLTREKVPFTWTEAHQEAFGRIKEALLSAPALALPDLTKPFALYVDEKEGVARGVLTQTLGPWRRPVAYLSKKLDPVASGWPTCLKAIAAVALLLKDADKLTLGQNVLVIAPHNLESIVRQPPDRWMTNARMTHYQSLLLNERVSFAPPAILNPATLLPVESDDTPIHICSEILAEETGTRPDLRDQPLPGVPAWYTDGSSFIMDGRRQAGAAIVDNKRTVWASNLPEGTSAQKAELIALTQALRLAEGKSINIYTDSRYAFATAHVHGAIYKQRGLLTSAGKDIKNKEEILALLEAIHLPKRVAIIHCPGHQRGTDPVATGNRKADEAAKQAAQSTRILTETTKNAGKRTADGSEFEKRTADGSEFESPKKKAKVE

SEQ ID NO: 7354 - protein, 2125 aa, synthetic construct
MPAAKRVKLDGGDKKYSIGLDIGTNSVGWAVITDEYKVPSKKFKVLGNTDRHSIKKNLIGALLFDSGETAEATRLKRTARRRYTRRKNRICYLQEIFSNEMAKVDDSFFHRLEESFLVEEDKKHERHPIFGNIVDEVAYHEKYPTIYHLRKKLVDSTDKADLRLIYLALAHMIKFRGHFLIEGDLNPDNSDVDKLFIQLVQTYNQLFEENPINASGVDAKAILSARLSKSRRLENLIAQLPGEKKNGLFGNLIALSLGLTPNFKSNFDLAEDAKLQLSKDTYDDDLDNLLAQIGDQYADLFLAAKNLSDAILLSDILRVNTEITKAPLSASMIKRYDEHHQDLTLLKALVRQQLPEKYKEIFFDQSKNGYAGYIDGGASQEEFYKFIKPILEKMDGTEELLVKLNREDLLRKQRTFDNGSIPHQIHLGELHAILRRQEDFYPFLKDNREKIEKILTFRIPYYVGPLARGNSRFAWMTRKSEETITPWNFEEVVDKGASAQSFIERMTNFDKNLPNEKVLPKHSLLYEYFTVYNELTKVKYVTEGMRKPAFLSGEQKKAIVDLLFKTNRKVTVKQLKEDYFKKIECFDSVEISGVEDRFNASLGTYHDLLKIIKDKDFLDNEENEDILEDIVLTLTLFEDREMIEERLKTYAHLFDDKVMKQLKRRRYTGWGRLSRKLINGIRDKQSGKTILDFLKSDGFANRNFMQLIHDDSLTFKEDIQKAQVSGQGDSLHEHIANLAGSPAIKKGILQTVKVVDELVKVMGRHKPENIVIEMARENQTTQKGQKNSRERMKRIEEGIKELGSQILKEHPVENTQLQNEKLYLYYLQNGRDMYVDQELDINRLSDYDVDHIVPQSFLKDDSIDNKVLTRSDKARGKSDNVPSEEVVKKMKNYWRQLLNAKLITQRKFDNLTKAERGGLSELDKAGFIKRQLVETRQITKHVAQILDSRMNTKYDENDKLIREVKVITLKSKLVSDFRKDFQFYKVREINNYHHAHDAYLNAVVGTALIKKYPKLESEFVYGDYKVYDVRKMIAKSEQEIGKATAKYFFYSNIMNFFKTEITLANGEIRKRPLIETNGETGEIVWDKGRDFATVRKVLSMPQVNIVKKTEVQTGGFSKESILPKRNSDKLIARKKDWDPKKYGGFDSPTVAYSVLVVAKVEKGKSKKLKSVKELLGITIMERSSFEKNPIDFLEAKGYKEVKKDLIIKLPKYSLFELENGRKRMLASAGELQKGNELALPSKYVNFLYLASHYEKLKGSPEDNEQKQLFVEQHKHYLDEIIEQISEFSKRVILADANLDKVLSAYNKHRDKPIREQAENIIHLFTLTNLGAPAAFKYFDTTIDRKRYTSTKEVLDATLIHQSITGLYETRIDLSQLGGDGGGGGGSSPAPGGLLGRDLLTKLKAQIQFSTEGPQVTWEDRPAMCLVLNLEEEYRLHEKPVPPSIDPSWLQLFPMVWAEKAGMGLANQVPPVVVELKSDASPVAVRQYPMSKEAREGIRPHIQRFLDLGILVPCQSPWNTPLLPVKKPGTNDYRPVQDLREVNKRVQDIHPTVPNPYNLLSSLPPSHTWYSVLDLKDAFFCLKLHPNSQPLFAFEWRDPEKGNTGQLTWTRLPQGFKNSPTLFNEALHRDLASFRALNPQVVMLQYVDDLLVAAPTYRDCKEGTRRLLQELSKLGYRVSAKKAQLCREEVTYLGYLLKGGKRWLTPARKATVMKIPTPTTPRQVREFLGTAGFCRLWIPGFASLAAPLYPLTRPKVPFTWTEAHQEAFGRIKEALLSAPALALPDLTKPFALYVDEKEGVARGVLTQTLGPWRRPVAYLSKKLDPVASGWPTCLKAIAAVALLLKDADKLTLGQNVLVIAPHNLESIVRQPPDRWMTNARMTHYQSLLLNERVSFAPPAILNPATLLPVESDDTPIHICSEILAEETGTRPDLRDQPLPGVPAWYTDGSSFIMDGRRQAGAAIVDNKRTVWASNLPEGTSAQKAELIALTQALRLAEGKSINIYTDSRYAFATAHVHGAIYKQRGWLTSAGKDIKNKEEILALLEAIHLPKRVAIIHCPGHQRGTDPVATGNRKADEAAKQAAQSTRILTETTKNAGKRTADGSEFEKRTADGSEFESPKKKAKVE

SEQ ID NO: 7355 - protein, 2216 aa, synthetic construct
MPAAKRVKLDGGDKKYSIGLDIGTNSVGWAVITDEYKVPSKKFKVLGNTDRHSIKKNLIGALLFDSGETAEATRLKRTARRRYTRRKNRICYLQEIFSNEMAKVDDSFFHRLEESFLVEEDKKHERHPIFGNIVDEVAYHEKYPTIYHLRKKLVDSTDKADLRLIYLALAHMIKFRGHFLIEGDLNPDNSDVDKLFIQLVQTYNQLFEENPINASGVDAKAILSARLSKSRRLENLIAQLPGEKKNGLFGNLIALSLGLTPNFKSNFDLAEDAKLQLSKDTYDDDLDNLLAQIGDQYADLFLAAKNLSDAILLSDILRVNTEITKAPLSASMIKRYDEHHQDLTLLKALVRQQLPEKYKEIFFDQSKNGYAGYIDGGASQEEFYKFIKPILEKMDGTEELLVKLNREDLLRKQRTFDNGSIPHQIHLGELHAILRRQEDFYPFLKDNREKIEKILTFRIPYYVGPLARGNSRFAWMTRKSEETITPWNFEEVVDKGASAQSFIERMTNFDKNLPNEKVLPKHSLLYEYFTVYNELTKVKYVTEGMRKPAFLSGEQKKAIVDLLFKTNRKVTVKQLKEDYFKKIECFDSVEISGVEDRFNASLGTYHDLLKIIKDKDFLDNEENEDILEDIVLTLTLFEDREMIEERLKTYAHLFDDKVMKQLKRRRYTGWGRLSRKLINGIRDKQSGKTILDFLKSDGFANRNFMQLIHDDSLTFKEDIQKAQVSGQGDSLHEHIANLAGSPAIKKGILQTVKVVDELVKVMGRHKPENIVIEMARENQTTQKGQKNSRERMKRIEEGIKELGSQILKEHPVENTQLQNEKLYLYYLQNGRDMYVDQELDINRLSDYDVDHIVPQSFLKDDSIDNKVLTRSDKARGKSDNVPSEEVVKKMKNYWRQLLNAKLITQRKFDNLTKAERGGLSELDKAGFIKRQLVETRQITKHVAQILDSRMNTKYDENDKLIREVKVITLKSKLVSDFRKDFQFYKVREINNYHHAHDAYLNAVVGTALIKKYPKLESEFVYGDYKVYDVRKMIAKSEQEIGKATAKYFFYSNIMNFFKTEITLANGEIRKRPLIETNGETGEIVWDKGRDFATVRKVLSMPQVNIVKKTEVQTGGFSKESILPKRNSDKLIARKKDWDPKKYGGFDSPTVAYSVLVVAKVEKGKSKKLKSVKELLGITIMERSSFEKNPIDFLEAKGYKEVKKDLIIKLPKYSLFELENGRKRMLASAGELQKGNELALPSKYVNFLYLASHYEKLKGSPEDNEQKQLFVEQHKHYLDEIIEQISEFSKRVILADANLDKVLSAYNKHRDKPIREQAENIIHLFTLTNLGAPAAFKYFDTTIDRKRYTSTKEVLDATLIHQSITGLYETRIDLSQLGGDGGGGGGSSPAPGGTLGDQGSRGSDPLPEPRVTLTVEGIPTEFLVNTGAEHSVLTKPMGKMGSKRTVVAGATGSKVYPWTTKRLLKIGQKQVTHSFLVIPECPAPLLGRDLLTKLKAQIQFSTEGPQVTWEDRPAMCLVLNLEEEYRLHEKPVPPSIDPSWLQLFPMVWAEKAGMGLANQVPPVVVELKSDASPVAVRQYPMSKEAREGIRPHIQRFLDLGILVPCQSPWNTPLLPVKKPGTNDYRPVQDLREVNKRVQDIHPTVPNPYNLLSSLPPSHTWYSVLDLKDAFFCLKLHPNSQPLFAFEWRDPEKGNTGQLTWTRLPQGFKNSPTLFNEALHRDLASFRALNPQVVMLQYVDDLLVAAPTYRDCKEGTRRLLQELSKLGYRVSAKKAQLCREEVTYLGYLLKGGKRWLTPARKATVMKIPTPTTPRQVREFLGTAGFCRLWIPGFASLAAPLYPLTRPKVPFTWTEAHQEAFGRIKEALLSAPALALPDLTKPFALYVDEKEGVARGVLTQTLGPWRRPVAYLSKKLDPVASGWPTCLKAIAAVALLLKDADKLTLGQNVLVIAPHNLESIVRQPPDRWMTNARMTHYQSLLLNERVSFAPPAILNPATLLPVESDDTPIHICSEILAEETGTRPDLRDQPLPGVPAWYTDGSSFIMDGRRQAGAAIVDNKRTVWASNLPEGTSAQKAELIALTQALRLAEGKSINIYTDSRYAFATAHVHGAIYKQRGWLTSAGKDIKNKEEILALLEAIHLPKRVAIIHCPGHQRGTDPVATGNRKADEAAKQAAQSTRILTETTKNAGKRTADGSEFEKRTADGSEFESPKKKAKVE

SEQ ID NO: 7356 - protein, 2094 aa, synthetic construct
MPAAKRVKLDGGDKKYSIGLDIGTNSVGWAVITDEYKVPSKKFKVLGNTDRHSIKKNLIGALLFDSGETAEATRLKRTARRRYTRRKNRICYLQEIFSNEMAKVDDSFFHRLEESFLVEEDKKHERHPIFGNIVDEVAYHEKYPTIYHLRKKLVDSTDKADLRLIYLALAHMIKFRGHFLIEGDLNPDNSDVDKLFIQLVQTYNQLFEENPINASGVDAKAILSARLSKSRRLENLIAQLPGEKKNGLFGNLIALSLGLTPNFKSNFDLAEDAKLQLSKDTYDDDLDNLLAQIGDQYADLFLAAKNLSDAILLSDILRVNTEITKAPLSASMIKRYDEHHQDLTLLKALVRQQLPEKYKEIFFDQSKNGYAGYIDGGASQEEFYKFIKPILEKMDGTEELLVKLNREDLLRKQRTFDNGSIPHQIHLGELHAILRRQEDFYPFLKDNREKIEKILTFRIPYYVGPLARGNSRFAWMTRKSEETITPWNFEEVVDKGASAQSFIERMTNFDKNLPNEKVLPKHSLLYEYFTVYNELTKVKYVTEGMRKPAFLSGEQKKAIVDLLFKTNRKVTVKQLKEDYFKKIECFDSVEISGVEDRFNASLGTYHDLLKIIKDKDFLDNEENEDILEDIVLTLTLFEDREMIEERLKTYAHLFDDKVMKQLKRRRYTGWGRLSRKLINGIRDKQSGKTILDFLKSDGFANRNFMQLIHDDSLTFKEDIQKAQVSGQGDSLHEHIANLAGSPAIKKGILQTVKVVDELVKVMGRHKPENIVIEMARENQTTQKGQKNSRERMKRIEEGIKELGSQILKEHPVENTQLQNEKLYLYYLQNGRDMYVDQELDINRLSDYDVDHIVPQSFLKDDSIDNKVLTRSDKARGKSDNVPSEEVVKKMKNYWRQLLNAKLITQRKFDNLTKAERGGLSELDKAGFIKRQLVETRQITKHVAQILDSRMNTKYDENDKLIREVKVITLKSKLVSDFRKDFQFYKVREINNYHHAHDAYLNAVVGTALIKKYPKLESEFVYGDYKVYDVRKMIAKSEQEIGKATAKYFFYSNIMNFFKTEITLANGEIRKRPLIETNGETGEIVWDKGRDFATVRKVLSMPQVNIVKKTEVQTGGFSKESILPKRNSDKLIARKKDWDPKKYGGFDSPTVAYSVLVVAKVEKGKSKKLKSVKELLGITIMERSSFEKNPIDFLEAKGYKEVKKDLIIKLPKYSLFELENGRKRMLASAGELQKGNELALPSKYVNFLYLASHYEKLKGSPEDNEQKQLFVEQHKHYLDEIIEQISEFSKRVILADANLDKVLSAYNKHRDKPIREQAENIIHLFTLTNLGAPAAFKYFDTTIDRKRYTSTKEVLDATLIHQSITGLYETRIDLSQLGGDGGGGGGSSPAPGGTLNLEDEYRLYETSAEPEVSPGSTWLSDFPQAWAETGGMGLAVRQAPLIIPLKATSTPVSIKQYPMSQEAKLGIKPHIQRLLDQGILVPCQSPWNTPLLPVKKPGTNDYRPVQDLREVNKRVEDIHPTVPNPYNLLSGLPPSHRWYTVLDLKDAFFCLRLHPTSQPLFAFEWRDPGMGISGQLTWTRLPQGFKNSPTLFNEALHRDLADFRIQHPDLILLQYVDDILLAATSELDCQQGTRALLLTLGNLGYRASAKKAQLCQKQVKYLGYLLKEGQRWLTEARKETVMGQPTPKTPRQLREFLGTAGFCRLWIPGFAEMAAPLYPLTKPGTLFNWGPDQQKAYQEIKQALLTAPALGLPDLTKPFELFVDEKQGYAKGVLTQKLGPWRRPVAYLSKKLDPVAAGWPPCLRMVAAIAVLRKDAGKLTMGQPLVILAPHAVEALVKQPPDRWLSNARMTHYQAMLLDTDRVQFGPVVALNPATLLPLPEEGAPHDCLEILAETHGTRPDLTDQPIPDADHTWYTDGSSFLQEGQRKAGAAVTTETEVIWARALPAGTSAQRAELIALTQALKMAEGKRLNVYTDSRYAFATAHIHGEIYRRRGWLTSEGREIKNKSEILALLKALFLPKRLSIIHCLGHQKGDSAEARGNRLADQAAREAAIKTPPDTSTLLAGKRTADGSEFEKRTADGSEFESPKKKAKVE

SEQ ID NO: 7357 - protein, 2094 aa, synthetic construct
MPAAKRVKLDGGDKKYSIGLDIGTNSVGWAVITDEYKVPSKKFKVLGNTDRHSIKKNLIGALLFDSGETAEATRLKRTARRRYTRRKNRICYLQEIFSNEMAKVDDSFFHRLEESFLVEEDKKHERHPIFGNIVDEVAYHEKYPTIYHLRKKLVDSTDKADLRLIYLALAHMIKFRGHFLIEGDLNPDNSDVDKLFIQLVQTYNQLFEENPINASGVDAKAILSARLSKSRRLENLIAQLPGEKKNGLFGNLIALSLGLTPNFKSNFDLAEDAKLQLSKDTYDDDLDNLLAQIGDQYADLFLAAKNLSDAILLSDILRVNTEITKAPLSASMIKRYDEHHQDLTLLKALVRQQLPEKYKEIFFDQSKNGYAGYIDGGASQEEFYKFIKPILEKMDGTEELLVKLNREDLLRKQRTFDNGSIPHQIHLGELHAILRRQEDFYPFLKDNREKIEKILTFRIPYYVGPLARGNSRFAWMTRKSEETITPWNFEEVVDKGASAQSFIERMTNFDKNLPNEKVLPKHSLLYEYFTVYNELTKVKYVTEGMRKPAFLSGEQKKAIVDLLFKTNRKVTVKQLKEDYFKKIECFDSVEISGVEDRFNASLGTYHDLLKIIKDKDFLDNEENEDILEDIVLTLTLFEDREMIEERLKTYAHLFDDKVMKQLKRRRYTGWGRLSRKLINGIRDKQSGKTILDFLKSDGFANRNFMQLIHDDSLTFKEDIQKAQVSGQGDSLHEHIANLAGSPAIKKGILQTVKVVDELVKVMGRHKPENIVIEMARENQTTQKGQKNSRERMKRIEEGIKELGSQILKEHPVENTQLQNEKLYLYYLQNGRDMYVDQELDINRLSDYDVDHIVPQSFLKDDSIDNKVLTRSDKARGKSDNVPSEEVVKKMKNYWRQLLNAKLITQRKFDNLTKAERGGLSELDKAGFIKRQLVETRQITKHVAQILDSRMNTKYDENDKLIREVKVITLKSKLVSDFRKDFQFYKVREINNYHHAHDAYLNAVVGTALIKKYPKLESEFVYGDYKVYDVRKMIAKSEQEIGKATAKYFFYSNIMNFFKTEITLANGEIRKRPLIETNGETGEIVWDKGRDFATVRKVLSMPQVNIVKKTEVQTGGFSKESILPKRNSDKLIARKKDWDPKKYGGFDSPTVAYSVLVVAKVEKGKSKKLKSVKELLGITIMERSSFEKNPIDFLEAKGYKEVKKDLIIKLPKYSLFELENGRKRMLASAGELQKGNELALPSKYVNFLYLASHYEKLKGSPEDNEQKQLFVEQHKHYLDEIIEQISEFSKRVILADANLDKVLSAYNKHRDKPIREQAENIIHLFTLTNLGAPAAFKYFDTTIDRKRYTSTKEVLDATLIHQSITGLYETRIDLSQLGGDGGGGGGSSPAPGGLGIEDEYRLHETSTEPDVSLGSTWLSDFPQAWAETGGMGLAVRQAPLIIPLKATSTPVSIQQYPMSHEARLGIKPHIQRLLDQGILVPCQSPWNTPLLPVKKPGTNDYRPVQDLREVNKRVEDIHPTVPNPYNLLSGLPPSHQWYTVLDLKDAFFCLRLHPTSQPLFAFEWRDPGMGISGQLTWTRLPQGFKNSPTLFNEALHRDLADFRIQHPDLILLQYVDDILLAATSELDCQQGTRALLQTLGDLGYRASAKKAQICQKQVKYLGYLLREGQRWLTEARKETVMGQPVPKTPRQLREFLGKAGFCRLFIPGFAEMAAPLYPLTKPGTLFSWGPDQQKAYQEIKQALLTAPALGLPDLTKPFELFVDEKQGYAKGVLTQKLGPWRRPVAYLSKKLDPVAAGWPPCLRMVAAIAVLTKDAGKLTMGQPLVILAPHAVEALVKQPPDRWLSNARMTHYQAMLLDTDRVQFGPVVALNPATLLPLPEEGAPHDCLEILAETHGTRPDLTDQPIPDADHTWYTDGSSFLQEGQRKAGAAVTTETEVIWAGALPAGTSAQRAELIALTQALKMAEGKRLNVYTDSRYAFATAHIHGEIYRRRGWLTSEGREIKNKSEILALLKALFLPKRLSIIHCLGHQKGDSAEARGNRLADQAAREAAIKTPPDTSTLLIAGKRTADGSEFEKRTADGSEFESPKKKAKVE

SEQ ID NO: 7358 - protein, 2094 aa, synthetic construct; identical to SEQ ID NO: 7357

SEQ ID NO: 7359 - protein, 2094 aa, synthetic construct
MPAAKRVKLDGGDKKYSIGLDIGTNSVGWAVITDEYKVPSKKFKVLGNTDRHSIKKNLIGALLFDSGETAEATRLKRTARRRYTRRKNRICYLQEIFSNEMAKVDDSFFHRLEESFLVEEDKKHERHPIFGNIVDEVAYHEKYPTIYHLRKKLVDSTDKADLRLIYLALAHMIKFRGHFLIEGDLNPDNSDVDKLFIQLVQTYNQLFEENPINASGVDAKAILSARLSKSRRLENLIAQLPGEKKNGLFGNLIALSLGLTPNFKSNFDLAEDAKLQLSKDTYDDDLDNLLAQIGDQYADLFLAAKNLSDAILLSDILRVNTEITKAPLSASMIKRYDEHHQDLTLLKALVRQQLPEKYKEIFFDQSKNGYAGYIDGGASQEEFYKFIKPILEKMDGTEELLVKLNREDLLRKQRTFDNGSIPHQIHLGELHAILRRQEDFYPFLKDNREKIEKILTFRIPYYVGPLARGNSRFAWMTRKSEETITPWNFEEVVDKGASAQSFIERMTNFDKNLPNEKVLPKHSLLYEYFTVYNELTKVKYVTEGMRKPAFLSGEQKKAIVDLLFKTNRKVTVKQLKEDYFKKIECFDSVEISGVEDRFNASLGTYHDLLKIIKDKDFLDNEENEDILEDIVLTLTLFEDREMIEERLKTYAHLFDDKVMKQLKRRRYTGWGRLSRKLINGIRDKQSGKTILDFLKSDGFANRNFMQLIHDDSLTFKEDIQKAQVSGQGDSLHEHIANLAGSPAIKKGILQTVKVVDELVKVMGRHKPENIVIEMARENQTTQKGQKNSRERMKRIEEGIKELGSQILKEHPVENTQLQNEKLYLYYLQNGRDMYVDQELDINRLSDYDVDHIVPQSFLKDDSIDNKVLTRSDKARGKSDNVPSEEVVKKMKNYWRQLLNAKLITQRKFDNLTKAERGGLSELDKAGFIKRQLVETRQITKHVAQILDSRMNTKYDENDKLIREVKVITLKSKLVSDFRKDFQFYKVREINNYHHAHDAYLNAVVGTALIKKYPKLESEFVYGDYKVYDVRKMIAKSEQEIGKATAKYFFYSNIMNFFKTEITLANGEIRKRPLIETNGETGEIVWDKGRDFATVRKVLSMPQVNIVKKTEVQTGGFSKESILPKRNSDKLIARKKDWDPKKYGGFDSPTVAYSVLVVAKVEKGKSKKLKSVKELLGITIMERSSFEKNPIDFLEAKGYKEVKKDLIIKLPKYSLFELENGRKRMLASAGELQKGNELALPSKYVNFLYLASHYEKLKGSPEDNEQKQLFVEQHKHYLDEIIEQISEFSKRVILADANLDKVLSAYNKHRDKPIREQAENIIHLFTLTNLGAPAAFKYFDTTIDRKRYTSTKEVLDATLIHQSITGLYETRIDLSQLGGDGGGGGGSSPAPGGTLNIEDEYRLHETSKEPDVSLGSTWLSDFPQAWAETGGMGLAVRQAPLIIPLKATSTPVSIKQYPMSQEARLGIKPHIQRLLDQGILVPCQSPWNTPLLPVKKPGTNDYRPVQDLREVNKRVEDIHPTVPNPYNLLSGLPPSHQWYTVLDLKDAFFCLRLHPTSQPLFAFEWRDPEMGISGQLTWTRLPQGFKNSPTLFNEALHRDLAGFRIQHPDLILLQYVDDLLLAATSELDCQQGTRALLQTLGDLGYRASAKKAQICQKQVKYLGYLLKEGQRWLTEARKETVMGQPIPKTPRQLREFLGTAGFCRLWIPGFAEMAAPLYPLTKPGTLFNWGPDQQKAFQEIKQALLTAPALGLPDLTKPFELFVDEKQGYAKGVLTQKLGPWRRPVAYLSKKLDPVAAGWPPCLRMVAAIAVLTKDAGKLTMGQPLVILAPHAVEALVKQPPDRWLSNARMTHYQALLLDTDRVQFGPVVALNPATLLPLPEEGLQHDCLDILAEAHGTRSDLMDQPLPDADHTWYTDGSSFLQEGQRKAGAAVTTETEVIWARALPAGTSAQRAELIALTQALKMAEGKKLNVYTDSRYAFATAHIHGEIYRRRGWLTSEGKEIKNKDEILALLKALFLPKRLSIIHCPGHQKGNSAEARGNRMADQAAREVATRETPETSTLLAGKRTADGSEFEKRTADGSEFESPKKKAKVE

SEQ ID NO: 7360 - protein, 2094 aa, synthetic construct
MPAAKRVKLDGGDKKYSIGLDIGTNSVGWAVITDEYKVPSKKFKVLGNTDRHSIKKNLIGALLFDSGETAEATRLKRTARRRYTRRKNRICYLQEIFSNEMAKVDDSFFHRLEESFLVEEDKKHERHPIFGNIVDEVAYHEKYPTIYHLRKKLVDSTDKADLRLIYLALAHMIKFRGHFLIEGDLNPDNSDVDKLFIQLVQTYNQLFEENPINASGVDAKAILSARLSKSRRLENLIAQLPGEKKNGLFGNLIALSLGLTPNFKSNFDLAEDAKLQLSKDTYDDDLDNLLAQIGDQYADLFLAAKNLSDAILLSDILRVNTEITKAPLSASMIKRYDEHHQDLTLLKALVRQQLPEKYKEIFFDQSKNGYAGYIDGGASQEEFYKFIKPILEKMDGTEELLVKLNREDLLRKQRTFDNGSIPHQIHLGELHAILRRQEDFYPFLKDNREKIEKILTFRIPYYVGPLARGNSRFAWMTRKSEETITPWNFEEVVDKGASAQSFIERMTNFDKNLPNEKVLPKHSLLYEYFTVYNELTKVKYVTEGMRKPAFLSGEQKKAIVDLLFKTNRKVTVKQLKEDYFKKIECFDSVEISGVEDRFNASLGTYHDLLKIIKDKDFLDNEENEDILEDIVLTLTLFEDREMIEERLKTYAHLFDDKVMKQLKRRRYTGWGRLSRKLINGIRDKQSGKTILDFLKSDGFANRNFMQLIHDDSLTFKEDIQKAQVSGQGDSLHEHIANLAGSPAIKKGILQTVKVVDELVKVMGRHKPENIVIEMARENQTTQKGQKNSRERMKRIEEGIKELGSQILKEHPVENTQLQNEKLYLYYLQNGRDMYVDQELDINRLSDYDVDHIVPQSFLKDDSIDNKVLTRSDKARGKSDNVPSEEVVKKMKNYWRQLLNAKLITQRKFDNLTKAERGGLSELDKAGFIKRQLVETRQITKHVAQILDSRMNTKYDENDKLIREVKVITLKSKLVSDFRKDFQFYKVREINNYHHAHDAYLNAVVGTALIKKYPKLESEFVYGDYKVYDVRKMIAKSEQEIGKATAKYFFYSNIMNFFKTEITLANGEIRKRPLIETNGETGEIVWDKGRDFATVRKVLSMPQVNIVKKTEVQTGGFSKESILPKRNSDKLIARKKDWDPKKYGGFDSPTVAYSVLVVAKVEKGKSKKLKSVKELLGITIMERSSFEKNPIDFLEAKGYKEVKKDLIIKLPKYSLFELENGRKRMLASAGELQKGNELALPSKYVNFLYLASHYEKLKGSPEDNEQKQLFVEQHKHYLDEIIEQISEFSKRVILADANLDKVLSAYNKHRDKPIREQAENIIHLFTLTNLGAPAAFKYFDTTIDRKRYTSTKEVLDATLIHQSITGLYETRIDLSQLGGDGGGGGGSSPAPGGTLNIEDEYRLHETSKGPDVPLGSTWLSDFPQAWAETGGMGLAVRQAPLIIPLKATSTPVSIKQYPMSQEARLGIKPHIQRLLDQGILVPCQSPWNTPLLPVKKPGTNDYRPVQDLREVNKRVEDIHPTVPNPYNLLSGLPPSHQWYTVLDLKDAFFCLRLHPTSQSLFAFEWRDPEMGISGQLTWTRLPQGFKNSPTLFNEALHRDLADFRIQHPDLILLQYVDDLLLAATSELDCQQGTRALLQTLGDLGYRASAKKAQICQKQVKYLGYLLKEGQRWLTEARKETVMGQPTPKTPRQLREFLGTAGFCRLWIPGFAEMAAPLYPLTKPGTLFEWGPDQQKAYQEIKQALLTAPALGLPDLTKPFELFVDEKQGYAKGVLTQKLGPWRRPVAYLSKKLDPVAAGWPPCLRMVAAIAVLTKDAGKLTMGQPLVILAPHAVEALVKQPPDRWLSNARMTHYQALLLDTDRVQFGPIVALNPATLLPLPEEGLQHDCLDILAEAHGTRPDLTDQPLPDADHTWYTDGSSFLQEGQRKAGAAVTTETEVVWAKALPAGTSAQRAELIALTQALKMAEGKKLNVYTDSRYAFATAHIHGEIYRRRGWLTSEGKEIKNKDEILALLKALFLPKRLSIIHCPGHQKGNRAEARGNRMADQAAREVATRETPETSTLLAGKRTADGSEFEKRTADGSEFESPKKKAKVE

SEQ ID NO: 7361 - protein, 2088 aa, synthetic construct
MPAAKRVKLDGGDKKYSIGLDIGTNSVGWAVITDEYKVPSKKFKVLGNTDRHSIKKNLIGALLFDSGETAEATRLKRTARRRYTRRKNRICYLQEIFSNEMAKVDDSFFHRLEESFLVEEDKKHERHPIFGNIVDEVAYHEKYPTIYHLRKKLVDSTDKADLRLIYLALAHMIKFRGHFLIEGDLNPDNSDVDKLFIQLVQTYNQLFEENPINASGVDAKAILSARLSKSRRLENLIAQLPGEKKNGLFGNLIALSLGLTPNFKSNFDLAEDAKLQLSKDTYDDDLDNLLAQIGDQYADLFLAAKNLSDAILLSDILRVNTEITKAPLSASMIKRYDEHHQDLTLLKALVRQQLPEKYKEIFFDQSKNGYAGYIDGGASQEEFYKFIKPILEKMDGTEELLVKLNREDLLRKQRTFDNGSIPHQIHLGELHAILRRQEDFYPFLKDNREKIEKILTFRIPYYVGPLARGNSRFAWMTRKSEETITPWNFEEVVDKGASAQSFIERMTNFDKNLPNEKVLPKHSLLYEYFTVYNELTKVKYVTEGMRKPAFLSGEQKKAIVDLLFKTNRKVTVKQLKEDYFKKIECFDSVEISGVEDRFNASLGTYHDLLKIIKDKDFLDNEENEDILEDIVLTLTLFEDREMIEERLKTYAHLFDDKVMKQLKRRRYTGWGRLSRKLINGIRDKQSGKTILDFLKSDGFANRNFMQLIHDDSLTFKEDIQKAQVSGQGDSLHEHIANLAGSPAIKKGILQTVKVVDELVKVMGRHKPENIVIEMARENQTTQKGQKNSRERMKRIEEGIKELGSQILKEHPVENTQLQNEKLYLYYLQNGRDMYVDQELDINRLSDYDVDHIVPQSFLKDDSIDNKVLTRSDKARGKSDNVPSEEVVKKMKNYWRQLLNAKLITQRKFDNLTKAERGGLSELDKAGFIKRQLVETRQITKHVAQILDSRMNTKYDENDKLIREVKVITLKSKLVSDFRKDFQFYKVREINNYHHAHDAYLNAVVGTALIKKYPKLESEFVYGDYKVYDVRKMIAKSEQEIGKATAKYFFYSNIMNFFKTEITLANGEIRKRPLIETNGETGEIVWDKGRDFATVRKVLSMPQVNIVKKTEVQTGGFSKESILPKRNSDKLIARKKDWDPKKYGGFDSPTVAYSVLVVAKVEKGKSKKLKSVKELLGITIMERSSFEKNPIDFLEAKGYKEVKKDLIIKLPKYSLFELENGRKRMLASAGELQKGNELALPSKYVNFLYLASHYEKLKGSPEDNEQKQLFVEQHKHYLDEIIEQISEFSKRVILADANLDKVLSAYNKHRDKPIREQAENIIHLFTLTNLGAPAAFKYFDTTIDRKRYTSTKEVLDATLIHQSITGLYETRIDLSQLGGDGGGGGGSSPAPGGTLQLDDEYRLYSPLVKPDQNIQFWLEQFPQAWAETAGMGLAKQVPPQVIQLKASATPVSVRQYPLSKEAQEGIRPHVQRLIQQGILVPVQSPWNTPLLPVRKPGTNDYRPVQDLREVNKRVQDIHPTVPNPYNLLCALPPQRSWYTVLDLKDAFFCLRLHPTSQPLFAFEWRDPGTGRTGQLTWTRLPQGFKNSPTIFDEALHRDLANFRIQHPQVTLLQYVDDLLLAGATKQDCLEGTKALLLELSDLGYRASAKKAQICRREVTYLGYSLRDGQRWLTEARKKTVVQIPAPTTAKQVREFLGTAGFCRLWIPGFATLAAPLYPLTKEKGEFSWAPEHQKAFDAIKKALLSAPALALPDVTKPFTLYVDERKGVARGVLTQTLGPWRRPVAYLSKKLDPVASGWPVCLKAIAAVAILVKDADKLTLGQNITVIAPHALENIVRQPPDRWMTNARMTHYQSLLLTERVTFAPPAALNPATLLPEETDEPVTHDCHQLLIEETGVRKDLTDIPLTGEVLTWFTDGSSYVVEGKRMAGAAVVDGTRTIWASSLPEGTSAQKAELMALTQALRLAEGKSINIYTDSRYAFATAHVHGAIYKQRGLLTSAGREIKNKEEILSLLEALHLPKRLAIIHCPGHQKAKDPISRGNQMADRVAKQAAQGVNLLAGKRTADGSEFEKRTADGSEFESPKKKAKVE

SEQ ID NO: 7362 - protein, 2085 aa, synthetic construct
MPAAKRVKLDGGDKKYSIGLDIGTNSVGWAVITDEYKVPSKKFKVLGNTDRHSIKKNLIGALLFDSGETAEATRLKRTARRRYTRRKNRICYLQEIFSNEMAKVDDSFFHRLEESFLVEEDKKHERHPIFGNIVDEVAYHEKYPTIYHLRKKLVDSTDKADLRLIYLALAHMIKFRGHFLIEGDLNPDNSDVDKLFIQLVQTYNQLFEENPINASGVDAKAILSARLSKSRRLENLIAQLPGEKKNGLFGNLIALSLGLTPNFKSNFDLAEDAKLQLSKDTYDDDLDNLLAQIGDQYADLFLAAKNLSDAILLSDILRVNTEITKAPLSASMIKRYDEHHQDLTLLKALVRQQLPEKYKEIFFDQSKNGYAGYIDGGASQEEFYKFIKPILEKMDGTEELLVKLNREDLLRKQRTFDNGSIPHQIHLGELHAILRRQEDFYPFLKDNREKIEKILTFRIPYYVGPLARGNSRFAWMTRKSEETITPWNFEEVVDKGASAQSFIERMTNFDKNLPNEKVLPKHSLLYEYFTVYNELTKVKYVTEGMRKPAFLSGEQKKAIVDLLFKTNRKVTVKQLKEDYFKKIECFDSVEISGVEDRFNASLGTYHDLLKIIKDKDFLDNEENEDILEDIVLTLTLFEDREMIEERLKTYAHLFDDKVMKQLKRRRYTGWGRLSRKLINGIRDKQSGKTILDFLKSDGFANRNFMQLIHDDSLTFKEDIQKAQVSGQGDSLHEHIANLAGSPAIKKGILQTVKVVDELVKVMGRHKPENIVIEMARENQTTQKGQKNSRERMKRIEEGIKELGSQILKEHPVENTQLQNEKLYLYYLQNGRDMYVDQELDINRLSDYDVDHIVPQSFLKDDSIDNKVLTRSDKARGKSDNVPSEEVVKKMKNYWRQLLNAKLITQRKFDNLTKAERGGLSELDKAGFIKRQLVETRQITKHVAQILDSRMNTKYDENDKLIREVKVITLKSKLVSDFRKDFQFYKVREINNYHHAHDAYLNAVVGTALIKKYPKLESEFVYGDYKVYDVRKMIAKSEQEIGKATAKYFFYSNIMNFFKTEITLANGEIRKRPLIETNGETGEIVWDKGRDFATVRKVLSMPQVNIVKKTEVQTGGFSKESILPKRNSDKLIARKKDWDPKKYGGFDSPTVAYSVLVVAKVEKGKSKKLKSVKELLGITIMERSSFEKNPIDFLEAKGYKEVKKDLIIKLPKYSLFELENGRKRMLASAGELQKGNELALPSKYVNFLYLASHYEKLKGSPEDNEQKQLFVEQHKHYLDEIIEQISEFSKRVILADANLDKVLSAYNKHRDKPIREQAENIIHLFTLTNLGAPAAFKYFDTTIDRKRYTSTKEVLDATLIHQSITGLYETRIDLSQLGGDGGGGGGSSPAPGGIPWLMKKPLQLTTLVPLQEYEERLLKQTMLTGSYKEKLQSLFLKYDALWQHWENQVGHRRIKPHHIATGTVNPRPQKQYPINPKAKASIQTVINDLLKQGVLIQQNSIMNTPVYPVPKPDGKWRMVLDYREVNKTIPLIAAQNQHSAGILSSIFRGKYKTTLDLSNGFWAHSITPESYWLTAFTWLGQQYCWTRLPQGFLNSPALFNADVVDLLKEVPNVQVYVDDIYISHDDPREHLEQLEKVFSLLLNAGYVVSLKKSEIAQHEVEFLGFNITKEGRGLTETFKQKLLNITPPRDLKQLQSILGKLNFARNFIPNFSELVKPLYNIIATAPGKYITWTTDNSQQLQNIISMLNSAENLEERNPEVRLIMKVNTSPSAGYIRFYNEFAKRPIMYLNYVYTKAEVKFTNTEKLLTTIHKGLIKALDLGMGQEILVYSPIVSMTKIQKTPLPERKALPIRWITWMSYLEDPRIQFHYDKTLPELQQVPTVTDDIIAKIKHPSEFSMVFYTDGSAIKHPNVNKSHNAGMGIAQVQFKPEFTVINTWSIPLGDHTAQLAEVAAVEFACKKALKIDGPVLIVTDSFYVAESVNKELPYWQSNGFFNNKKKPLKHVSKWKSIADCIQLKPDIIIIHEKGHQPTASTFHTEGNNLADKLATQGSYVVNAGKRTADGSEFEKRTADGSEFESPKKKAKVE

SEQ ID NO: 7363 - protein, 2174 aa, synthetic construct
MPAAKRVKLDGGDKKYSIGLDIGTNSVGWAVITDEYKVPSKKFKVLGNTDRHSIKKNLIGALLFDSGETAEATRLKRTARRRYTRRKNRICYLQEIFSNEMAKVDDSFFHRLEESFLVEEDKKHERHPIFGNIVDEVAYHEKYPTIYHLRKKLVDSTDKADLRLIYLALAHMIKFRGHFLIEGDLNPDNSDVDKLFIQLVQTYNQLFEENPINASGVDAKAILSARLSKSRRLENLIAQLPGEKKNGLFGNLIALSLGLTPNFKSNFDLAEDAKLQLSKDTYDDDLDNLLAQIGDQYADLFLAAKNLSDAILLSDILRVNTEITKAPLSASMIKRYDEHHQDLTLLKALVRQQLPEKYKEIFFDQSKNGYAGYIDGGASQEEFYKFIKPILEKMDGTEELLVKLNREDLLRKQRTFDNGSIPHQIHLGELHAILRRQEDFYPFLKDNREKIEKILTFRIPYYVGPLARGNSRFAWMTRKSEETITPWNFEEVVDKGASAQSFIERMTNFDKNLPNEKVLPKHSLLYEYFTVYNELTKVKYVTEGMRKPAFLSGEQKKAIVDLLFKTNRKVTVKQLKEDYFKKIECFDSVEISGVEDRFNASLGTYHDLLKIIKDKDFLDNEENEDILEDIVLTLTLFEDREMIEERLKTYAHLFDDKVMKQLKRRRYTGWGRLSRKLINGIRDKQSGKTILDFLKSDGFANRNFMQLIHDDSLTFKEDIQKAQVSGQGDSLHEHIANLAGSPAIKKGILQTVKVVDELVKVMGRHKPENIVIEMARENQTTQKGQKNSRERMKRIEEGIKELGSQILKEHPVENTQLQNEKLYLYYLQNGRDMYVDQELDINRLSDYDVDHIVPQSFLKDDSIDNKVLTRSDKARGKSDNVPSEEVVKKMKNYWRQLLNAKLITQRKFDNLTKAERGGLSELDKAGFIKRQLVETRQITKHVAQILDSRMNTKYDENDKLIREVKVITLKSKLVSDFRKDFQFYKVREINNYHHAHDAYLNAVVGTALIKKYPKLESEFVYGDYKVYDVRKMIAKSEQEIGKATAKYFFYSNIMNFFKTEITLANGEIRKRPLIETNGETGEIVWDKGRDFATVRKVLSMPQVNIVKKTEVQTGGFSKESILPKRNSDKLIARKKDWDPKKYGGFDSPTVAYSVLVVAKVEKGKSKKLKSVKELLGITIMERSSFEKNPIDFLEAKGYKEVKKDLIIKLPKYSLFELENGRKRMLASAGELQKGNELALPSKYVNFLYLASHYEKLKGSPEDNEQKQLFVEQHKHYLDEIIEQISEFSKRVILADANLDKVLSAYNKHRDKPIREQAENIIHLFTLTNLGAPAAFKYFDTTIDRKRYTSTKEVLDATLIHQSITGLYETRIDLSQLGGDGGGGGGSSPAPGGMNPLQLLQPLPAEVKGTKLLAHWNSGATITCIPESFLEDEQPIKQTLIKTIHGEKQQNVYYLTFKVKGRKVEAEVIASPYEYILLSPTDVPWLTQQPLQLTILVPLQEYQDRILNKTALPEEQKQQLKALFTKYDNLWQHWENQVGHRKIRPHNIATGDYPPRPQKQYPINPKAKPSIQIVIDDLLKQGVLTPQNSTMNTPVYPVPKPDGRWRMVLDYREVNKTIPLTAAQNQHSAGILATIVRQKYKTTLDLANGFWAHPITPDSYWLTAFTWQGKQYCWTRLPQGFLNSPALFTADAVDLLKEVPNVQVYVDDIYLSHDNPHEHIQQLEKVFQILLQAGYVVSLKKSEIGQRTVEFLGFNITKEGRGLTDTFKTKLLNVTPPKDLKQLQSILGLLNFARNFIPNFAELVQTLYNLIASSKGKYIEWTEDNTKQLNKVIEALNTASNLEERLPDQRLVIKVNTSPSAGYVRYYNESGKKPIMYLNYVFSKAELKFSMLEKLLTTMHKALIKAMDLAMGQEILVYSPIVSMTKIQKTPLPERKALPIRWITWMTYLEDPRIQFHYDKTLPELKHIPDVYTSSIPPLKHPSQYEGVFCTDGSAIKSPDPTKSNNAGMGIVHAIYNPEYKILNQWSIPLGHHTAQMAEIAAVEFACKKALKVPGPVLVITDSFYVAESANKELPYWKSNGFVNNKKEPLKHISKWKSIAECLSIKPDITIQHEKGHQPINTSIHTEGNALADKLATQGSYVVNAGKRTADGSEFEKRTADGSEFESPKKKAKVE

SEQ ID NO: 7364 - protein, 2093 aa, synthetic construct
MPAAKRVKLDGGDKKYSIGLDIGTNSVGWAVITDEYKVPSKKFKVLGNTDRHSIKKNLIGALLFDSGETAEATRLKRTARRRYTRRKNRICYLQEIFSNEMAKVDDSFFHRLEESFLVEEDKKHERHPIFGNIVDEVAYHEKYPTIYHLRKKLVDSTDKADLRLIYLALAHMIKFRGHFLIEGDLNPDNSDVDKLFIQLVQTYNQLFEENPINASGVDAKAILSARLSKSRRLENLIAQLPGEKKNGLFGNLIALSLGLTPNFKSNFDLAEDAKLQLSKDTYDDDLDNLLAQIGDQYADLFLAAKNLSDAILLSDILRVNTEITKAPLSASMIKRYDEHHQDLTLLKALVRQQLPEKYKEIFFDQSKNGYAGYIDGGASQEEFYKFIKPILEKMDGTEELLVKLNREDLLRKQRTFDNGSIPHQIHLGELHAILRRQEDFYPFLKDNREKIEKILTFRIPYYVGPLARGNSRFAWMTRKSEETITPWNFEEVVDKGASAQSFIERMTNFDKNLPNEKVLPKHSLLYEYFTVYNELTKVKYVTEGMRKPAFLSGEQKKAIVDLLFKTNRKVTVKQLKEDYFKKIECFDSVEISGVEDRFNASLGTYHDLLKIIKDKDFLDNEENEDILEDIVLTLTLFEDREMIEERLKTYAHLFDDKVMKQLKRRRYTGWGRLSRKLINGIRDKQSGKTILDFLKSDGFANRNFMQLIHDDSLTFKEDIQKAQVSGQGDSLHEHIANLAGSPAIKKGILQTVKVVDELVKVMGRHKPENIVIEMARENQTTQKGQKNSRERMKRIEEGIKELGSQILKEHPVENTQLQNEKLYLYYLQNGRDMYVDQELDINRLSDYDVDHIVPQSFLKDDSIDNKVLTRSDKARGKSDNVPSEEVVKKMKNYWRQLLNAKLITQRKFDNLTKAERGGLSELDKAGFIKRQLVETRQITKHVAQILDSRMNTKYDENDKLIREVKVITLKSKLVSDFRKDFQFYKVREINNYHHAHDAYLNAVVGTALIKKYPKLESEFVYGDYKVYDVRKMIAKSEQEIGKATAKYFFYSNIMNFFKTEITLANGEIRKRPLIETNGETGEIVWDKGRDFATVRKVLSMPQVNIVKKTEVQTGGFSKESILPKRNSDKLIARKKDWDPKKYGGFDSPTVAYSVLVVAKVEKGKSKKLKSVKELLGITIMERSSFEKNPIDFLEAKGYKEVKKDLIIKLPKYSLFELENGRKRMLASAGELQKGNELALPSKYVNFLYLASHYEKLKGSPEDNEQKQLFVEQHKHYLDEIIEQISEFSKRVILADANLDKVLSAYNKHRDKPIREQAENIIHLFTLTNLGAPAAFKYFDTTIDRKRYTSTKEVLDATLIHQSITGLYETRIDLSQLGGDGGGGGPAPGSSGGTLQLEEEYRLFEPESTQKQEMDIWLKNFPQAWAETGGMGTAHCQAPVLIQLKATATPISIRQYPMPHEAYQGIKPHIRRMLDQGILKPCQSPWNTPLLPVKKPGTEDYRPVQDLREVNKRVEDIHPTVPNPYNLLSTLPPSHPWYTVLDLKDAFFCLRLHSESQLLFAFEWRDPEIGLSGQLTWTRLPQGFKNSPTLFNEALHSDLADFRVRYPALVLLQYVDDLLLAAATRTECLEGTKALLETLGNKGYRASAKKAQICLQEVTYLGYSLKDGQRWLTKARKEAILSIPVPKNSRQVREFLGTAGYCRLWIPGFAELAAPLYPLTRPGTLFQWGTEQQLAFEDIKKALLSSPALGLPDITKPFELFIDENSGFAKGVLVQKLGPWKRPVAYLSKKLDTVASGWPPCLRMVAAIAILVKDAGKLTLGQPLTILTSHPVEALVRQPPNKWLSNARMTHYQAMLLDAERVHFGPTVSLNPATLLPLPSGGNHHDCLQILAETHGTRPDLTDQPLPDADLTWYTDGSSFIRNGEREAGAAVTTESEVIWAAPLPPGTSAQRAELIALTQALKMAEGKKLTVYTDSRYAFATTHVHGEIYRRRGWLTSEGKEIKNKNEILALLEALFLPKRLSIIHCPGHQKGDSPQAKGNRLADDTAKKAATETHSSLTVLPAGKRTADGSEFEKRTADGSEFESPKKKAKVE

SEQ ID NO: 7365 - protein, 2093 aa, synthetic construct
MPAAKRVKLDGGDKKYSIGLDIGTNSVGWAVITDEYKVPSKKFKVLGNTDRHSIKKNLIGALLFDSGETAEATRLKRTARRRYTRRKNRICYLQEIFSNEMAKVDDSFFHRLEESFLVEEDKKHERHPIFGNIVDEVAYHEKYPTIYHLRKKLVDSTDKADLRLIYLALAHMIKFRGHFLIEGDLNPDNSDVDKLFIQLVQTYNQLFEENPINASGVDAKAILSARLSKSRRLENLIAQLPGEKKNGLFGNLIALSLGLTPNFKSNFDLAEDAKLQLSKDTYDDDLDNLLAQIGDQYADLFLAAKNLSDAILLSDILRVNTEITKAPLSASMIKRYDEHHQDLTLLKALVRQQLPEKYKEIFFDQSKNGYAGYIDGGASQEEFYKFIKPILEKMDGTEELLVKLNREDLLRKQRTFDNGSIPHQIHLGELHAILRRQEDFYPFLKDNREKIEKILTFRIPYYVGPLARGNSRFAWMTRKSEETITPWNFEEVVDKGASAQSFIERMTNFDKNLPNEKVLPKHSLLYEYFTVYNELTKVKYVTEGMRKPAFLSGEQKKAIVDLLFKTNRKVTVKQLKEDYFKKIECFDSVEISGVEDRFNASLGTYHDLLKIIKDKDFLDNEENEDILEDIVLTLTLFEDREMIEERLKTYAHLFDDKVMKQLKRRRYTGWGRLSRKLINGIRDKQSGKTILDFLKSDGFANRNFMQLIHDDSLTFKEDIQKAQVSGQGDSLHEHIANLAGSPAIKKGILQTVKVVDELVKVMGRHKPENIVIEMARENQTTQKGQKNSRERMKRIEEGIKELGSQILKEHPVENTQLQNEKLYLYYLQNGRDMYVDQELDINRLSDYDVDHIVPQSFLKDDSIDNKVLTRSDKARGKSDNVPSEEVVKKMKNYWRQLLNAKLITQRKFDNLTKAERGGLSELDKAGFIKRQLVETRQITKHVAQILDSRMNTKYDENDKLIREVKVITLKSKLVSDFRKDFQFYKVREINNYHHAHDAYLNAVVGTALIKKYPKLESEFVYGDYKVYDVRKMIAKSEQEIGKATAKYFFYSNIMNFFKTEITLANGEIRKRPLIETNGETGEIVWDKGRDFATVRKVLSMPQVNIVKKTEVQTGGFSKESILPKRNSDKLIARKKDWDPKKYGGFDSPTVAYSVLVVAKVEKGKSKKLKSVKELLGITIMERSSFEKNPIDFLEAKGYKEVKKDLIIKLPKYSLFELENGRKRMLASAGELQKGNELALPSKYVNFLYLASHYEKLKGSPEDNEQKQLFVEQHKHYLDEIIEQISEFSKRVILADANLDKVLSAYNKHRDKPIREQAENIIHLFTLTNLGAPAAFKYFDTTIDRKRYTSTKEVLDATLIHQSITGLYETRIDLSQLGGDGGGGGPAPGSSGGTLQLEEEYRLFEPESTQKQEMDIWLKNFPQAWAETGGMGTAHCQAPVLIQLKATATPISIRQYPMPHEAYQGIKPHIRRMLDQGILKPCQSPWNTPLLPVKKPGTEDYRPVQDLREVNKRVEDIHPTVPNPYNLLSTLPPSHPWYTVLDLKDAFFCLRLHSESQLLFAFEWRDPEIGLSGQLTWTRLPQGFKNSPTLFNEALHSDLADFRVRYPALVLLQYVDDLLLAAATRTECLEGTKALLETLGNKGYRASAKKAQICLQEVTYLGYSLKDGQRWLTKARKEAILSIPVPKNSRQVREFLGKAGYCRLFIPGFAELAAPLYPLTRPGTLFQWGTEQQLAFEDIKKALLSSPALGLPDITKPFELFIDENSGFAKGVLVQKLGPWKRPVAYLSKKLDTVASGWPPCLRMVAAIAILVKDAGKLTLGQPLTILTSHPVEALVRQPPNKWLSNARMTHYQAMLLDAERVHFGPTVSLNPATLLPLPSGGNHHDCLQILAETHGTRPDLTDQPLPDADLTWYTDGSSFIRNGEREAGAAVTTESEVIWAAPLPPGTSAQRAELIALTQALKMAEGKKLTVYTDSRYAFATTHVHGEIYRRRGWLTSEGKEIKNKNEILALLEALFLPKRLSIIHCPGHQKGDSPQAKGNRLADDTAKKAATETHSSLTVLPAGKRTADGSEFEKRTADGSEFESPKKKAKVE

SEQ ID NO: 7366 - protein, 2174 aa, synthetic construct
MPAAKRVKLDGGDKKYSIGLDIGTNSVGWAVITDEYKVPSKKFKVLGNTDRHSIKKNLIGALLFDSGETAEATRLKRTARRRYTRRKNRICYLQEIFSNEMAKVDDSFFHRLEESFLVEEDKKHERHPIFGNIVDEVAYHEKYPTIYHLRKKLVDSTDKADLRLIYLALAHMIKFRGHFLIEGDLNPDNSDVDKLFIQLVQTYNQLFEENPINASGVDAKAILSARLSKSRRLENLIAQLPGEKKNGLFGNLIALSLGLTPNFKSNFDLAEDAKLQLSKDTYDDDLDNLLAQIGDQYADLFLAAKNLSDAILLSDILRVNTEITKAPLSASMIKRYDEHHQDLTLLKALVRQQLPEKYKEIFFDQSKNGYAGYIDGGASQEEFYKFIKPILEKMDGTEELLVKLNREDLLRKQRTFDNGSIPHQIHLGELHAILRRQEDFYPFLKDNREKIEKILTFRIPYYVGPLARGNSRFAWMTRKSEETITPWNFEEVVDKGASAQSFIERMTNFDKNLPNEKVLPKHSLLYEYFTVYNELTKVKYVTEGMRKPAFLSGEQKKAIVDLLFKTNRKVTVKQLKEDYFKKIECFDSVEISGVEDRFNASLGTYHDLLKIIKDKDFLDNEENEDILEDIVLTLTLFEDREMIEERLKTYAHLFDDKVMKQLKRRRYTGWGRLSRKLINGIRDKQSGKTILDFLKSDGFANRNFMQLIHDDSLTFKEDIQKAQVSGQGDSLHEHIANLAGSPAIKKGILQTVKVVDELVKVMGRHKPENIVIEMARENQTTQKGQKNSRERMKRIEEGIKELGSQILKEHPVENTQLQNEKLYLYYLQNGRDMYVDQELDINRLSDYDVDHIVPQSFLKDDSIDNKVLTRSDKARGKSDNVPSEEVVKKMKNYWRQLLNAKLITQRKFDNLTKAERGGLSELDKAGFIKRQLVETRQITKHVAQILDSRMNTKYDENDKLIREVKVITLKSKLVSDFRKDFQFYKVREINNYHHAHDAYLNAVVGTALIKKYPKLESEFVYGDYKVYDVRKMIAKSEQEIGKATAKYFFYSNIMNFFKTEITLANGEIRKRPLIETNGETGEIVWDKGRDFATVRKVLSMPQVNIVKKTEVQTGGFSKESILPKRNSDKLIARKKDWDPKKYGGFDSPTVAYSVLVVAKVEKGKSKKLKSVKELLGITIMERSSFEKNPIDFLEAKGYKEVKKDLIIKLPKYSLFELENGRKRMLASAGELQKGNELALPSKYVNFLYLASHYEKLKGSPEDNEQKQLFVEQHKHYLDEIIEQISEFSKRVILADANLDKVLSAYNKHRDKPIREQAENIIHLFTLTNLGAPAAFKYFDTTIDRKRYTSTKEVLDATLIHQSITGLYETRIDLSQLGGDGGGGGPAPGSSGGMNPLQLLQPLPAEIKGTKLLAHWNSGATITCIPESFLEDEQPIKKTLIKTIHGEKQQNVYYVTFKVKGRKVEAEVIASPYEYILLSPTDVPWLTQQPLQLTILVPLQEYQEKILSKTALPEDQKQQLKTLFVKYDNLWQHWENQVGHRKIRPHNIATGDYPPRPQKQYPINPKAKPSIQIVIDDLLKQGVLTPQNSTMNTPVYPVPKPDGRWRMVLDYREVNKTIPLTAAQNQHSAGILATIVRQKYKTTLDLANGFWAHPITPESYWLTAFTWQGKQYCWTRLPQGFLNSPALFNADVVDLLKEIPNVQVYVDDIYLSHDDPKEHVQQLEKVFQILLQAGYVVSLKKSEIGQKTVEFLGFNITKEGRGLTDTFKTKLLNITPPKDLKQLQSILGLLNFARNFIPNFAELVQPLYNLIAPAKGKYIEWSEENTKQLNMVIEALNTASNLEERLPEQRLVIKVNTSPSAGYVRYYNETGKKPIMYLNYVFSKAELKFSMLEKLLTTMHKALIKAMDLAMGQEILVYSPIVSMTKIQKTPLPERKALPIRWITWMTYLEDPRIQFHYDKTLPELKHIPDVYTSSQSPVKHPSQYEGVFYTDGSAIKSPDPTKSNNAGMGIVHATYKPEYQVLNQWSIPLGNHTAQMAEIAAVEFACKKALKIPGPVLVITDSFYVAESANKELPYWKSNGFVNNKKKPLKHISKWKSIAECLSMKPDITIQHEKGISLQIPVFILKGNALADKLATQGSYVVNAGKRTADGSEFEKRTADGSEFESPKKKAKVE

SEQ ID NO: 7367 - protein, 2007 aa, synthetic construct
MPAAKRVKLDGGDKKYSIGLDIGTNSVGWAVITDEYKVPSKKFKVLGNTDRHSIKKNLIGALLFDSGETAEATRLKRTARRRYTRRKNRICYLQEIFSNEMAKVDDSFFHRLEESFLVEEDKKHERHPIFGNIVDEVAYHEKYPTIYHLRKKLVDSTDKADLRLIYLALAHMIKFRGHFLIEGDLNPDNSDVDKLFIQLVQTYNQLFEENPINASGVDAKAILSARLSKSRRLENLIAQLPGEKKNGLFGNLIALSLGLTPNFKSNFDLAEDAKLQLSKDTYDDDLDNLLAQIGDQYADLFLAAKNLSDAILLSDILRVNTEITKAPLSASMIKRYDEHHQDLTLLKALVRQQLPEKYKEIFFDQSKNGYAGYIDGGASQEEFYKFIKPILEKMDGTEELLVKLNREDLLRKQRTFDNGSIPHQIHLGELHAILRRQEDFYPFLKDNREKIEKILTFRIPYYVGPLARGNSRFAWMTRKSEETITPWNFEEVVDKGASAQSFIERMTNFDKNLPNEKVLPKHSLLYEYFTVYNELTKVKYVTEGMRKPAFLSGEQKKAIVDLLFKTNRKVTVKQLKEDYFKKIECFDSVEISGVEDRFNASLGTYHDLLKIIKDKDFLDNEENEDILEDIVLTLTLFEDREMIEERLKTYAHLFDDKVMKQLKRRRYTGWGRLSRKLINGIRDKQSGKTILDFLKSDGFANRNFMQLIHDDSLTFKEDIQKAQVSGQGDSLHEHIANLAGSPAIKKGILQTVKVVDELVKVMGRHKPENIVIEMARENQTTQKGQKNSRERMKRIEEGIKELGSQILKEHPVENTQLQNEKLYLYYLQNGRDMYVDQELDINRLSDYDVDHIVPQSFLKDDSIDNKVLTRSDKARGKSDNVPSEEVVKKMKNYWRQLLNAKLITQRKFDNLTKAERGGLSELDKAGFIKRQLVETRQITKHVAQILDSRMNTKYDENDKLIREVKVITLKSKLVSDFRKDFQFYKVREINNYHHAHDAYLNAVVGTALIKKYPKLESEFVYGDYKVYDVRKMIAKSEQEIGKATAKYFFYSNIMNFFKTEITLANGEIRKRPLIETNGETGEIVWDKGRDFATVRKVLSMPQVNIVKKTEVQTGGFSKESILPKRNSDKLIARKKDWDPKKYGGFDSPTVAYSVLVVAKVEKGKSKKLKSVKELLGITIMERSSFEKNPIDFLEAKGYKEVKKDLIIKLPKYSLFELENGRKRMLASAGELQKGNELALPSKYVNFLYLASHYEKLKGSPEDNEQKQLFVEQHKHYLDEIIEQISEFSKRVILADANLDKVLSAYNKHRDKPIREQAENIIHLFTLTNLGAPAAFKYFDTTIDRKRYTSTKEVLDATLIHQSITGLYETRIDLSQLGGDGGGGGPAPGSSGGGLEHLPPPPEVSQFPLNPERLQALTDLVSRALEAKHIEPYQGPGNNPIFPVKKPNGKWRFIHDLRATNSLTRDLASPSPGPPDLTSLPQDLPHLRTIDLTDAFFQIPLPAVFQPYFAFTLPQPNNHGPGTRYSWRVLPQGFKNSPTLFQQQLSHILAPVRKAFPNSLIIQYMDDILLASPALRELTALTDKVTNALTKEGLPMSLEKTQATPGSIHFLGQVISPDCITYETLPSIHVKSIWSLAELQSMLGELQWVSKGTPVLRSSLHQLYLALRGHRDPRDTIELTSTQVQALKTIQKALALNCRSRLVSQLPILALIILRPTGTTAVLFQTKQKWPLVWLHTPHPATSLRPWGQLLANAIITLDKYSLQHYGQICKSFHHNISNQALTYYLHTSDQSSVAILLQHSHRFHNLGAQPSGPWRSLLQVPQIFQNIDVLRPPFIISPVVIDHAPCLFSDGATSKAAFILWDKQVIHQQVLPLPSTCSAQAGELFGLLAGLQKSKPWPALNIFLDSKFLIGHLRRMAWGAFLGPSTQCDLHARLFPLLQGKTVYVHHVRSHTLLQDPISRLNEATDALMLAPLLPLAGKRTADGSEFEKRTADGSEFESPKKKAKVE

SEQ ID NO: 7368 - protein, 2125 aa, synthetic construct
MPAAKRVKLDGGDKKYSIGLDIGTNSVGWAVITDEYKVPSKKFKVLGNTDRHSIKKNLIGALLFDSGETAEATRLKRTARRRYTRRKNRICYLQEIFSNEMAKVDDSFFHRLEESFLVEEDKKHERHPIFGNIVDEVAYHEKYPTIYHLRKKLVDSTDKADLRLIYLALAHMIKFRGHFLIEGDLNPDNSDVDKLFIQLVQTYNQLFEENPINASGVDAKAILSARLSKSRRLENLIAQLPGEKKNGLFGNLIALSLGLTPNFKSNFDLAEDAKLQLSKDTYDDDLDNLLAQIGDQYADLFLAAKNLSDAILLSDILRVNTEITKAPLSASMIKRYDEHHQDLTLLKALVRQQLPEKYKEIFFDQSKNGYAGYIDGGASQEEFYKFIKPILEKMDGTEELLVKLNREDLLRKQRTFDNGSIPHQIHLGELHAILRRQEDFYPFLKDNREKIEKILTFRIPYYVGPLARGNSRFAWMTRKSEETITPWNFEEVVDKGASAQSFIERMTNFDKNLPNEKVLPKHSLLYEYFTVYNELTKVKYVTEGMRKPAFLSGEQKKAIVDLLFKTNRKVTVKQLKEDYFKKIECFDSVEISGVEDRFNASLGTYHDLLKIIKDKDFLDNEENEDILEDIVLTLTLFEDREMIEERLKTYAHLFDDKVMKQLKRRRYTGWGRLSRKLINGIRDKQSGKTILDFLKSDGFANRNFMQLIHDDSLTFKEDIQKAQVSGQGDSLHEHIANLAGSPAIKKGILQTVKVVDELVKVMGRHKPENIVIEMARENQTTQKGQKNSRERMKRIEEGIKELGSQILKEHPVENTQLQNEKLYLYYLQNGRDMYVDQELDINRLSDYDVDHIVPQSFLKDDSIDNKVLTRSDKARGKSDNVPSEEVVKKMKNYWRQLLNAKLITQRKFDNLTKAERGGLSELDKAGFIKRQLVETRQITKHVAQILDSRMNTKYDENDKLIREVKVITLKSKLVSDFRKDFQFYKVREINNYHHAHDAYLNAVVGTALIKKYPKLESEFVYGDYKVYDVRKMIAKSEQEIGKATAKYFFYSNIMNFFKTEITLANGEIRKRPLIETNGETGEIVWDKGRDFATVRKVLSMPQVNIVKKTEVQTGGFSKESILPKRNSDKLIARKKDWDPKKYGGFDSPTVAYSVLVVAKVEKGKSKKLKSVKELLGITIMERSSFEKNPIDFLEAKGYKEVKKDLIIKLPKYSLFELENGRKRMLASAGELQKGNELALPSKYVNFLYLASHYEKLKGSPEDNEQKQLFVEQHKHYLDEIIEQISEFSKRVILADANLDKVLSAYNKHRDKPIREQAENIIHLFTLTNLGAPAAFKYFDTTIDRKRYTSTKEVLDATLIHQSITGLYETRIDLSQLGGDGGGGGPAPGSSGGLLGRDLLTKLKAQIQFSTEGPQVTWEDRPAMCLVLNLEEEYRLHEKPVPPSIDPSWLQLFPMVWAEKAGMGLANQVPPVVVELKSDASPVAVRQYPMSKEAREGIRPHIQRFLDLGILVPCQSPWNTPLLPVKKPGTNDYRPVQDLREVNKRVQDIHPTVPNPYNLLSSLPPSHTWYSVLDLKDAFFCLKLHPNSQPLFAFEWRDPEKGNTGQLTWTRLPQGFKNSPTLFNEALHRDLASFRALNPQVVMLQYVDDLLVAAPTYRDCKEGTRRLLQELSKLGYRVSAKKAQLCREEVTYLGYLLKGGKRWLTPARKATVMKIPTPTTPRQVREFLGTAGFCRLWIPGFASLAAPLYPLTRPKVPFTWTEAHQEAFGRIKEALLSAPALALPDLTKPFALYVDEKEGVARGVLTQTLGPWRRPVAYLSKKLDPVASGWPTCLKAIAAVALLLKDADKLTLGQNVLVIAPHNLESIVRQPPDRWMTNARMTHYQSLLLNERVSFAPPAILNPATLLPVESDDTPIHICSEILAEETGTRPDLRDQPLPGVPAWYTDGSSFIMDGRRQAGAAIVDNKRTVWASNLPEGTSAQKAELIALTQALRLAEGKSINIYTDSRYAFATAHVHGAIYKQRGWLTSAGKDIKNKEEILALLEAIHLPKRVAIIHCPGHQRGTDPVATGNRKADEAAKQAAQSTRILTETTKNAGKRTADGSEFEKRTADGSEFESPKKKAKVE

SEQ ID NO: 7369 - protein, 2125 aa, synthetic construct
MPAAKRVKLDGGDKKYSIGLDIGTNSVGWAVITDEYKVPSKKFKVLGNTDRHSIKKNLIGALLFDSGETAEATRLKRTARRRYTRRKNRICYLQEIFSNEMAKVDDSFFHRLEESFLVEEDKKHERHPIFGNIVDEVAYHEKYPTIYHLRKKLVDSTDKADLRLIYLALAHMIKFRGHFLIEGDLNPDNSDVDKLFIQLVQTYNQLFEENPINASGVDAKAILSARLSKSRRLENLIAQLPGEKKNGLFGNLIALSLGLTPNFKSNFDLAEDAKLQLSKDTYDDDLDNLLAQIGDQYADLFLAAKNLSDAILLSDILRVNTEITKAPLSASMIKRYDEHHQDLTLLKALVRQQLPEKYKEIFFDQSKNGYAGYIDGGASQEEFYKFIKPILEKMDGTEELLVKLNREDLLRKQRTFDNGSIPHQIHLGELHAILRRQEDFYPFLKDNREKIEKILTFRIPYYVGPLARGNSRFAWMTRKSEETITPWNFEEVVDKGASAQSFIERMTNFDKNLPNEKVLPKHSLLYEYFTVYNELTKVKYVTEGMRKPAFLSGEQKKAIVDLLFKTNRKVTVKQLKEDYFKKIECFDSVEISGVEDRFNASLGTYHDLLKIIKDKDFLDNEENEDILEDIVLTLTLFEDREMIEERLKTYAHLFDDKVMKQLKRRRYTGWGRLSRKLINGIRDKQSGKTILDFLKSDGFANRNFMQLIHDDSLTFKEDIQKAQVSGQGDSLHEHIANLAGSPAIKKGILQTVKVVDELVKVMGRHKPENIVIEMARENQTTQKGQKNSRERMKRIEEGIKELGSQILKEHPVENTQLQNEKLYLYYLQNGRDMYVDQELDINRLSDYDVDHIVPQSFLKDDSIDNKVLTRSDKARGKSDNVPSEEVVKKMKNYWRQLLNAKLITQRKFDNLTKAERGGLSELDKAGFIKRQLVETRQITKHVAQILDSRMNTKYDENDKLIREVKVITLKSKLVSDFRKDFQFYKVREINNYHHAHDAYLNAVVGTALIKKYPKLESEFVYGDYKVYDVRKMIAKSEQEIGKATAKYFFYSNIMNFFKTEITLANGEIRKRPLIETNGETGEIVWDKGRDFATVRKVLSMPQVNIVKKTEVQTGGFSKESILPKRNSDKLIARKKDWDPKKYGGFDSPTVAYSVLVVAKVEKGKSKKLKSVKELLGITIMERSSFEKNPIDFLEAKGYKEVKKDLIIKLPKYSLFELENGRKRMLASAGELQKGNELALPSKYVNFLYLASHYEKLKGSPEDNEQKQLFVEQHKHYLDEIIEQISEFSKRVILADANLDKVLSAYNKHRDKPIREQAENIIHLFTLTNLGAPAAFKYFDTTIDRKRYTSTKEVLDATLIHQSITGLYETRIDLSQLGGDGGGGGPAPGSSGGLLGRDLLTKLKAQIQFSTEGPQVTWEDRPAMCLVLNLEEEYRLHEKPVPPSIDPSWLQLFPMVWAEKAGMGLANQVPPVVVELKSDASPVAVRQYPMSKEAREGIRPHIQRFLDLGILVPCQSPWNTPLLPVKKPGTNDYRPVQDLREVNKRVQDIHPTVPNPYNLLSSLPPSHTWYSVLDLKDAFFCLKLHPNSQPLFAFEWRDPEKGNTGQLTWTRLPQGFKNSPTLFNEALHRDLASFRALNPQVVMLQYVDDLLVAAPTYRDCKEGTRRLLQELSKLGYRVSAKKAQLCREEVTYLGYLLKGGKRWLTPARKATVMKIPTPTTPRQVREFLGKAGFCRLFIPGFASLAAPLYPLTRPKVPFTWTEAHQEAFGRIKEALLSAPALALPDLTKPFALYVDEKEGVARGVLTQTLGPWRRPVAYLSKKLDPVASGWPTCLKAIAAVALLLKDADKLTLGQNVLVIAPHNLESIVRQPPDRWMTNARMTHYQSLLLNERVSFAPPAILNPATLLPVESDDTPIHICSEILAEETGTRPDLRDQPLPGVPAWYTDGSSFIMDGRRQAGAAIVDNKRTVWASNLPEGTSAQKAELIALTQALRLAEGKSINIYTDSRYAFATAHVHGAIYKQRGWLTSAGKDIKNKEEILALLEAIHLPKRVAIIHCPGHQRGTDPVATGNRKADEAAKQAAQSTRILTETTKNAGKRTADGSEFEKRTADGSEFESPKKKAKVE

SEQ ID NO: 7370 - protein, 2216 aa, synthetic construct
MPAAKRVKLDGGDKKYSIGLDIGTNSVGWAVITDEYKVPSKKFKVLGNTDRHSIKKNLIGALLFDSGETAEATRLKRTARRRYTRRKNRICYLQEIFSNEMAKVDDSFFHRLEESFLVEEDKKHERHPIFGNIVDEVAYHEKYPTIYHLRKKLVDSTDKADLRLIYLALAHMIKFRGHFLIEGDLNPDNSDVDKLFIQLVQTYNQLFEENPINASGVDAKAILSARLSKSRRLENLIAQLPGEKKNGLFGNLIALSLGLTPNFKSNFDLAEDAKLQLSKDTYDDDLDNLLAQIGDQYADLFLAAKNLSDAILLSDILRVNTEITKAPLSASMIKRYDEHHQDLTLLKALVRQQLPEKYKEIFFDQSKNGYAGYIDGGASQEEFYKFIKPILEKMDGTEELLVKLNREDLLRKQRTFDNGSIPHQIHLGELHAILRRQEDFYPFLKDNREKIEKILTFRIPYYVGPLARGNSRFAWMTRKSEETITPWNFEEVVDKGASAQSFIERMTNFDKNLPNEKVLPKHSLLYEYFTVYNELTKVKYVTEGMRKPAFLSGEQKKAIVDLLFKTNRKVTVKQLKEDYFKKIECFDSVEISGVEDRFNASLGTYHDLLKIIKDKDFLDNEENEDILEDIVLTLTLFEDREMIEERLKTYAHLFDDKVMKQLKRRRYTGWGRLSRKLINGIRDKQSGKTILDFLKSDGFANRNFMQLIHDDSLTFKEDIQKAQVSGQGDSLHEHIANLAGSPAIKKGILQTVKVVDELVKVMGRHKPENIVIEMARENQTTQKGQKNSRERMKRIEEGIKELGSQILKEHPVENTQLQNEKLYLYYLQNGRDMYVDQELDINRLSDYDVDHIVPQSFLKDDSIDNKVLTRSDKARGKSDNVPSEEVVKKMKNYWRQLLNAKLITQRKFDNLTKAERGGLSELDKAGFIKRQLVETRQITKHVAQILDSRMNTKYDENDKLIREVKVITLKSKLVSDFRKDFQFYKVREINNYHHAHDAYLNAVVGTALIKKYPKLESEFVYGDYKVYDVRKMIAKSEQEIGKATAKYFFYSNIMNFFKTEITLANGEIRKRPLIETNGETGEIVWDKGRDFATVRKVLSMPQVNIVKKTEVQTGGFSKESILPKRNSDKLIARKKDWDPKKYGGFDSPTVAYSVLVVAKVEKGKSKKLKSVKELLGITIMERSSFEKNPIDFLEAKGYKEVKKDLIIKLPKYSLFELENGRKRMLASAGELQKGNELALPSKYVNFLYLASHYEKLKGSPEDNEQKQLFVEQHKHYLDEIIEQISEFSKRVILADANLDKVLSAYNKHRDKPIREQAENIIHLFTLTNLGAPAAFKYFDTTIDRKRYTSTKEVLDATLIHQSITGLYETRIDLSQLGGDGGGGGPAPGSSGGTLGDQGSRGSDPLPEPRVTLTVEGIPTEFLVNTGAEHSVLTKPMGKMGSKRTVVAGATGSKVYPWTTKRLLKIGQKQVTHSFLVIPECPAPLLGRDLLTKLKAQIQFSTEGPQVTWEDRPAMCLVLNLEEEYRLHEKPVPPSIDPSWLQLFPMVWAEKAGMGLANQVPPVVVELKSDASPVAVRQYPMSKEAREGIRPHIQRFLDLGILVPCQSPWNTPLLPVKKPGTNDYRPVQDLREVNKRVQDIHPTVPNPYNLLSSLPPSHTWYSVLDLKDAFFCLKLHPNSQPLFAFEWRDPEKGNTGQLTWTRLPQGFKNSPTLFNEALHRDLASFRALNPQVVMLQYVDDLLVAAPTYRDCKEGTRRLLQELSKLGYRVSAKKAQLCREEVTYLGYLLKGGKRWLTPARKATVMKIPTPTTPRQVREFLGTAGFCRLWIPGFASLAAPLYPLTRPKVPFTWTEAHQEAFGRIKEALLSAPALALPDLTKPFALYVDEKEGVARGVLTQTLGPWRRPVAYLSKKLDPVASGWPTCLKAIAAVALLLKDADKLTLGQNVLVIAPHNLESIVRQPPDRWMTNARMTHYQSLLLNERVSFAPPAILNPATLLPVESDDTPIHICSEILAEETGTRPDLRDQPLPGVPAWYTDGSSFIMDGRRQAGAAIVDNKRTVWASNLPEGTSAQKAELIALTQALRLAEGKSINIYTDSRYAFATAHVHGAIYKQRGWLTSAGKDIKNKEEILALLEAIHLPKRVAIIHCPGHQRGTDPVATGNRKADEAAKQAAQSTRILTETTKNAGKRTADGSEFEKRTADGSEFESPKKKAKVE

SEQ ID NO: 7371 - protein, 2216 aa, synthetic construct
MPAAKRVKLDGGDKKYSIGLDIGTNSVGWAVITDEYKVPSKKFKVLGNTDRHSIKKNLIGALLFDSGETAEATRLKRTARRRYTRRKNRICYLQEIFSNEMAKVDDSFFHRLEESFLVEEDKKHERHPIFGNIVDEVAYHEKYPTIYHLRKKLVDSTDKADLRLIYLALAHMIKFRGHFLIEGDLNPDNSDVDKLFIQLVQTYNQLFEENPINASGVDAKAILSARLSKSRRLENLIAQLPGEKKNGLFGNLIALSLGLTPNFKSNFDLAEDAKLQLSKDTYDDDLDNLLAQIGDQYADLFLAAKNLSDAILLSDILRVNTEITKAPLSASMIKRYDEHHQDLTLLKALVRQQLPEKYKEIFFDQSKNGYAGYIDGGASQEEFYKFIKPILEKMDGTEELLVKLNREDLLRKQRTFDNGSIPHQIHLGELHAILRRQEDFYPFLKDNREKIEKILTFRIPYYVGPLARGNSRFAWMTRKSEETITPWNFEEVVDKGASAQSFIERMTNFDKNLPNEKVLPKHSLLYEYFTVYNELTKVKYVTEGMRKPAFLSGEQKKAIVDLLFKTNRKVTVKQLKEDYFKKIECFDSVEISGVEDRFNASLGTYHDLLKIIKDKDFLDNEENEDILEDIVLTLTLFEDREMIEERLKTYAHLFDDKVMKQLKRRRYTGWGRLSRKLINGIRDKQSGKTILDFLKSDGFANRNFMQLIHDDSLTFKEDIQKAQVSGQGDSLHEHIANLAGSPAIKKGILQTVKVVDELVKVMGRHKPENIVIEMARENQTTQKGQKNSRERMKRIEEGIKELGSQILKEHPVENTQLQNEKLYLYYLQNGRDMYVDQELDINRLSDYDVDHIVPQSFLKDDSIDNKVLTRSDKARGKSDNVPSEEVVKKMKNYWRQLLNAKLITQRKFDNLTKAERGGLSELDKAGFIKRQLVETRQITKHVAQILDSRMNTKYDENDKLIREVKVITLKSKLVSDFRKDFQFYKVREINNYHHAHDAYLNAVVGTALIKKYPKLESEFVYGDYKVYDVRKMIAKSEQEIGKATAKYFFYSNIMNFFKTEITLANGEIRKRPLIETNGETGEIVWDKGRDFATVRKVLSMPQVNIVKKTEVQTGGFSKESILPKRNSDKLIARKKDWDPKKYGGFDSPTVAYSVLVVAKVEKGKSKKLKSVKELLGITIMERSSFEKNPIDFLEAKGYKEVKKDLIIKLPKYSLFELENGRKRMLASAGELQKGNELALPSKYVNFLYLASHYEKLKGSPEDNEQKQLFVEQHKHYLDEIIEQISEFSKRVILADANLDKVLSAYNKHRDKPIREQAENIIHLFTLTNLGAPAAFKYFDTTIDRKRYTSTKEVLDATLIHQSITGLYETRIDLSQLGGDGGGGGPAPGSSGGTLGDQGSRGSDPLPEPRVTLTVEGIPTEFLVNTGAEHSVLTKPMGKMGSKRTVVAGATGSKVYPWTTKRLLKIGQKQVTHSFLVIPECPAPLLGRDLLTKLKAQIQFSTEGPQVTWEDRPAMCLVLNLEEEYRLHEKPVPPSIDPSWLQLFPMVWAEKAGMGLANQVPPVVVELKSDASPVAVRQYPMSKEAREGIRPHIQRFLDLGILVPCQSPWNTPLLPVKKPGTNDYRPVQDLREVNKRVQDIHPTVPNPYNLLSSLPPSHTWYSVLDLKDAFFCLKLHPNSQPLFAFEWRDPEKGNTGQLTWTRLPQGFKNSPTLFNEALHRDLASFRALNPQVVMLQYVDDLLVAAPTYRDCKEGTRRLLQELSKLGYRVSAKKAQLCREEVTYLGYLLKGGKRWLTPARKATVMKIPTPTTPRQVREFLGKAGFCRLFIPGFASLAAPLYPLTRPKVPFTWTEAHQEAFGRIKEALLSAPALALPDLTKPFALYVDEKEGVARGVLTQTLGPWRRPVAYLSKKLDPVASGWPTCLKAIAAVALLLKDADKLTLGQNVLVIAPHNLESIVRQPPDRWMTNARMTHYQSLLLNERVSFAPPAILNPATLLPVESDDTPIHICSEILAEETGTRPDLRDQPLPGVPAWYTDGSSFIMDGRRQAGAAIVDNKRTVWASNLPEGTSAQKAELIALTQALRLAEGKSINIYTDSRYAFATAHVHGAIYKQRGWLTSAGKDIKNKEEILALLEAIHLPKRVAIIHCPGHQRGTDPVATGNRKADEAAKQAAQSTRILTETTKNAGKRTADGSEFEKRTADGSEFESPKKKAKVE

SEQ ID NO: 7372 - protein, 2094 aa, synthetic construct
MPAAKRVKLDGGDKKYSIGLDIGTNSVGWAVITDEYKVPSKKFKVLGNTDRHSIKKNLIGALLFDSGETAEATRLKRTARRRYTRRKNRICYLQEIFSNEMAKVDDSFFHRLEESFLVEEDKKHERHPIFGNIVDEVAYHEKYPTIYHLRKKLVDSTDKADLRLIYLALAHMIKFRGHFLIEGDLNPDNSDVDKLFIQLVQTYNQLFEENPINASGVDAKAILSARLSKSRRLENLIAQLPGEKKNGLFGNLIALSLGLTPNFKSNFDLAEDAKLQLSKDTYDDDLDNLLAQIGDQYADLFLAAKNLSDAILLSDILRVNTEITKAPLSASMIKRYDEHHQDLTLLKALVRQQLPEKYKEIFFDQSKNGYAGYIDGGASQEEFYKFIKPILEKMDGTEELLVKLNREDLLRKQRTFDNGSIPHQIHLGELHAILRRQEDFYPFLKDNREKIEKILTFRIPYYVGPLARGNSRFAWMTRKSEETITPWNFEEVVDKGASAQSFIERMTNFDKNLPNEKVLPKHSLLYEYFTVYNELTKVKYVTEGMRKPAFLSGEQKKAIVDLLFKTNRKVTVKQLKEDYFKKIECFDSVEISGVEDRFNASLGTYHDLLKIIKDKDFLDNEENEDILEDIVLTLTLFEDREMIEERLKTYAHLFDDKVMKQLKRRRYTGWGRLSRKLINGIRDKQSGKTILDFLKSDGFANRNFMQLIHDDSLTFKEDIQKAQVSGQGDSLHEHIANLAGSPAIKKGILQTVKVVDELVKVMGRHKPENIVIEMARENQTTQKGQKNSRERMKRIEEGIKELGSQILKEHPVENTQLQNEKLYLYYLQNGRDMYVDQELDINRLSDYDVDHIVPQSFLKDDSIDNKVLTRSDKARGKSDNVPSEEVVKKMKNYWRQLLNAKLITQRKFDNLTKAERGGLSELDKAGFIKRQLVETRQITKHVAQILDSRMNTKYDENDKLIREVKVITLKSKLVSDFRKDFQFYKVREINNYHHAHDAYLNAVVGTALIKKYPKLESEFVYGDYKVYDVRKMIAKSEQEIGKATAKYFFYSNIMNFFKTEITLANGEIRKRPLIETNGETGEIVWDKGRDFATVRKVLSMPQVNIVKKTEVQTGGFSKESILPKRNSDKLIARKKDWDPKKYGGFDSPTVAYSVLVVAKVEKGKSKKLKSVKELLGITIMERSSFEKNPIDFLEAKGYKEVKKDLIIKLPKYSLFELENGRKRMLASAGELQKGNELALPSKYVNFLYLASHYEKLKGSPEDNEQKQLFVEQHKHYLDEIIEQISEFSKRVILADANLDKVLSAYNKHRDKPIREQAENIIHLFTLTNLGAPAAFKYFDTTIDRKRYTSTKEVLDATLIHQSITGLYETRIDLSQLGGDGGGGGPAPGSSGGTLNIEDEYRLHETSKEPDVSLGSTWLSDFPQAWAETGGMGLAVRQAPLIIPLKATSTPVSIKQYPMSQEARLGIKPHIQRLLDQGILVPCQSPWNTPLLPVKKPGTNDYRPVQDLREVNKRVEDIHPTVPNPYNLLSGLPPSHQWYTVLDLKDAFFCLRLHPTSQPLFAFEWRDPEMGISGQLTWTRLPQGFKNSPTLFNEALHRDLAGFRIQHPDLILLQYVDDLLLAATSELDCQQGTRALLQTLGDLGYRASAKKAQICQKQVKYLGYLLKEGQRWLTEARKETVMGQPIPKTPRQLREFLGKAGFCRLFIPGFAEMAAPLYPLTKPGTLFNWGPDQQKAFQEIKQALLTAPALGLPDLTKPFELFVDEKQGYAKGVLTQKLGPWRRPVAYLSKKLDPVAAGWPPCLRMVAAIAVLTKDAGKLTMGQPLVILAPHAVEALVKQPPDRWLSNARMTHYQALLLDTDRVQFGPVVALNPATLLPLPEEGLQHDCLDILAEAHGTRSDLMDQPLPDADHTWYTDGSSFLQEGQRKAGAAVTTETEVIWARALPAGTSAQRAELIALTQALKMAEGKKLNVYTDSRYAFATAHIHGEIYRRRGWLTSEGKEIKNKDEILALLKALFLPKRLSIIHCPGHQKGNSAEARGNRMADQAAREVATRETPETSTLLAGKRTADGSEFEKRTADGSEFESPKKKAKVE

SEQ ID NO: 7373 - protein, 2094 aa, synthetic construct
MPAAKRVKLDGGDKKYSIGLDIGTNSVGWAVITDEYKVPSKKFKVLGNTDRHSIKKNLIGALLFDSGETAEATRLKRTARRRYTRRKNRICYLQEIFSNEMAKVDDSFFHRLEESFLVEEDKKHERHPIFGNIVDEVAYHEKYPTIYHLRKKLVDSTDKADLRLIYLALAHMIKFRGHFLIEGDLNPDNSDVDKLFIQLVQTYNQLFEENPINASGVDAKAILSARLSKSRRLENLIAQLPGEKKNGLFGNLIALSLGLTPNFKSNFDLAEDAKLQLSKDTYDDDLDNLLAQIGDQYADLFLAAKNLSDAILLSDILRVNTEITKAPLSASMIKRYDEHHQDLTLLKALVRQQLPEKYKEIFFDQSKNGYAGYIDGGASQEEFYKFIKPILEKMDGTEELLVKLNREDLLRKQRTFDNGSIPHQIHLGELHAILRRQEDFYPFLKDNREKIEKILTFRIPYYVGPLARGNSRFAWMTRKSEETITPWNFEEVVDKGASAQSFIERMTNFDKNLPNEKVLPKHSLLYEYFTVYNELTKVKYVTEGMRKPAFLSGEQKKAIVDLLFKTNRKVTVKQLKEDYFKKIECFDSVEISGVEDRFNASLGTYHDLLKIIKDKDFLDNEENEDILEDIVLTLTLFEDREMIEERLKTYAHLFDDKVMKQLKRRRYTGWGRLSRKLINGIRDKQSGKTILDFLKSDGFANRNFMQLIHDDSLTFKEDIQKAQVSGQGDSLHEHIANLAGSPAIKKGILQTVKVVDELVKVMGRHKPENIVIEMARENQTTQKGQKNSRERMKRIEEGIKELGSQILKEHPVENTQLQNEKLYLYYLQNGRDMYVDQELDINRLSDYDVDHIVPQSFLKDDSIDNKVLTRSDKARGKSDNVPSEEVVKKMKNYWRQLLNAKLITQRKFDNLTKAERGGLSELDKAGFIKRQLVETRQITKHVAQILDSRMNTKYDENDKLIREVKVITLKSKLVSDFRKDFQFYKVREINNYHHAHDAYLNAVVGTALIKKYPKLESEFVYGDYKVYDVRKMIAKSEQEIGKATAKYFFYSNIMNFFKTEITLANGEIRKRPLIETNGETGEIVWDKGRDFATVRKVLSMPQVNIVKKTEVQTGGFSKESILPKRNSDKLIARKKDWDPKKYGGFDSPTVAYSVLVVAKVEKGKSKKLKSVKELLGITIMERSSFEKNPIDFLEAKGYKEVKKDLIIKLPKYSLFELENGRKRMLASAGELQKGNELALPSKYVNFLYLASHYEKLKGSPEDNEQKQLFVEQHKHYLDEIIEQISEFSKRVILADANLDKVLSAYNKHRDKPIREQAENIIHLFTLTNLGAPAAFKYFDTTIDRKRYTSTKEVLDATLIHQSITGLYETRIDLSQLGGDGGGGGPAPGSSGGTLNIEDEYRLHETSKGPDVPLGSTWLSDFPQAWAETGGMGLAFRQAPLIISLKATSTPVSIKQYPMSQEARLGIKPHIQRLLDQGILVPCQSPWNTPLLPVKKPGTNDYRPVQDLREVNKRVEDIHPTVPNPYNLLSGLPPSHQWYTVLDLKDAFFCLRLHPTSQSLFAFEWKDPEMGISGQLTWTRLPQGFKNSPTLFNEALHRDLADFRIQHPDLILLQYVDDLLLAATSELDCQQGTRALLQTLGDLGYRASAKKAQICQKQVKYLGYLLKEGQRWLTEARKETVMGQPTPKTPRQLREFLGKAGLCRLFIPGFAEMAAPLYPLTKPGTLFKWGPDQQKAYQEIKQALLTAPALGLPDLTKPFELFVDEKQGYAKGVLTQKLGPWRRPVAYLSKKLDPVAAGWPPCLRMVAAIAVLTKDVGKLTMGQPLVILAPHAVEALVKQPPDRWLSNARMTHYQALLLDTDRVQFGPIVALNPATLLPLPEEGLQHDCLDILAEAHGTRPDLTDQPLPDADHTWYTDGSSFLQEGQRRAGAAVTTETEVIWAKALPAGTSAQRAELIALTQALKMAAGKKLNVYTDSRYAFATAHIHGEIYRRRGWLTSEGKEIKNKDEILALLKALFLPKRLSIIHCPGHQKGNHAEARGNRMADQAAREVATRETPETSTLLAGKRTADGSEFEKRTADGSEFESPKKKAKVE

SEQ ID NO: 7374 - protein, 2094 aa, synthetic construct
MPAAKRVKLDGGDKKYSIGLDIGTNSVGWAVITDEYKVPSKKFKVLGNTDRHSIKKNLIGALLFDSGETAEATRLKRTARRRYTRRKNRICYLQEIFSNEMAKVDDSFFHRLEESFLVEEDKKHERHPIFGNIVDEVAYHEKYPTIYHLRKKLVDSTDKADLRLIYLALAHMIKFRGHFLIEGDLNPDNSDVDKLFIQLVQTYNQLFEENPINASGVDAKAILSARLSKSRRLENLIAQLPGEKKNGLFGNLIALSLGLTPNFKSNFDLAEDAKLQLSKDTYDDDLDNLLAQIGDQYADLFLAAKNLSDAILLSDILRVNTEITKAPLSASMIKRYDEHHQDLTLLKALVRQQLPEKYKEIFFDQSKNGYAGYIDGGASQEEFYKFIKPILEKMDGTEELLVKLNREDLLRKQRTFDNGSIPHQIHLGELHAILRRQEDFYPFLKDNREKIEKILTFRIPYYVGPLARGNSRFAWMTRKSEETITPWNFEEVVDKGASAQSFIERMTNFDKNLPNEKVLPKHSLLYEYFTVYNELTKVKYVTEGMRKPAFLSGEQKKAIVDLLFKTNRKVTVKQLKEDYFKKIECFDSVEISGVEDRFNASLGTYHDLLKIIKDKDFLDNEENEDILEDIVLTLTLFEDREMIEERLKTYAHLFDDKVMKQLKRRRYTGWGRLSRKLINGIRDKQSGKTILDFLKSDGFANRNFMQLIHDDSLTFKEDIQKAQVSGQGDSLHEHIANLAGSPAIKKGILQTVKVVDELVKVMGRHKPENIVIEMARENQTTQKGQKNSRERMKRIEEGIKELGSQILKEHPVENTQLQNEKLYLYYLQNGRDMYVDQELDINRLSDYDVDHIVPQSFLKDDSIDNKVLTRSDKARGKSDNVPSEEVVKKMKNYWRQLLNAKLITQRKFDNLTKAERGGLSELDKAGFIKRQLVETRQITKHVAQILDSRMNTKYDENDKLIREVKVITLKSKLVSDFRKDFQFYKVREINNYHHAHDAYLNAVVGTALIKKYPKLESEFVYGDYKVYDVRKMIAKSEQEIGKATAKYFFYSNIMNFFKTEITLANGEIRKRPLIETNGETGEIVWDKGRDFATVRKVLSMPQVNIVKKTEVQTGGFSKESILPKRNSDKLIARKKDWDPKKYGGFDSPTVAYSVLVVAKVEKGKSKKLKSVKELLGITIMERSSFEKNPIDFLEAKGYKEVKKDLIIKLPKYSLFELENGRKRMLASAGELQKGNELALPSKYVNFLYLASHYEKLKGSPEDNEQKQLFVEQHKHYLDEIIEQISEFSKRVILADANLDKVLSAYNKHRDKPIREQAENIIHLFTLTNLGAPAAFKYFDTTIDRKRYTSTKEVLDATLIHQSITGLYETRIDLSQLGGDGGGGGPAPGSSGGTLNIEDEYRLHETSKGPDVPLGSTWLSDFPQAWAETGGMGLAVRQAPLIIPLKATSTPVSIKQYPMSQEARLGIKPHIQRLLDQGILVPCQSPWNTPLLPVKKPGTNDYRPVQDLREVNKRVEDIHPTVPNPYNLLSGLPPSHQWYTVLDLKDAFFCLRLHPTSQSLFAFEWRDPEMGISGQLTWTRLPQGFKNSPTLFNEALHRDLADFRIQHPDLILLQYVDDLLLAATSELDCQQGTRALLQTLGDLGYRASAKKAQICQKQVKYLGYLLKEGQRWLTEARKETVMGQPTPKTPRQLREFLGTAGFCRLWIPGFAEMAAPLYPLTKPGTLFEWGPDQQKAYQEIKQALLTAPALGLPDLTKPFELFVDEKQGYAKGVLTQKLGPWRRPVAYLSKKLDPVAAGWPPCLRMVAAIAVLTKDAGKLTMGQPLVILAPHAVEALVKQPPDRWLSNARMTHYQALLLDTDRVQFGPIVALNPATLLPLPEEGLQHDCLDILAEAHGTRPDLTDQPLPDADHTWYTDGSSFLQEGQRKAGAAVTTETEVVWAKALPAGTSAQRAELIALTQALKMAEGKKLNVYTDSRYAFATAHIHGEIYRRRGWLTSEGKEIKNKDEILALLKALFLPKRLSIIHCPGHQKGNRAEARGNRMADQAAREVATRETPETSTLLAGKRTADGSEFEKRTADGSEFESPKKKAKVE

SEQ ID NO: 7375 - protein, 2094 aa, synthetic construct
MPAAKRVKLDGGDKKYSIGLDIGTNSVGWAVITDEYKVPSKKFKVLGNTDRHSIKKNLIGALLFDSGETAEATRLKRTARRRYTRRKNRICYLQEIFSNEMAKVDDSFFHRLEESFLVEEDKKHERHPIFGNIVDEVAYHEKYPTIYHLRKKLVDSTDKADLRLIYLALAHMIKFRGHFLIEGDLNPDNSDVDKLFIQLVQTYNQLFEENPINASGVDAKAILSARLSKSRRLENLIAQLPGEKKNGLFGNLIALSLGLTPNFKSNFDLAEDAKLQLSKDTYDDDLDNLLAQIGDQYADLFLAAKNLSDAILLSDILRVNTEITKAPLSASMIKRYDEHHQDLTLLKALVRQQLPEKYKEIFFDQSKNGYAGYIDGGASQEEFYKFIKPILEKMDGTEELLVKLNREDLLRKQRTFDNGSIPHQIHLGELHAILRRQEDFYPFLKDNREKIEKILTFRIPYYVGPLARGNSRFAWMTRKSEETITPWNFEEVVDKGASAQSFIERMTNFDKNLPNEKVLPKHSLLYEYFTVYNELTKVKYVTEGMRKPAFLSGEQKKAIVDLLFKTNRKVTVKQLKEDYFKKIECFDSVEISGVEDRFNASLGTYHDLLKIIKDKDFLDNEENEDILEDIVLTLTLFEDREMIEERLKTYAHLFDDKVMKQLKRRRYTGWGRLSRKLINGIRDKQSGKTILDFLKSDGFANRNFMQLIHDDSLTFKEDIQKAQVSGQGDSLHEHIANLAGSPAIKKGILQTVKVVDELVKVMGRHKPENIVIEMARENQTTQKGQKNSRERMKRIEEGIKELGSQILKEHPVENTQLQNEKLYLYYLQNGRDMYVDQELDINRLSDYDVDHIVPQSFLKDDSIDNKVLTRSDKARGKSDNVPSEEVVKKMKNYWRQLLNAKLITQRKFDNLTKAERGGLSELDKAGFIKRQLVETRQITKHVAQILDSRMNTKYDENDKLIREVKVITLKSKLVSDFRKDFQFYKVREINNYHHAHDAYLNAVVGTALIKKYPKLESEFVYGDYKVYDVRKMIAKSEQEIGKATAKYFFYSNIMNFFKTEITLANGEIRKRPLIETNGETGEIVWDKGRDFATVRKVLSMPQVNIVKKTEVQTGGFSKESILPKRNSDKLIARKKDWDPKKYGGFDSPTVAYSVLVVAKVEKGKSKKLKSVKELLGITIMERSSFEKNPIDFLEAKGYKEVKKDLIIKLPKYSLFELENGRKRMLASAGELQKGNELALPSKYVNFLYLASHYEKLKGSPEDNEQKQLFVEQHKHYLDEIIEQISEFSKRVILADANLDKVLSAYNKHRDKPIREQAENIIHLFTLTNLGAPAAFKYFDTTIDRKRYTSTKEVLDATLIHQSITGLYETRIDLSQLGGDGGGGGPAPGSSGGTLNIEDEYRLHEISTEPDVSPGSTWLSDFPQAWAETGGMGLAVRQAPLIIPLKATSTPVSIKQYPMSQEAKLGIKPHIQRLLDQGILVPCQSPWNTPLLPVKKPGTNDYRPVQGLREVNKRVEDIHPTVPNPYNLLSGLPTSHRWYTVLDLKDAFFCLRLHPTSQPLFASEWRDPGMGISGQLTWTRLPQGFKNSPTLFDEALHRGLADFRIQHPDLILLQYVDDLLLAATSELDCQQGTRALLKTLGNLGYRASAKKAQICQKQVKYLGYLLREGQRWLTEARKETVMGQPTPKTPRQLREFLGTAGFCRLWIPRFAEMAAPLYPLTKTGTLFNWGPDQQKAYHEIKQALLTAPALGLPDLTKPFELFVDEKQGYAKGVLTQKLGPWRRPVAYLSKKLDPVAAGWPPCLRMVAAIAVLTKDAGKLTMGQPLVILAPHAVEALVKQPPDRWLSNARMTHYQAMLLDTDRVQFGPVVALNPATLLPLPEEGAPHDCLEILAETHGTEPDLTDQPIPDADHTWYTDGSSFLQEGQRKAGAAVTTETEVIWARALPAGTSAQRAELIALTQALKMAEGKRLNVYTDSRYAFATAHIHGEIYKRRGLLTSEGREIKNKSEILALLKALFLPKRLSIIHCLGHQKGDSAEARGNRLADQAAREAAIKTPPDTSTLLAGKRTADGSEFEKRTADGSEFESPKKKAKVE

SEQ ID NO: 7376 - protein, 2114 aa, synthetic construct
MPAAKRVKLDGGDKKYSIGLDIGTNSVGWAVITDEYKVPSKKFKVLGNTDRHSIKKNLIGALLFDSGETAEATRLKRTARRRYTRRKNRICYLQEIFSNEMAKVDDSFFHRLEESFLVEEDKKHERHPIFGNIVDEVAYHEKYPTIYHLRKKLVDSTDKADLRLIYLALAHMIKFRGHFLIEGDLNPDNSDVDKLFIQLVQTYNQLFEENPINASGVDAKAILSARLSKSRRLENLIAQLPGEKKNGLFGNLIALSLGLTPNFKSNFDLAEDAKLQLSKDTYDDDLDNLLAQIGDQYADLFLAAKNLSDAILLSDILRVNTEITKAPLSASMIKRYDEHHQDLTLLKALVRQQLPEKYKEIFFDQSKNGYAGYIDGGASQEEFYKFIKPILEKMDGTEELLVKLNREDLLRKQRTFDNGSIPHQIHLGELHAILRRQEDFYPFLKDNREKIEKILTFRIPYYVGPLARGNSRFAWMTRKSEETITPWNFEEVVDKGASAQSFIERMTNFDKNLPNEKVLPKHSLLYEYFTVYNELTKVKYVTEGMRKPAFLSGEQKKAIVDLLFKTNRKVTVKQLKEDYFKKIECFDSVEISGVEDRFNASLGTYHDLLKIIKDKDFLDNEENEDILEDIVLTLTLFEDREMIEERLKTYAHLFDDKVMKQLKRRRYTGWGRLSRKLINGIRDKQSGKTILDFLKSDGFANRNFMQLIHDDSLTFKEDIQKAQVSGQGDSLHEHIANLAGSPAIKKGILQTVKVVDELVKVMGRHKPENIVIEMARENQTTQKGQKNSRERMKRIEEGIKELGSQILKEHPVENTQLQNEKLYLYYLQNGRDMYVDQELDINRLSDYDVDHIVPQSFLKDDSIDNKVLTRSDKARGKSDNVPSEEVVKKMKNYWRQLLNAKLITQRKFDNLTKAERGGLSELDKAGFIKRQLVETRQITKHVAQILDSRMNTKYDENDKLIREVKVITLKSKLVSDFRKDFQFYKVREINNYHHAHDAYLNAVVGTALIKKYPKLESEFVYGDYKVYDVRKMIAKSEQEIGKATAKYFFYSNIMNFFKTEITLANGEIRKRPLIETNGETGEIVWDKGRDFATVRKVLSMPQVNIVKKTEVQTGGFSKESILPKRNSDKLIARKKDWDPKKYGGFDSPTVAYSVLVVAKVEKGKSKKLKSVKELLGITIMERSSFEKNPIDFLEAKGYKEVKKDLIIKLPKYSLFELENGRKRMLASAGELQKGNELALPSKYVNFLYLASHYEKLKGSPEDNEQKQLFVEQHKHYLDEIIEQISEFSKRVILADANLDKVLSAYNKHRDKPIREQAENIIHLFTLTNLGAPAAFKYFDTTIDRKRYTSTKEVLDATLIHQSITGLYETRIDLSQLGGDGGGGGPAPGSSGGWVQEISDSRPMLHIYLNGRRFLGLLNTGADKTCIAGRDWPANWPIHQTESSLQGLGMACGVARSSQPLRWQHEDKSGIIHPFVIPTLPFTLWGRDIMKDIKVRLMTDSPDDSQDLMIGAIESNLFADQISWKSDQPVWLNQWPLKQEKLQALQQLVTEQLQLGHLEESNSPWNTPVFVIKKKSGKWRLLQDLRAVNATMHDMGALQPGLPSPVAPPKGWEIIIIDLQDCFFNIKLHPEDCKRFAFSVPSPNFKRPYQRFQWKVLPQGMKNSPTLCQKFVDKAILTVRDKYQDSYIVHYMDDILLAHPSRSIVDEILTSMIQALNKHGLVVSTEKIQKYDNLKYLGTHIQGDSVSYQKLQIRTDKLRTLNDFQKLLGNINWIRPFLKLTTGELKPLFEILNPDSNPISTRKLTPEACKALQLMNERLSTARVKRLDLSQPWSLCILKTEYTPTACLWQDGVVEWIHLPHISPKVITPYDIFCTQLIIKGRHRSKELFSKDPDYIVVPYTKVQFDLLLQEKEDWPISLLGFLGEVHFHLPKDPLLTFTLQTAIIFPHMTSTTPLEKGIVIFTDGSANGRSVTYIQGREPIIKENTQNTAQQAEIVAVITAFEEVSQPFNLYTDSKYVTGLFPEIETATLSPRTKIYTELKHLQRLIHKRQEKFYIGHIRGHTGLPGPLAQGNAYADSLTRILTAGKRTADGSEFEKRTADGSEFESPKKKAKVE

SEQ ID NO: 7377 - protein, 2085 aa, synthetic construct
MPAAKRVKLDGGDKKYSIGLDIGTNSVGWAVITDEYKVPSKKFKVLGNTDRHSIKKNLIGALLFDSGETAEATRLKRTARRRYTRRKNRICYLQEIFSNEMAKVDDSFFHRLEESFLVEEDKKHERHPIFGNIVDEVAYHEKYPTIYHLRKKLVDSTDKADLRLIYLALAHMIKFRGHFLIEGDLNPDNSDVDKLFIQLVQTYNQLFEENPINASGVDAKAILSARLSKSRRLENLIAQLPGEKKNGLFGNLIALSLGLTPNFKSNFDLAEDAKLQLSKDTYDDDLDNLLAQIGDQYADLFLAAKNLSDAILLSDILRVNTEITKAPLSASMIKRYDEHHQDLTLLKALVRQQLPEKYKEIFFDQSKNGYAGYIDGGASQEEFYKFIKPILEKMDGTEELLVKLNREDLLRKQRTFDNGSIPHQIHLGELHAILRRQEDFYPFLKDNREKIEKILTFRIPYYVGPLARGNSRFAWMTRKSEETITPWNFEEVVDKGASAQSFIERMTNFDKNLPNEKVLPKHSLLYEYFTVYNELTKVKYVTEGMRKPAFLSGEQKKAIVDLLFKTNRKVTVKQLKEDYFKKIECFDSVEISGVEDRFNASLGTYHDLLKIIKDKDFLDNEENEDILEDIVLTLTLFEDREMIEERLKTYAHLFDDKVMKQLKRRRYTGWGRLSRKLINGIRDKQSGKTILDFLKSDGFANRNFMQLIHDDSLTFKEDIQKAQVSGQGDSLHEHIANLAGSPAIKKGILQTVKVVDELVKVMGRHKPENIVIEMARENQTTQKGQKNSRERMKRIEEGIKELGSQILKEHPVENTQLQNEKLYLYYLQNGRDMYVDQELDINRLSDYDVDHIVPQSFLKDDSIDNKVLTRSDKARGKSDNVPSEEVVKKMKNYWRQLLNAKLITQRKFDNLTKAERGGLSELDKAGFIKRQLVETRQITKHVAQILDSRMNTKYDENDKLIREVKVITLKSKLVSDFRKDFQFYKVREINNYHHAHDAYLNAVVGTALIKKYPKLESEFVYGDYKVYDVRKMIAKSEQEIGKATAKYFFYSNIMNFFKTEITLANGEIRKRPLIETNGETGEIVWDKGRDFATVRKVLSMPQVNIVKKTEVQTGGFSKESILPKRNSDKLIARKKDWDPKKYGGFDSPTVAYSVLVVAKVEKGKSKKLKSVKELLGITIMERSSFEKNPIDFLEAKGYKEVKKDLIIKLPKYSLFELENGRKRMLASAGELQKGNELALPSKYVNFLYLASHYEKLKGSPEDNEQKQLFVEQHKHYLDEIIEQISEFSKRVILADANLDKVLSAYNKHRDKPIREQAENIIHLFTLTNLGAPAAFKYFDTTIDRKRYTSTKEVLDATLIHQSITGLYETRIDLSQLGGDGGGGGPAPGSSGGIPWLMKKPLQLTTLVPLQEYEERLLKQTMLTGSYKEKLQSLFLKYDALWQHWENQVGHRRIKPHHIATGTVNPRPQKQYPINPKAKASIQTVINDLLKQGVLIQQNSIMNTPVYPVPKPDGKWRMVLDYREVNKTIPLIAAQNQHSAGILSSIFRGKYKTTLDLSNGFWAHSITPESYWLTAFTWLGQQYCWTRLPQGFLNSPALFNADVVDLLKEVPNVQVYVDDIYISHDDPREHLEQLEKVFSLLLNAGYVVSLKKSEIAQHEVEFLGFNITKEGRGLTETFKQKLLNITPPRDLKQLQSILGLLNFARNFIPNFSELVKPLYNIIATAPGKYITWTTDNSQQLQNIISMLNSAENLEERNPEVRLIMKVNTSPSAGYIRFYNEFAKRPIMYLNYVYTKAEVKFTNTEKLLTTIHKGLIKALDLGMGQEILVYSPIVSMTKIQKTPLPERKALPIRWITWMSYLEDPRIQFHYDKTLPELQQVPTVTDDIIAKIKHPSEFSMVFYTDGSAIKHPNVNKSHNAGMGIAQVQFKPEFTVINTWSIPLGDHTAQLAEVAAVEFACKKALKIDGPVLIVTDSFYVAESVNKELPYWQSNGFFNNKKKPLKHVSKWKSIADCIQLKPDIIIIHEKGHQPTASTFHTEGNNLADKLATQGSYVVNAGKRTADGSEFEKRTADGSEFESPKKKAKVE

SEQ ID NO: 7378 - protein, 2092 aa, synthetic construct
MPAAKRVKLDGGDKKYSIGLDIGTNSVGWAVITDEYKVPSKKFKVLGNTDRHSIKKNLIGALLFDSGETAEATRLKRTARRRYTRRKNRICYLQEIFSNEMAKVDDSFFHRLEESFLVEEDKKHERHPIFGNIVDEVAYHEKYPTIYHLRKKLVDSTDKADLRLIYLALAHMIKFRGHFLIEGDLNPDNSDVDKLFIQLVQTYNQLFEENPINASGVDAKAILSARLSKSRRLENLIAQLPGEKKNGLFGNLIALSLGLTPNFKSNFDLAEDAKLQLSKDTYDDDLDNLLAQIGDQYADLFLAAKNLSDAILLSDILRVNTEITKAPLSASMIKRYDEHHQDLTLLKALVRQQLPEKYKEIFFDQSKNGYAGYIDGGASQEEFYKFIKPILEKMDGTEELLVKLNREDLLRKQRTFDNGSIPHQIHLGELHAILRRQEDFYPFLKDNREKIEKILTFRIPYYVGPLARGNSRFAWMTRKSEETITPWNFEEVVDKGASAQSFIERMTNFDKNLPNEKVLPKHSLLYEYFTVYNELTKVKYVTEGMRKPAFLSGEQKKAIVDLLFKTNRKVTVKQLKEDYFKKIECFDSVEISGVEDRFNASLGTYHDLLKIIKDKDFLDNEENEDILEDIVLTLTLFEDREMIEERLKTYAHLFDDKVMKQLKRRRYTGWGRLSRKLINGIRDKQSGKTILDFLKSDGFANRNFMQLIHDDSLTFKEDIQKAQVSGQGDSLHEHIANLAGSPAIKKGILQTVKVVDELVKVMGRHKPENIVIEMARENQTTQKGQKNSRERMKRIEEGIKELGSQILKEHPVENTQLQNEKLYLYYLQNGRDMYVDQELDINRLSDYDVDHIVPQSFLKDDSIDNKVLTRSDKARGKSDNVPSEEVVKKMKNYWRQLLNAKLITQRKFDNLTKAERGGLSELDKAGFIKRQLVETRQITKHVAQILDSRMNTKYDENDKLIREVKVITLKSKLVSDFRKDFQFYKVREINNYHHAHDAYLNAVVGTALIKKYPKLESEFVYGDYKVYDVRKMIAKSEQEIGKATAKYFFYSNIMNFFKTEITLANGEIRKRPLIETNGETGEIVWDKGRDFATVRKVLSMPQVNIVKKTEVQTGGFSKESILPKRNSDKLIARKKDWDPKKYGGFDSPTVAYSVLVVAKVEKGKSKKLKSVKELLGITIMERSSFEKNPIDFLEAKGYKEVKKDLIIKLPKYSLFELENGRKRMLASAGELQKGNELALPSKYVNFLYLASHYEKLKGSPEDNEQKQLFVEQHKHYLDEIIEQISEFSKRVILADANLDKVLSAYNKHRDKPIREQAENIIHLFTLTNLGAPAAFKYFDTTIDRKRYTSTKEVLDATLIHQSITGLYETRIDLSQLGGDGGGGGPAPGSSGGVLNLEEEYRLHEKPVPSSIDPSWLQLFPTVWAERAGMGLANQVPPVVVELRSGASPVAVRQYPMSKEAREGIRPHIQRFLDLGVLVPCQSPWNTPLLPVKKPGTNDYRPVQDLREINKRVQDIHPTVPNPYNLLSSLPPSHTWYSVLDLKDAFFCLKLHPNSQPLFAFEWRDPEKGNTGQLTWTRLPQGFKNSPTLFNEALHRDLAPFRALNPQVVLLQYVDDLLVAAPTYRDCKEGTQKLLQELSKLGYRVSAKKAQLCQKEVTYLGYLLKEGKRWLTPARKATVMKIPPPTTPRQVREFLGTAGFCRLWIPGFASLAAPLYPLTKPSIPFIWTEEHQKAFDRIKEALLSAPALALPDLTKPFTLYVDERAGVARGVLTQTLGPWRRPVAYLSKKLDPVASGWPTCLKAVAAVALLLKDADKLTLGQNVTVIASHSLESIVRQPPDRWMTNARMTHYQSLLLNERVSFAPPAVLNPATLLPVESEATPVHRCSEILAEETGTRRDLKDQPLPGVPAWYTDGSSFIAEGKRRAGAAIVDGKRTVWASSLPEGTSAQKAELVALTQALRLAEGKDINIYTDSRYAFATAHIHGAIYKQRGWLTSAGKDIKNKEEILALLEAIHLPKRVAIIHCPGHQKGNDPVATGNRRADEAAKQAALSTRVLAETTKPAGKRTADGSEFEKRTADGSEFESPKKKAKVE

SEQ ID NO: 7379 - protein, 2096 aa, synthetic construct
MPAAKRVKLDGGDKKYSIGLDIGTNSVGWAVITDEYKVPSKKFKVLGNTDRHSIKKNLIGALLFDSGETAEATRLKRTARRRYTRRKNRICYLQEIFSNEMAKVDDSFFHRLEESFLVEEDKKHERHPIFGNIVDEVAYHEKYPTIYHLRKKLVDSTDKADLRLIYLALAHMIKFRGHFLIEGDLNPDNSDVDKLFIQLVQTYNQLFEENPINASGVDAKAILSARLSKSRRLENLIAQLPGEKKNGLFGNLIALSLGLTPNFKSNFDLAEDAKLQLSKDTYDDDLDNLLAQIGDQYADLFLAAKNLSDAILLSDILRVNTEITKAPLSASMIKRYDEHHQDLTLLKALVRQQLPEKYKEIFFDQSKNGYAGYIDGGASQEEFYKFIKPILEKMDGTEELLVKLNREDLLRKQRTFDNGSIPHQIHLGELHAILRRQEDFYPFLKDNREKIEKILTFRIPYYVGPLARGNSRFAWMTRKSEETITPWNFEEVVDKGASAQSFIERMTNFDKNLPNEKVLPKHSLLYEYFTVYNELTKVKYVTEGMRKPAFLSGEQKKAIVDLLFKTNRKVTVKQLKEDYFKKIECFDSVEISGVEDRFNASLGTYHDLLKIIKDKDFLDNEENEDILEDIVLTLTLFEDREMIEERLKTYAHLFDDKVMKQLKRRRYTGWGRLSRKLINGIRDKQSGKTILDFLKSDGFANRNFMQLIHDDSLTFKEDIQKAQVSGQGDSLHEHIANLAGSPAIKKGILQTVKVVDELVKVMGRHKPENIVIEMARENQTTQKGQKNSRERMKRIEEGIKELGSQILKEHPVENTQLQNEKLYLYYLQNGRDMYVDQELDINRLSDYDVDHIVPQSFLKDDSIDNKVLTRSDKARGKSDNVPSEEVVKKMKNYWRQLLNAKLITQRKFDNLTKAERGGLSELDKAGFIKRQLVETRQITKHVAQILDSRMNTKYDENDKLIREVKVITLKSKLVSDFRKDFQFYKVREINNYHHAHDAYLNAVVGTALIKKYPKLESEFVYGDYKVYDVRKMIAKSEQEIGKATAKYFFYSNIMNFFKTEITLANGEIRKRPLIETNGETGEIVWDKGRDFATVRKVLSMPQVNIVKKTEVQTGGFSKESILPKRNSDKLIARKKDWDPKKYGGFDSPTVAYSVLVVAKVEKGKSKKLKSVKELLGITIMERSSFEKNPIDFLEAKGYKEVKKDLIIKLPKYSLFELENGRKRMLASAGELQKGNELALPSKYVNFLYLASHYEKLKGSPEDNEQKQLFVEQHKHYLDEIIEQISEFSKRVILADANLDKVLSAYNKHRDKPIREQAENIIHLFTLTNLGAPAAFKYFDTTIDRKRYTSTKEVLDATLIHQSITGLYETRIDLSQLGGDGGGSSGGGPAPGGTAPLEEEYRLFLEAPIQNVTLLEQWKREIPKVWAEINPPGLASTQAPIHVQLLSTALPVRVRQYPITLEAKRSLRETIRKFRAAGILRPVHSPWNTPLLPVRKSGTSEYRMVQDLREVNKRVETIHPTVPNPYTLLSLLPPDRIWYSVLDLKDAFFCIPLAPESQLIFAFEWADAEEGESGQLTWTRLPQGFKNSPTLFDEALNRDLQGFRLDHPSVSLLQYVDDLLIAADTQAACLSATRDLLMTLAELGYRVSGKKAQLCQEEVTYLGFKIHKGSRSLSNSRTQAILQIPVPKTKRQVREFLGTIGYCRLWIPGFAELAQPLYAATRGGNDPLVWGEKEEEAFQSLKLALTQPPALALPSLDKPFQLFVEETSGAAKGVLTQALGPWKRPVAYLSKRLDPVAAGWPRCLRAIAAAALLTREASKLTFGQDIEITSSHNLESLLRSPPDKWLTNARITQYQVLLLDPPRVRFKQTAALNPATLLPETDDTLPIHHCLDTLDSLTSTRPDLTDQPLAQAEATLFTDGSSYIRDGKRYAGAAVVTLDSVIWAEPLPIGTSAQKAELIALTKALEWSKDKSVNIYTDSRYAFATLHVHGMIYRERGLLTAGGKAIKNAPEILALLTAVWLPKRVAVMHCKGHQKDDAPTSTGNRRADEVAREVAIRPLSTQATISAGKRTADGSEFEKRTADGSEFESPKKKAKVE

SEQ ID NO: 7380 - protein, 2096 aa, synthetic construct
MPAAKRVKLDGGDKKYSIGLDIGTNSVGWAVITDEYKVPSKKFKVLGNTDRHSIKKNLIGALLFDSGETAEATRLKRTARRRYTRRKNRICYLQEIFSNEMAKVDDSFFHRLEESFLVEEDKKHERHPIFGNIVDEVAYHEKYPTIYHLRKKLVDSTDKADLRLIYLALAHMIKFRGHFLIEGDLNPDNSDVDKLFIQLVQTYNQLFEENPINASGVDAKAILSARLSKSRRLENLIAQLPGEKKNGLFGNLIALSLGLTPNFKSNFDLAEDAKLQLSKDTYDDDLDNLLAQIGDQYADLFLAAKNLSDAILLSDILRVNTEITKAPLSASMIKRYDEHHQDLTLLKALVRQQLPEKYKEIFFDQSKNGYAGYIDGGASQEEFYKFIKPILEKMDGTEELLVKLNREDLLRKQRTFDNGSIPHQIHLGELHAILRRQEDFYPFLKDNREKIEKILTFRIPYYVGPLARGNSRFAWMTRKSEETITPWNFEEVVDKGASAQSFIERMTNFDKNLPNEKVLPKHSLLYEYFTVYNELTKVKYVTEGMRKPAFLSGEQKKAIVDLLFKTNRKVTVKQLKEDYFKKIECFDSVEISGVEDRFNASLGTYHDLLKIIKDKDFLDNEENEDILEDIVLTLTLFEDREMIEERLKTYAHLFDDKVMKQLKRRRYTGWGRLSRKLINGIRDKQSGKTILDFLKSDGFANRNFMQLIHDDSLTFKEDIQKAQVSGQGDSLHEHIANLAGSPAIKKGILQTVKVVDELVKVMGRHKPENIVIEMARENQTTQKGQKNSRERMKRIEEGIKELGSQILKEHPVENTQLQNEKLYLYYLQNGRDMYVDQELDINRLSDYDVDHIVPQSFLKDDSIDNKVLTRSDKARGKSDNVPSEEVVKKMKNYWRQLLNAKLITQRKFDNLTKAERGGLSELDKAGFIKRQLVETRQITKHVAQILDSRMNTKYDENDKLIREVKVITLKSKLVSDFRKDFQFYKVREINNYHHAHDAYLNAVVGTALIKKYPKLESEFVYGDYKVYDVRKMIAKSEQEIGKATAKYFFYSNIMNFFKTEITLANGEIRKRPLIETNGETGEIVWDKGRDFATVRKVLSMPQVNIVKKTEVQTGGFSKESILPKRNSDKLIARKKDWDPKKYGGFDSPTVAYSVLVVAKVEKGKSKKLKSVKELLGITIMERSSFEKNPIDFLEAKGYKEVKKDLIIKLPKYSLFELENGRKRMLASAGELQKGNELALPSKYVNFLYLASHYEKLKGSPEDNEQKQLFVEQHKHYLDEIIEQISEFSKRVILADANLDKVLSAYNKHRDKPIREQAENIIHLFTLTNLGAPAAFKYFDTTIDRKRYTSTKEVLDATLIHQSITGLYETRIDLSQLGGDGGGSSGGGPAPGGTAPLEEEYRLFLEAPIQNVTLLEQWKREIPKVWAEINPPGLASTQAPIHVQLLSTALPVRVRQYPITLEAKRSLRETIRKFRAAGILRPVHSPWNTPLLPVRKSGTSEYRMVQDLREVNKRVETIHPTVPNPYTLLSLLPPDRIWYSVLDLKDAFFCIPLAPESQLIFAFEWADAEEGESGQLTWTRLPQGFKNSPTLFNEALNRDLQGFRLDHPSVSLLQYVDDLLIAADTQAACLSATRDLLMTLAELGYRVSGKKAQLCQEEVTYLGFKIHKGSRSLSNSRTQAILQIPVPKTKRQVREFLGTIGYCRLWIPGFAELAQPLYAATRPGNDPLVWGEKEEEAFQSLKLALTQPPALALPSLDKPFQLFVEETSGAAKGVLTQALGPWKRPVAYLSKRLDPVAAGWPRCLRAIAAAALLTREASKLTFGQDIEITSSHNLESLLRSPPDKWLTNARITQYQVLLLDPPRVRFKQTAALNPATLLPETDDTLPIHHCLDTLDSLTSTRPDLTDQPLAQAEATLFTDGSSYIRDGKRYAGAAVVTLDSVIWAEPLPIGTSAQKAELIALTKALEWSKDKSVNIYTDSRYAFATLHVHGMIYRERGWLTAGGKAIKNAPEILALLTAVWLPKRVAVMHCKGHQKDDAPTSTGNRRADEVAREVAIRPLSTQATISAGKRTADGSEFEKRTADGSEFESPKKKAKVE

SEQ ID NO: 7381 - protein, 2096 aa, synthetic construct
MPAAKRVKLDGGDKKYSIGLDIGTNSVGWAVITDEYKVPSKKFKVLGNTDRHSIKKNLIGALLFDSGETAEATRLKRTARRRYTRRKNRICYLQEIFSNEMAKVDDSFFHRLEESFLVEEDKKHERHPIFGNIVDEVAYHEKYPTIYHLRKKLVDSTDKADLRLIYLALAHMIKFRGHFLIEGDLNPDNSDVDKLFIQLVQTYNQLFEENPINASGVDAKAILSARLSKSRRLENLIAQLPGEKKNGLFGNLIALSLGLTPNFKSNFDLAEDAKLQLSKDTYDDDLDNLLAQIGDQYADLFLAAKNLSDAILLSDILRVNTEITKAPLSASMIKRYDEHHQDLTLLKALVRQQLPEKYKEIFFDQSKNGYAGYIDGGASQEEFYKFIKPILEKMDGTEELLVKLNREDLLRKQRTFDNGSIPHQIHLGELHAILRRQEDFYPFLKDNREKIEKILTFRIPYYVGPLARGNSRFAWMTRKSEETITPWNFEEVVDKGASAQSFIERMTNFDKNLPNEKVLPKHSLLYEYFTVYNELTKVKYVTEGMRKPAFLSGEQKKAIVDLLFKTNRKVTVKQLKEDYFKKIECFDSVEISGVEDRFNASLGTYHDLLKIIKDKDFLDNEENEDILEDIVLTLTLFEDREMIEERLKTYAHLFDDKVMKQLKRRRYTGWGRLSRKLINGIRDKQSGKTILDFLKSDGFANRNFMQLIHDDSLTFKEDIQKAQVSGQGDSLHEHIANLAGSPAIKKGILQTVKVVDELVKVMGRHKPENIVIEMARENQTTQKGQKNSRERMKRIEEGIKELGSQILKEHPVENTQLQNEKLYLYYLQNGRDMYVDQELDINRLSDYDVDHIVPQSFLKDDSIDNKVLTRSDKARGKSDNVPSEEVVKKMKNYWRQLLNAKLITQRKFDNLTKAERGGLSELDKAGFIKRQLVETRQITKHVAQILDSRMNTKYDENDKLIREVKVITLKSKLVSDFRKDFQFYKVREINNYHHAHDAYLNAVVGTALIKKYPKLESEFVYGDYKVYDVRKMIAKSEQEIGKATAKYFFYSNIMNFFKTEITLANGEIRKRPLIETNGETGEIVWDKGRDFATVRKVLSMPQVNIVKKTEVQTGGFSKESILPKRNSDKLIARKKDWDPKKYGGFDSPTVAYSVLVVAKVEKGKSKKLKSVKELLGITIMERSSFEKNPIDFLEAKGYKEVKKDLIIKLPKYSLFELENGRKRMLASAGELQKGNELALPSKYVNFLYLASHYEKLKGSPEDNEQKQLFVEQHKHYLDEIIEQISEFSKRVILADANLDKVLSAYNKHRDKPIREQAENIIHLFTLTNLGAPAAFKYFDTTIDRKRYTSTKEVLDATLIHQSITGLYETRIDLSQLGGDGGGSSGGGPAPGGTAPLEEEYRLFLEAPIQNVTLLEQWKREIPKVWAEINPPGLASTQAPIHVQLLSTALPVRVRQYPITLEAKRSLRETIRKFRAAGILRPVHSPWNTPLLPVRKSGTSEYRMVQDLREVNKRVETIHPTVPNPYTLLSLLPPDRIWYSVLDLKDAFFCIPLAPESQLIFAFEWADAEEGESGQLTWTRLPQGFKNSPTLFNEALNRDLQGFRLDHPSVSLLQYVDDLLIAADTQAACLSATRDLLMTLAELGYRVSGKKAQLCQEEVTYLGFKIHKGSRSLSNSRTQAILQIPVPKTKRQVREFLGKIGYCRLFIPGFAELAQPLYAATRPGNDPLVWGEKEEEAFQSLKLALTQPPALALPSLDKPFQLFVEETSGAAKGVLTQALGPWKRPVAYLSKRLDPVAAGWPRCLRAIAAAALLTREASKLTFGQDIEITSSHNLESLLRSPPDKWLTNARITQYQVLLLDPPRVRFKQTAALNPATLLPETDDTLPIHHCLDTLDSLTSTRPDLTDQPLAQAEATLFTDGSSYIRDGKRYAGAAVVTLDSVIWAEPLPIGTSAQKAELIALTKALEWSKDKSVNIYTDSRYAFATLHVHGMIYRERGWLTAGGKAIKNAPEILALLTAVWLPKRVAVMHCKGHQKDDAPTSTGNRRADEVAREVAIRPLSTQATISAGKRTADGSEFEKRTADGSEFESPKKKAKVE

SEQ ID NO: 7382 - protein, 2100 aa, synthetic construct
MPAAKRVKLDGGDKKYSIGLDIGTNSVGWAVITDEYKVPSKKFKVLGNTDRHSIKKNLIGALLFDSGETAEATRLKRTARRRYTRRKNRICYLQEIFSNEMAKVDDSFFHRLEESFLVEEDKKHERHPIFGNIVDEVAYHEKYPTIYHLRKKLVDSTDKADLRLIYLALAHMIKFRGHFLIEGDLNPDNSDVDKLFIQLVQTYNQLFEENPINASGVDAKAILSARLSKSRRLENLIAQLPGEKKNGLFGNLIALSLGLTPNFKSNFDLAEDAKLQLSKDTYDDDLDNLLAQIGDQYADLFLAAKNLSDAILLSDILRVNTEITKAPLSASMIKRYDEHHQDLTLLKALVRQQLPEKYKEIFFDQSKNGYAGYIDGGASQEEFYKFIKPILEKMDGTEELLVKLNREDLLRKQRTFDNGSIPHQIHLGELHAILRRQEDFYPFLKDNREKIEKILTFRIPYYVGPLARGNSRFAWMTRKSEETITPWNFEEVVDKGASAQSFIERMTNFDKNLPNEKVLPKHSLLYEYFTVYNELTKVKYVTEGMRKPAFLSGEQKKAIVDLLFKTNRKVTVKQLKEDYFKKIECFDSVEISGVEDRFNASLGTYHDLLKIIKDKDFLDNEENEDILEDIVLTLTLFEDREMIEERLKTYAHLFDDKVMKQLKRRRYTGWGRLSRKLINGIRDKQSGKTILDFLKSDGFANRNFMQLIHDDSLTFKEDIQKAQVSGQGDSLHEHIANLAGSPAIKKGILQTVKVVDELVKVMGRHKPENIVIEMARENQTTQKGQKNSRERMKRIEEGIKELGSQILKEHPVENTQLQNEKLYLYYLQNGRDMYVDQELDINRLSDYDVDHIVPQSFLKDDSIDNKVLTRSDKARGKSDNVPSEEVVKKMKNYWRQLLNAKLITQRKFDNLTKAERGGLSELDKAGFIKRQLVETRQITKHVAQILDSRMNTKYDENDKLIREVKVITLKSKLVSDFRKDFQFYKVREINNYHHAHDAYLNAVVGTALIKKYPKLESEFVYGDYKVYDVRKMIAKSEQEIGKATAKYFFYSNIMNFFKTEITLANGEIRKRPLIETNGETGEIVWDKGRDFATVRKVLSMPQVNIVKKTEVQTGGFSKESILPKRNSDKLIARKKDWDPKKYGGFDSPTVAYSVLVVAKVEKGKSKKLKSVKELLGITIMERSSFEKNPIDFLEAKGYKEVKKDLIIKLPKYSLFELENGRKRMLASAGELQKGNELALPSKYVNFLYLASHYEKLKGSPEDNEQKQLFVEQHKHYLDEIIEQISEFSKRVILADANLDKVLSAYNKHRDKPIREQAENIIHLFTLTNLGAPAAFKYFDTTIDRKRYTSTKEVLDATLIHQSITGLYETRIDLSQLGGDGGGSSGGGPAPGGTVSLQDEHRLFDIPVTTSLPDVWLQDFPQAWAETGGLGRAKCQAPIIIDLKPTAVPVSIKQYPMSLEAHMGIRQHIIKFLELGVLRPCRSPWNTPLLPVKKPGTQDYRPVQDLREINKRTVDIHPTVPNPYNLLSTLKPDYSWYTVLDLKDAFFCLPLAPQSQELFAFEWKDPERGISGQLTWTRLPQGFKNSPTLFNEALHRDLTDFRTQHPEVTLLQYVDDLLLAAPTKKACTQGTRHLLQELGEKGYRASAKKAQICQTKVTYLGYILSEGKRWLTPGRIETVARIPPPRNPREVREFLGTAGFCRLWIPGFAELAAPLYALTKPSTPFTWQTEHQLAFEALKKALLSAPALGLPDTSKPFTLFLDERQGIAKGVLTQKLGPWKRPVAYLSKKLDPVAAGWPPCLRIMAATAMLVKDSAKLTLGQPLTVITPHTLEAIVRQPPDRWITNARLTHYQALLLDTDRVQFGPPVTLNPATLLPVPENQPSPHDCRQVLAETHGTREDLKDQELPDADHTWYTDGSSYLDSGTRRAGAAVVDGHNTIWAQSLPPGTSAQKAELIALTKALELSKGKKANIYTDSRYAFATAHTHGSIYERRGWLTSEGKEIKNKAEIIALLKALFLPQEVAIIHCPGHQKGQDPVAVGNRQADRVARQAAMAEVLTLATEPDNTSHITAGKRTADGSEFEKRTADGSEFESPKKKAKVE

SEQ ID NO: 7383 - protein, 2085 aa, synthetic construct
MPAAKRVKLDGGDKKYSIGLDIGTNSVGWAVITDEYKVPSKKFKVLGNTDRHSIKKNLIGALLFDSGETAEATRLKRTARRRYTRRKNRICYLQEIFSNEMAKVDDSFFHRLEESFLVEEDKKHERHPIFGNIVDEVAYHEKYPTIYHLRKKLVDSTDKADLRLIYLALAHMIKFRGHFLIEGDLNPDNSDVDKLFIQLVQTYNQLFEENPINASGVDAKAILSARLSKSRRLENLIAQLPGEKKNGLFGNLIALSLGLTPNFKSNFDLAEDAKLQLSKDTYDDDLDNLLAQIGDQYADLFLAAKNLSDAILLSDILRVNTEITKAPLSASMIKRYDEHHQDLTLLKALVRQQLPEKYKEIFFDQSKNGYAGYIDGGASQEEFYKFIKPILEKMDGTEELLVKLNREDLLRKQRTFDNGSIPHQIHLGELHAILRRQEDFYPFLKDNREKIEKILTFRIPYYVGPLARGNSRFAWMTRKSEETITPWNFEEVVDKGASAQSFIERMTNFDKNLPNEKVLPKHSLLYEYFTVYNELTKVKYVTEGMRKPAFLSGEQKKAIVDLLFKTNRKVTVKQLKEDYFKKIECFDSVEISGVEDRFNASLGTYHDLLKIIKDKDFLDNEENEDILEDIVLTLTLFEDREMIEERLKTYAHLFDDKVMKQLKRRRYTGWGRLSRKLINGIRDKQSGKTILDFLKSDGFANRNFMQLIHDDSLTFKEDIQKAQVSGQGDSLHEHIANLAGSPAIKKGILQTVKVVDELVKVMGRHKPENIVIEMARENQTTQKGQKNSRERMKRIEEGIKELGSQILKEHPVENTQLQNEKLYLYYLQNGRDMYVDQELDINRLSDYDVDHIVPQSFLKDDSIDNKVLTRSDKARGKSDNVPSEEVVKKMKNYWRQLLNAKLITQRKFDNLTKAERGGLSELDKAGFIKRQLVETRQITKHVAQILDSRMNTKYDENDKLIREVKVITLKSKLVSDFRKDFQFYKVREINNYHHAHDAYLNAVVGTALIKKYPKLESEFVYGDYKVYDVRKMIAKSEQEIGKATAKYFFYSNIMNFFKTEITLANGEIRKRPLIETNGETGEIVWDKGRDFATVRKVLSMPQVNIVKKTEVQTGGFSKESILPKRNSDKLIARKKDWDPKKYGGFDSPTVAYSVLVVAKVEKGKSKKLKSVKELLGITIMERSSFEKNPIDFLEAKGYKEVKKDLIIKLPKYSLFELENGRKRMLASAGELQKGNELALPSKYVNFLYLASHYEKLKGSPEDNEQKQLFVEQHKHYLDEIIEQISEFSKRVILADANLDKVLSAYNKHRDKPIREQAENIIHLFTLTNLGAPAAFKYFDTTIDRKRYTSTKEVLDATLIHQSITGLYETRIDLSQLGGDGGGSSGGGPAPGGVPWILKKPLELTIKLDLEEQQGTLLNNSILSKKGKEELKQLFEKYSALWQSWENQVGHRRIRPHKIATGTVKPTPQKQYHINPKAKPDIQIVINDLLKQGVLIQKESTMNTPVYPVPKPNGRWRMVLDYRAVNKVTPLIAVQNQHSYGILGSLFKGRYKTTIDLSNGFWAHPIVPEDYWITAFTWQGKQYCWTVLPQGFLNSPGLFTGDVVDLLQGIPNVEVYVDDVYISHDSEKEHLEYLDILFNRLKEAGYIISLKKSNIANSIVDFLGFQITNEGRGLTDTFKEKLENITAPTTLKQLQSILGLLNFARNFIPDFTELIAPLYALIPKSTKNYVPWQIEHSTTLETLITKLNGAEYLQGRKGDKTLIMKVNASYTTGYIRYYNEGEKKPISYVSIVFSKTELKFTELEKLLTTVHKGLLKALDLSMGQNIHVYSPIVSMQNIQKTPQTAKKALASRWLSWLSYLEDPRIRFFYDPQMPALKDLPAVDTGKDNKKHPSNFQHIFYTDGSAITSPTKEGHLNAGMGIVYFINKDGNLQKQQEWSISLGNHTAQFAEIAAFEFALKKCLPLGGNILVVTDSNYVAKAYNEELDVWASNGFVNNRKKPLKHISKWKSVADLKRLRPDVVVTHEPGHQKLDSSPHAYGNNLADQLATQASFKVHAGKRTADGSEFEKRTADGSEFESPKKKAKVE

SEQ ID NO: 7384 - protein, 2093 aa, synthetic construct
MPAAKRVKLDGGDKKYSIGLDIGTNSVGWAVITDEYKVPSKKFKVLGNTDRHSIKKNLIGALLFDSGETAEATRLKRTARRRYTRRKNRICYLQEIFSNEMAKVDDSFFHRLEESFLVEEDKKHERHPIFGNIVDEVAYHEKYPTIYHLRKKLVDSTDKADLRLIYLALAHMIKFRGHFLIEGDLNPDNSDVDKLFIQLVQTYNQLFEENPINASGVDAKAILSARLSKSRRLENLIAQLPGEKKNGLFGNLIALSLGLTPNFKSNFDLAEDAKLQLSKDTYDDDLDNLLAQIGDQYADLFLAAKNLSDAILLSDILRVNTEITKAPLSASMIKRYDEHHQDLTLLKALVRQQLPEKYKEIFFDQSKNGYAGYIDGGASQEEFYKFIKPILEKMDGTEELLVKLNREDLLRKQRTFDNGSIPHQIHLGELHAILRRQEDFYPFLKDNREKIEKILTFRIPYYVGPLARGNSRFAWMTRKSEETITPWNFEEVVDKGASAQSFIERMTNFDKNLPNEKVLPKHSLLYEYFTVYNELTKVKYVTEGMRKPAFLSGEQKKAIVDLLFKTNRKVTVKQLKEDYFKKIECFDSVEISGVEDRFNASLGTYHDLLKIIKDKDFLDNEENEDILEDIVLTLTLFEDREMIEERLKTYAHLFDDKVMKQLKRRRYTGWGRLSRKLINGIRDKQSGKTILDFLKSDGFANRNFMQLIHDDSLTFKEDIQKAQVSGQGDSLHEHIANLAGSPAIKKGILQTVKVVDELVKVMGRHKPENIVIEMARENQTTQKGQKNSRERMKRIEEGIKELGSQILKEHPVENTQLQNEKLYLYYLQNGRDMYVDQELDINRLSDYDVDHIVPQSFLKDDSIDNKVLTRSDKARGKSDNVPSEEVVKKMKNYWRQLLNAKLITQRKFDNLTKAERGGLSELDKAGFIKRQLVETRQITKHVAQILDSRMNTKYDENDKLIREVKVITLKSKLVSDFRKDFQFYKVREINNYHHAHDAYLNAVVGTALIKKYPKLESEFVYGDYKVYDVRKMIAKSEQEIGKATAKYFFYSNIMNFFKTEITLANGEIRKRPLIETNGETGEIVWDKGRDFATVRKVLSMPQVNIVKKTEVQTGGFSKESILPKRNSDKLIARKKDWDPKKYGGFDSPTVAYSVLVVAKVEKGKSKKLKSVKELLGITIMERSSFEKNPIDFLEAKGYKEVKKDLIIKLPKYSLFELENGRKRMLASAGELQKGNELALPSKYVNFLYLASHYEKLKGSPEDNEQKQLFVEQHKHYLDEIIEQISEFSKRVILADANLDKVLSAYNKHRDKPIREQAENIIHLFTLTNLGAPAAFKYFDTTIDRKRYTSTKEVLDATLIHQSITGLYETRIDLSQLGGDGGGSSGGGPAPGGTLQLEEEYRLFEPESTQKQEMDIWLKNFPQAWAETGGMGTAHCQAPVLIQLKATATPISIRQYPMPHEAYQGIKPHIRRMLDQGILKPCQSPWNTPLLPVKKPGTEDYRPVQDLREVNKRVEDIHPTVPNPYNLLSTLPPSHPWYTVLDLKDAFFCLRLHSESQLLFAFEWRDPEIGLSGQLTWTRLPQGFKNSPTLFNEALHSDLADFRVRYPALVLLQYVDDLLLAAATRTECLEGTKALLETLGNKGYRASAKKAQICLQEVTYLGYSLKDGQRWLTKARKEAILSIPVPKNSRQVREFLGTAGYCRLWIPGFAELAAPLYPLTRPGTLFQWGTEQQLAFEDIKKALLSSPALGLPDITKPFELFIDENSGFAKGVLVQKLGPWKRPVAYLSKKLDTVASGWPPCLRMVAAIAILVKDAGKLTLGQPLTILTSHPVEALVRQPPNKWLSNARMTHYQAMLLDAERVHFGPTVSLNPATLLPLPSGGNHHDCLQILAETHGTRPDLTDQPLPDADLTWYTDGSSFIRNGEREAGAAVTTESEVIWAAPLPPGTSAQRAELIALTQALKMAEGKKLTVYTDSRYAFATTHVHGEIYRRRGWLTSEGKEIKNKNEILALLEALFLPKRLSIIHCPGHQKGDSPQAKGNRLADDTAKKAATETHSSLTVLPAGKRTADGSEFEKRTADGSEFESPKKKAKVE

SEQ ID NO: 7385 - protein, 2174 aa, synthetic construct
MPAAKRVKLDGGDKKYSIGLDIGTNSVGWAVITDEYKVPSKKFKVLGNTDRHSIKKNLIGALLFDSGETAEATRLKRTARRRYTRRKNRICYLQEIFSNEMAKVDDSFFHRLEESFLVEEDKKHERHPIFGNIVDEVAYHEKYPTIYHLRKKLVDSTDKADLRLIYLALAHMIKFRGHFLIEGDLNPDNSDVDKLFIQLVQTYNQLFEENPINASGVDAKAILSARLSKSRRLENLIAQLPGEKKNGLFGNLIALSLGLTPNFKSNFDLAEDAKLQLSKDTYDDDLDNLLAQIGDQYADLFLAAKNLSDAILLSDILRVNTEITKAPLSASMIKRYDEHHQDLTLLKALVRQQLPEKYKEIFFDQSKNGYAGYIDGGASQEEFYKFIKPILEKMDGTEELLVKLNREDLLRKQRTFDNGSIPHQIHLGELHAILRRQEDFYPFLKDNREKIEKILTFRIPYYVGPLARGNSRFAWMTRKSEETITPWNFEEVVDKGASAQSFIERMTNFDKNLPNEKVLPKHSLLYEYFTVYNELTKVKYVTEGMRKPAFLSGEQKKAIVDLLFKTNRKVTVKQLKEDYFKKIECFDSVEISGVEDRFNASLGTYHDLLKIIKDKDFLDNEENEDILEDIVLTLTLFEDREMIEERLKTYAHLFDDKVMKQLKRRRYTGWGRLSRKLINGIRDKQSGKTILDFLKSDGFANRNFMQLIHDDSLTFKEDIQKAQVSGQGDSLHEHIANLAGSPAIKKGILQTVKVVDELVKVMGRHKPENIVIEMARENQTTQKGQKNSRERMKRIEEGIKELGSQILKEHPVENTQLQNEKLYLYYLQNGRDMYVDQELDINRLSDYDVDHIVPQSFLKDDSIDNKVLTRSDKARGKSDNVPSEEVVKKMKNYWRQLLNAKLITQRKFDNLTKAERGGLSELDKAGFIKRQLVETRQITKHVAQILDSRMNTKYDENDKLIREVKVITLKSKLVSDFRKDFQFYKVREINNYHHAHDAYLNAVVGTALIKKYPKLESEFVYGDYKVYDVRKMIAKSEQEIGKATAKYFFYSNIMNFFKTEITLANGEIRKRPLIETNGETGEIVWDKGRDFATVRKVLSMPQVNIVKKTEVQTGGFSKESILPKRNSDKLIARKKDWDPKKYGGFDSPTVAYSVLVVAKVEKGKSKKLKSVKELLGITIMERSSFEKNPIDFLEAKGYKEVKKDLIIKLPKYSLFELENGRKRMLASAGELQKGNELALPSKYVNFLYLASHYEKLKGSPEDNEQKQLFVEQHKHYLDEIIEQISEFSKRVILADANLDKVLSAYNKHRDKPIREQAENIIHLFTLTNLGAPAAFKYFDTTIDRKRYTSTKEVLDATLIHQSITGLYETRIDLSQLGGDGGGSSGGGPAPGGMNPLQLLQPLPAEIKGTKLLAHWNSGATITCIPESFLEDEQPIKKTLIKTIHGEKQQNVYYVTFKVKGRKVEAEVIASPYEYILLSPTDVPWLTQQPLQLTILVPLQEYQEKILSKTALPEDQKQQLKTLFVKYDNLWQHWENQVGHRKIRPHNIATGDYPPRPQKQYPINPKAKPSIQIVIDDLLKQGVLTPQNSTMNTPVYPVPKPDGRWRMVLDYREVNKTIPLTAAQNQHSAGILATIVRQKYKTTLDLANGFWAHPITPESYWLTAFTWQGKQYCWTRLPQGFLNSPALFNADVVDLLKEIPNVQVYVDDIYLSHDDPKEHVQQLEKVFQILLQAGYVVSLKKSEIGQKTVEFLGFNITKEGRGLTDTFKTKLLNITPPKDLKQLQSILGLLNFARNFIPNFAELVQPLYNLIAPAKGKYIEWSEENTKQLNMVIEALNTASNLEERLPEQRLVIKVNTSPSAGYVRYYNETGKKPIMYLNYVFSKAELKFSMLEKLLTTMHKALIKAMDLAMGQEILVYSPIVSMTKIQKTPLPERKALPIRWITWMTYLEDPRIQFHYDKTLPELKHIPDVYTSSQSPVKHPSQYEGVFYTDGSAIKSPDPTKSNNAGMGIVHATYKPEYQVLNQWSIPLGNHTAQMAEIAAVEFACKKALKIPGPVLVITDSFYVAESANKELPYWKSNGFVNNKKKPLKHISKWKSIAECLSMKPDITIQHEKGISLQIPVFILKGNALADKLATQGSYVVNAGKRTADGSEFEKRTADGSEFESPKKKAKVE

SEQ ID NO: 7386 - protein, 2125 aa, synthetic construct
MPAAKRVKLDGGDKKYSIGLDIGTNSVGWAVITDEYKVPSKKFKVLGNTDRHSIKKNLIGALLFDSGETAEATRLKRTARRRYTRRKNRICYLQEIFSNEMAKVDDSFFHRLEESFLVEEDKKHERHPIFGNIVDEVAYHEKYPTIYHLRKKLVDSTDKADLRLIYLALAHMIKFRGHFLIEGDLNPDNSDVDKLFIQLVQTYNQLFEENPINASGVDAKAILSARLSKSRRLENLIAQLPGEKKNGLFGNLIALSLGLTPNFKSNFDLAEDAKLQLSKDTYDDDLDNLLAQIGDQYADLFLAAKNLSDAILLSDILRVNTEITKAPLSASMIKRYDEHHQDLTLLKALVRQQLPEKYKEIFFDQSKNGYAGYIDGGASQEEFYKFIKPILEKMDGTEELLVKLNREDLLRKQRTFDNGSIPHQIHLGELHAILRRQEDFYPFLKDNREKIEKILTFRIPYYVGPLARGNSRFAWMTRKSEETITPWNFEEVVDKGASAQSFIERMTNFDKNLPNEKVLPKHSLLYEYFTVYNELTKVKYVTEGMRKPAFLSGEQKKAIVDLLFKTNRKVTVKQLKEDYFKKIECFDSVEISGVEDRFNASLGTYHDLLKIIKDKDFLDNEENEDILEDIVLTLTLFEDREMIEERLKTYAHLFDDKVMKQLKRRRYTGWGRLSRKLINGIRDKQSGKTILDFLKSDGFANRNFMQLIHDDSLTFKEDIQKAQVSGQGDSLHEHIANLAGSPAIKKGILQTVKVVDELVKVMGRHKPENIVIEMARENQTTQKGQKNSRERMKRIEEGIKELGSQILKEHPVENTQLQNEKLYLYYLQNGRDMYVDQELDINRLSDYDVDHIVPQSFLKDDSIDNKVLTRSDKARGKSDNVPSEEVVKKMKNYWRQLLNAKLITQRKFDNLTKAERGGLSELDKAGFIKRQLVETRQITKHVAQILDSRMNTKYDENDKLIREVKVITLKSKLVSDFRKDFQFYKVREINNYHHAHDAYLNAVVGTALIKKYPKLESEFVYGDYKVYDVRKMIAKSEQEIGKATAKYFFYSNIMNFFKTEITLANGEIRKRPLIETNGETGEIVWDKGRDFATVRKVLSMPQVNIVKKTEVQTGGFSKESILPKRNSDKLIARKKDWDPKKYGGFDSPTVAYSVLVVAKVEKGKSKKLKSVKELLGITIMERSSFEKNPIDFLEAKGYKEVKKDLIIKLPKYSLFELENGRKRMLASAGELQKGNELALPSKYVNFLYLASHYEKLKGSPEDNEQKQLFVEQHKHYLDEIIEQISEFSKRVILADANLDKVLSAYNKHRDKPIREQAENIIHLFTLTNLGAPAAFKYFDTTIDRKRYTSTKEVLDATLIHQSITGLYETRIDLSQLGGDGGGSSGGGPAPGGLLGRDLLTKLKAQIQFSTEGPQVTWEDRPAMCLVLNLEEEYRLHEKPVPPSIDPSWLQLFPMVWAEKAGMGLANQVPPVVVELKSDASPVAVRQYPMSKEAREGIRPHIQRFLDLGILVPCQSPWNTPLLPVKKPGTNDYRPVQDLREVNKRVQDIHPTVPNPYNLLSSLPPSHTWYSVLDLKDAFFCLKLHPNSQPLFAFEWRDPEKGNTGQLTWTRLPQGFKNSPTLFNEALHRDLASFRALNPQVVMLQYVDDLLVAAPTYRDCKEGTRRLLQELSKLGYRVSAKKAQLCREEVTYLGYLLKGGKRWLTPARKATVMKIPTPTTPRQVREFLGTAGFCRLWIPGFASLAAPLYPLTRPKVPFTWTEAHQEAFGRIKEALLSAPALALPDLTKPFALYVDEKEGVARGVLTQTLGPWRRPVAYLSKKLDPVASGWPTCLKAIAAVALLLKDADKLTLGQNVLVIAPHNLESIVRQPPDRWMTNARMTHYQSLLLNERVSFAPPAILNPATLLPVESDDTPIHICSEILAEETGTRPDLRDQPLPGVPAWYTDGSSFIMDGRRQAGAAIVDNKRTVWASNLPEGTSAQKAELIALTQALRLAEGKSINIYTDSRYAFATAHVHGAIYKQRGWLTSAGKDIKNKEEILALLEAIHLPKRVAIIHCPGHQRGTDPVATGNRKADEAAKQAAQSTRILTETTKNAGKRTADGSEFEKRTADGSEFESPKKKAKVE

SEQ ID NO: 7387 - protein, 2216 aa, synthetic construct
MPAAKRVKLDGGDKKYSIGLDIGTNSVGWAVITDEYKVPSKKFKVLGNTDRHSIKKNLIGALLFDSGETAEATRLKRTARRRYTRRKNRICYLQEIFSNEMAKVDDSFFHRLEESFLVEEDKKHERHPIFGNIVDEVAYHEKYPTIYHLRKKLVDSTDKADLRLIYLALAHMIKFRGHFLIEGDLNPDNSDVDKLFIQLVQTYNQLFEENPINASGVDAKAILSARLSKSRRLENLIAQLPGEKKNGLFGNLIALSLGLTPNFKSNFDLAEDAKLQLSKDTYDDDLDNLLAQIGDQYADLFLAAKNLSDAILLSDILRVNTEITKAPLSASMIKRYDEHHQDLTLLKALVRQQLPEKYKEIFFDQSKNGYAGYIDGGASQEEFYKFIKPILEKMDGTEELLVKLNREDLLRKQRTFDNGSIPHQIHLGELHAILRRQEDFYPFLKDNREKIEKILTFRIPYYVGPLARGNSRFAWMTRKSEETITPWNFEEVVDKGASAQSFIERMTNFDKNLPNEKVLPKHSLLYEYFTVYNELTKVKYVTEGMRKPAFLSGEQKKAIVDLLFKTNRKVTVKQLKEDYFKKIECFDSVEISGVEDRFNASLGTYHDLLKIIKDKDFLDNEENEDILEDIVLTLTLFEDREMIEERLKTYAHLFDDKVMKQLKRRRYTGWGRLSRKLINGIRDKQSGKTILDFLKSDGFANRNFMQLIHDDSLTFKEDIQKAQVSGQGDSLHEHIANLAGSPAIKKGILQTVKVVDELVKVMGRHKPENIVIEMARENQTTQKGQKNSRERMKRIEEGIKELGSQILKEHPVENTQLQNEKLYLYYLQNGRDMYVDQELDINRLSDYDVDHIVPQSFLKDDSIDNKVLTRSDKARGKSDNVPSEEVVKKMKNYWRQLLNAKLITQRKFDNLTKAERGGLSELDKAGFIKRQLVETRQITKHVAQILDSRMNTKYDENDKLIREVKVITLKSKLVSDFRKDFQFYKVREINNYHHAHDAYLNAVVGTALIKKYPKLESEFVYGDYKVYDVRKMIAKSEQEIGKATAKYFFYSNIMNFFKTEITLANGEIRKRPLIETNGETGEIVWDKGRDFATVRKVLSMPQVNIVKKTEVQTGGFSKESILPKRNSDKLIARKKDWDPKKYGGFDSPTVAYSVLVVAKVEKGKSKKLKSVKELLGITIMERSSFEKNPIDFLEAKGYKEVKKDLIIKLPKYSLFELENGRKRMLASAGELQKGNELALPSKYVNFLYLASHYEKLKGSPEDNEQKQLFVEQHKHYLDEIIEQISEFSKRVILADANLDKVLSAYNKHRDKPIREQAENIIHLFTLTNLGAPAAFKYFDTTIDRKRYTSTKEVLDATLIHQSITGLYETRIDLSQLGGDGGGSSGGGPAPGGTLGDQGSRGSDPLPEPRVTLTVEGIPTEFLVNTGAEHSVLTKPMGKMGSKRTVVAGATGSKVYPWTTKRLLKIGQKQVTHSFLVIPECPAPLLGRDLLTKLKAQIQFSTEGPQVTWEDRPAMCLVLNLEEEYRLHEKPVPPSIDPSWLQLFPMVWAEKAGMGLANQVPPVVVELKSDASPVAVRQYPMSKEAREGIRPHIQRFLDLGILVPCQSPWNTPLLPVKKPGTNDYRPVQDLREVNKRVQDIHPTVPNPYNLLSSLPPSHTWYSVLDLKDAFFCLKLHPNSQPLFAFEWRDPEKGNTGQLTWTRLPQGFKNSPTLFNEALHRDLASFRALNPQVVMLQYVDDLLVAAPTYRDCKEGTRRLLQELSKLGYRVSAKKAQLCREEVTYLGYLLKGGKRWLTPARKATVMKIPTPTTPRQVREFLGTAGFCRLWIPGFASLAAPLYPLTRPKVPFTWTEAHQEAFGRIKEALLSAPALALPDLTKPFALYVDEKEGVARGVLTQTLGPWRRPVAYLSKKLDPVASGWPTCLKAIAAVALLLKDADKLTLGQNVLVIAPHNLESIVRQPPDRWMTNARMTHYQSLLLNERVSFAPPAILNPATLLPVESDDTPIHICSEILAEETGTRPDLRDQPLPGVPAWYTDGSSFIMDGRRQAGAAIVDNKRTVWASNLPEGTSAQKAELIALTQALRLAEGKSINIYTDSRYAFATAHVHGAIYKQRGWLTSAGKDIKNKEEILALLEAIHLPKRVAIIHCPGHQRGTDPVATGNRKADEAAKQAAQSTRILTETTKNAGKRTADGSEFEKRTADGSEFESPKKKAKVE

SEQ ID NO: 7388 - protein, 2216 aa, synthetic construct
MPAAKRVKLDGGDKKYSIGLDIGTNSVGWAVITDEYKVPSKKFKVLGNTDRHSIKKNLIGALLFDSGETAEATRLKRTARRRYTRRKNRICYLQEIFSNEMAKVDDSFFHRLEESFLVEEDKKHERHPIFGNIVDEVAYHEKYPTIYHLRKKLVDSTDKADLRLIYLALAHMIKFRGHFLIEGDLNPDNSDVDKLFIQLVQTYNQLFEENPINASGVDAKAILSARLSKSRRLENLIAQLPGEKKNGLFGNLIALSLGLTPNFKSNFDLAEDAKLQLSKDTYDDDLDNLLAQIGDQYADLFLAAKNLSDAILLSDILRVNTEITKAPLSASMIKRYDEHHQDLTLLKALVRQQLPEKYKEIFFDQSKNGYAGYIDGGASQEEFYKFIKPILEKMDGTEELLVKLNREDLLRKQRTFDNGSIPHQIHLGELHAILRRQEDFYPFLKDNREKIEKILTFRIPYYVGPLARGNSRFAWMTRKSEETITPWNFEEVVDKGASAQSFIERMTNFDKNLPNEKVLPKHSLLYEYFTVYNELTKVKYVTEGMRKPAFLSGEQKKAIVDLLFKTNRKVTVKQLKEDYFKKIECFDSVEISGVEDRFNASLGTYHDLLKIIKDKDFLDNEENEDILEDIVLTLTLFEDREMIEERLKTYAHLFDDKVMKQLKRRRYTGWGRLSRKLINGIRDKQSGKTILDFLKSDGFANRNFMQLIHDDSLTFKEDIQKAQVSGQGDSLHEHIANLAGSPAIKKGILQTVKVVDELVKVMGRHKPENIVIEMARENQTTQKGQKNSRERMKRIEEGIKELGSQILKEHPVENTQLQNEKLYLYYLQNGRDMYVDQELDINRLSDYDVDHIVPQSFLKDDSIDNKVLTRSDKARGKSDNVPSEEVVKKMKNYWRQLLNAKLITQRKFDNLTKAERGGLSELDKAGFIKRQLVETRQITKHVAQILDSRMNTKYDENDKLIREVKVITLKSKLVSDFRKDFQFYKVREINNYHHAHDAYLNAVVGTALIKKYPKLESEFVYGDYKVYDVRKMIAKSEQEIGKATAKYFFYSNIMNFFKTEITLANGEIRKRPLIETNGETGEIVWDKGRDFATVRKVLSMPQVNIVKKTEVQTGGFSKESILPKRNSDKLIARKKDWDPKKYGGFDSPTVAYSVLVVAKVEKGKSKKLKSVKELLGITIMERSSFEKNPIDFLEAKGYKEVKKDLIIKLPKYSLFELENGRKRMLASAGELQKGNELALPSKYVNFLYLASHYEKLKGSPEDNEQKQLFVEQHKHYLDEIIEQISEFSKRVILADANLDKVLSAYNKHRDKPIREQAENIIHLFTLTNLGAPAAFKYFDTTIDRKRYTSTKEVLDATLIHQSITGLYETRIDLSQLGGDGGGSSGGGPAPGGTLGDQGSRGSDPLPEPRVTLTVEGIPTEFLVNTGAEHSVLTKPMGKMGSKRTVVAGATGSKVYPWTTKRLLKIGQKQVTHSFLVIPECPAPLLGRDLLTKLKAQIQFSTEGPQVTWEDRPAMCLVLNLEEEYRLHEKPVPPSIDPSWLQLFPMVWAEKAGMGLANQVPPVVVELKSDASPVAVRQYPMSKEAREGIRPHIQRFLDLGILVPCQSPWNTPLLPVKKPGTNDYRPVQDLREVNKRVQDIHPTVPNPYNLLSSLPPSHTWYSVLDLKDAFFCLKLHPNSQPLFAFEWRDPEKGNTGQLTWTRLPQGFKNSPTLFNEALHRDLASFRALNPQVVMLQYVDDLLVAAPTYRDCKEGTRRLLQELSKLGYRVSAKKAQLCREEVTYLGYLLKGGKRWLTPARKATVMKIPTPTTPRQVREFLGKAGFCRLFIPGFASLAAPLYPLTRPKVPFTWTEAHQEAFGRIKEALLSAPALALPDLTKPFALYVDEKEGVARGVLTQTLGPWRRPVAYLSKKLDPVASGWPTCLKAIAAVALLLKDADKLTLGQNVLVIAPHNLESIVRQPPDRWMTNARMTHYQSLLLNERVSFAPPAILNPATLLPVESDDTPIHICSEILAEETGTRPDLRDQPLPGVPAWYTDGSSFIMDGRRQAGAAIVDNKRTVWASNLPEGTSAQKAELIALTQALRLAEGKSINIYTDSRYAFATAHVHGAIYKQRGWLTSAGKDIKNKEEILALLEAIHLPKRVAIIHCPGHQRGTDPVATGNRKADEAAKQAAQSTRILTETTKNAGKRTADGSEFEKRTADGSEFESPKKKAKVE

SEQ ID NO: 7389 - protein, 2094 aa, synthetic construct
MPAAKRVKLDGGDKKYSIGLDIGTNSVGWAVITDEYKVPSKKFKVLGNTDRHSIKKNLIGALLFDSGETAEATRLKRTARRRYTRRKNRICYLQEIFSNEMAKVDDSFFHRLEESFLVEEDKKHERHPIFGNIVDEVAYHEKYPTIYHLRKKLVDSTDKADLRLIYLALAHMIKFRGHFLIEGDLNPDNSDVDKLFIQLVQTYNQLFEENPINASGVDAKAILSARLSKSRRLENLIAQLPGEKKNGLFGNLIALSLGLTPNFKSNFDLAEDAKLQLSKDTYDDDLDNLLAQIGDQYADLFLAAKNLSDAILLSDILRVNTEITKAPLSASMIKRYDEHHQDLTLLKALVRQQLPEKYKEIFFDQSKNGYAGYIDGGASQEEFYKFIKPILEKMDGTEELLVKLNREDLLRKQRTFDNGSIPHQIHLGELHAILRRQEDFYPFLKDNREKIEKILTFRIPYYVGPLARGNSRFAWMTRKSEETITPWNFEEVVDKGASAQSFIERMTNFDKNLPNEKVLPKHSLLYEYFTVYNELTKVKYVTEGMRKPAFLSGEQKKAIVDLLFKTNRKVTVKQLKEDYFKKIECFDSVEISGVEDRFNASLGTYHDLLKIIKDKDFLDNEENEDILEDIVLTLTLFEDREMIEERLKTYAHLFDDKVMKQLKRRRYTGWGRLSRKLINGIRDKQSGKTILDFLKSDGFANRNFMQLIHDDSLTFKEDIQKAQVSGQGDSLHEHIANLAGSPAIKKGILQTVKVVDELVKVMGRHKPENIVIEMARENQTTQKGQKNSRERMKRIEEGIKELGSQILKEHPVENTQLQNEKLYLYYLQNGRDMYVDQELDINRLSDYDVDHIVPQSFLKDDSIDNKVLTRSDKARGKSDNVPSEEVVKKMKNYWRQLLNAKLITQRKFDNLTKAERGGLSELDKAGFIKRQLVETRQITKHVAQILDSRMNTKYDENDKLIREVKVITLKSKLVSDFRKDFQFYKVREINNYHHAHDAYLNAVVGTALIKKYPKLESEFVYGDYKVYDVRKMIAKSEQEIGKATAKYFFYSNIMNFFKTEITLANGEIRKRPLIETNGETGEIVWDKGRDFATVRKVLSMPQVNIVKKTEVQTGGFSKESILPKRNSDKLIARKKDWDPKKYGGFDSPTVAYSVLVVAKVEKGKSKKLKSVKELLGITIMERSSFEKNPIDFLEAKGYKEVKKDLIIKLPKYSLFELENGRKRMLASAGELQKGNELALPSKYVNFLYLASHYEKLKGSPEDNEQKQLFVEQHKHYLDEIIEQISEFSKRVILADANLDKVLSAYNKHRDKPIREQAENIIHLFTLTNLGAPAAFKYFDTTIDRKRYTSTKEVLDATLIHQSITGLYETRIDLSQLGGDGGGSSGGGPAPGGTLNLEDEYRLYETSAEPEVSPGSTWLSDFPQAWAETGGMGLAVRQAPLIIPLKATSTPVSIKQYPMSQEAKLGIKPHIQRLLDQGILVPCQSPWNTPLLPVKKPGTNDYRPVQDLREVNKRVEDIHPTVPNPYNLLSGLPPSHRWYTVLDLKDAFFCLRLHPTSQPLFAFEWRDPGMGISGQLTWTRLPQGFKNSPTLFNEALHRDLADFRIQHPDLILLQYVDDILLAATSELDCQQGTRALLLTLGNLGYRASAKKAQLCQKQVKYLGYLLKEGQRWLTEARKETVMGQPTPKTPRQLREFLGKAGFCRLFIPGFAEMAAPLYPLTKPGTLFNWGPDQQKAYQEIKQALLTAPALGLPDLTKPFELFVDEKQGYAKGVLTQKLGPWRRPVAYLSKKLDPVAAGWPPCLRMVAAIAVLRKDAGKLTMGQPLVILAPHAVEALVKQPPDRWLSNARMTHYQAMLLDTDRVQFGPVVALNPATLLPLPEEGAPHDCLEILAETHGTRPDLTDQPIPDADHTWYTDGSSFLQEGQRKAGAAVTTETEVIWARALPAGTSAQRAELIALTQALKMAEGKRLNVYTDSRYAFATAHIHGEIYRRRGWLTSEGREIKNKSEILALLKALFLPKRLSIIHCLGHQKGDSAEARGNRLADQAAREAAIKTPPDTSTLLAGKRTADGSEFEKRTADGSEFESPKKKAKVE

SEQ ID NO: 7390 - protein, 2094 aa, synthetic construct
MPAAKRVKLDGGDKKYSIGLDIGTNSVGWAVITDEYKVPSKKFKVLGNTDRHSIKKNLIGALLFDSGETAEATRLKRTARRRYTRRKNRICYLQEIFSNEMAKVDDSFFHRLEESFLVEEDKKHERHPIFGNIVDEVAYHEKYPTIYHLRKKLVDSTDKADLRLIYLALAHMIKFRGHFLIEGDLNPDNSDVDKLFIQLVQTYNQLFEENPINASGVDAKAILSARLSKSRRLENLIAQLPGEKKNGLFGNLIALSLGLTPNFKSNFDLAEDAKLQLSKDTYDDDLDNLLAQIGDQYADLFLAAKNLSDAILLSDILRVNTEITKAPLSASMIKRYDEHHQDLTLLKALVRQQLPEKYKEIFFDQSKNGYAGYIDGGASQEEFYKFIKPILEKMDGTEELLVKLNREDLLRKQRTFDNGSIPHQIHLGELHAILRRQEDFYPFLKDNREKIEKILTFRIPYYVGPLARGNSRFAWMTRKSEETITPWNFEEVVDKGASAQSFIERMTNFDKNLPNEKVLPKHSLLYEYFTVYNELTKVKYVTEGMRKPAFLSGEQKKAIVDLLFKTNRKVTVKQLKEDYFKKIECFDSVEISGVEDRFNASLGTYHDLLKIIKDKDFLDNEENEDILEDIVLTLTLFEDREMIEERLKTYAHLFDDKVMKQLKRRRYTGWGRLSRKLINGIRDKQSGKTILDFLKSDGFANRNFMQLIHDDSLTFKEDIQKAQVSGQGDSLHEHIANLAGSPAIKKGILQTVKVVDELVKVMGRHKPENIVIEMARENQTTQKGQKNSRERMKRIEEGIKELGSQILKEHPVENTQLQNEKLYLYYLQNGRDMYVDQELDINRLSDYDVDHIVPQSFLKDDSIDNKVLTRSDKARGKSDNVPSEEVVKKMKNYWRQLLNAKLITQRKFDNLTKAERGGLSELDKAGFIKRQLVETRQITKHVAQILDSRMNTKYDENDKLIREVKVITLKSKLVSDFRKDFQFYKVREINNYHHAHDAYLNAVVGTALIKKYPKLESEFVYGDYKVYDVRKMIAKSEQEIGKATAKYFFYSNIMNFFKTEITLANGEIRKRPLIETNGETGEIVWDKGRDFATVRKVLSMPQVNIVKKTEVQTGGFSKESILPKRNSDKLIARKKDWDPKKYGGFDSPTVAYSVLVVAKVEKGKSKKLKSVKELLGITIMERSSFEKNPIDFLEAKGYKEVKKDLIIKLPKYSLFELENGRKRMLASAGELQKGNELALPSKYVNFLYLASHYEKLKGSPEDNEQKQLFVEQHKHYLDEIIEQISEFSKRVILADANLDKVLSAYNKHRDKPIREQAENIIHLFTLTNLGAPAAFKYFDTTIDRKRYTSTKEVLDATLIHQSITGLYETRIDLSQLGGDGGGSSGGGPAPGGLGIEDEYRLHETSTEPDVSLGSTWLSDFPQAWAETGGMGLAVRQAPLIIPLKATSTPVSIQQYPMSHEARLGIKPHIQRLLDQGILVPCQSPWNTPLLPVKKPGTNDYRPVQDLREVNKRVEDIHPTVPNPYNLLSGLPPSHQWYTVLDLKDAFFCLRLHPTSQPLFAFEWRDPGMGISGQLTWTRLPQGFKNSPTLFNEALHRDLADFRIQHPDLILLQYVDDILLAATSELDCQQGTRALLQTLGDLGYRASAKKAQICQKQVKYLGYLLREGQRWLTEARKETVMGQPVPKTPRQLREFLGKAGFCRLFIPGFAEMAAPLYPLTKPGTLFSWGPDQQKAYQEIKQALLTAPALGLPDLTKPFELFVDEKQGYAKGVLTQKLGPWRRPVAYLSKKLDPVAAGWPPCLRMVAAIAVLTKDAGKLTMGQPLVILAPHAVEALVKQPPDRWLSNARMTHYQAMLLDTDRVQFGPVVALNPATLLPLPEEGAPHDCLEILAETHGTRPDLTDQPIPDADHTWYTDGSSFLQEGQRKAGAAVTTETEVIWAGALPAGTSAQRAELIALTQALKMAEGKRLNVYTDSRYAFATAHIHGEIYRRRGWLTSEGREIKNKSEILALLKALFLPKRLSIIHCLGHQKGDSAEARGNRLADQAAREAAIKTPPDTSTLLIAGKRTADGSEFEKRTADGSEFESPKKKAKVE

SEQ ID NO: 7391 - protein, 2094 aa, synthetic construct; identical to SEQ ID NO: 7390

SEQ ID NO: 7392 - protein, 2094 aa, synthetic construct
MPAAKRVKLDGGDKKYSIGLDIGTNSVGWAVITDEYKVPSKKFKVLGNTDRHSIKKNLIGALLFDSGETAEATRLKRTARRRYTRRKNRICYLQEIFSNEMAKVDDSFFHRLEESFLVEEDKKHERHPIFGNIVDEVAYHEKYPTIYHLRKKLVDSTDKADLRLIYLALAHMIKFRGHFLIEGDLNPDNSDVDKLFIQLVQTYNQLFEENPINASGVDAKAILSARLSKSRRLENLIAQLPGEKKNGLFGNLIALSLGLTPNFKSNFDLAEDAKLQLSKDTYDDDLDNLLAQIGDQYADLFLAAKNLSDAILLSDILRVNTEITKAPLSASMIKRYDEHHQDLTLLKALVRQQLPEKYKEIFFDQSKNGYAGYIDGGASQEEFYKFIKPILEKMDGTEELLVKLNREDLLRKQRTFDNGSIPHQIHLGELHAILRRQEDFYPFLKDNREKIEKILTFRIPYYVGPLARGNSRFAWMTRKSEETITPWNFEEVVDKGASAQSFIERMTNFDKNLPNEKVLPKHSLLYEYFTVYNELTKVKYVTEGMRKPAFLSGEQKKAIVDLLFKTNRKVTVKQLKEDYFKKIECFDSVEISGVEDRFNASLGTYHDLLKIIKDKDFLDNEENEDILEDIVLTLTLFEDREMIEERLKTYAHLFDDKVMKQLKRRRYTGWGRLSRKLINGIRDKQSGKTILDFLKSDGFANRNFMQLIHDDSLTFKEDIQKAQVSGQGDSLHEHIANLAGSPAIKKGILQTVKVVDELVKVMGRHKPENIVIEMARENQTTQKGQKNSRERMKRIEEGIKELGSQILKEHPVENTQLQNEKLYLYYLQNGRDMYVDQELDINRLSDYDVDHIVPQSFLKDDSIDNKVLTRSDKARGKSDNVPSEEVVKKMKNYWRQLLNAKLITQRKFDNLTKAERGGLSELDKAGFIKRQLVETRQITKHVAQILDSRMNTKYDENDKLIREVKVITLKSKLVSDFRKDFQFYKVREINNYHHAHDAYLNAVVGTALIKKYPKLESEFVYGDYKVYDVRKMIAKSEQEIGKATAKYFFYSNIMNFFKTEITLANGEIRKRPLIETNGETGEIVWDKGRDFATVRKVLSMPQVNIVKKTEVQTGGFSKESILPKRNSDKLIARKKDWDPKKYGGFDSPTVAYSVLVVAKVEKGKSKKLKSVKELLGITIMERSSFEKNPIDFLEAKGYKEVKKDLIIKLPKYSLFELENGRKRMLASAGELQKGNELALPSKYVNFLYLASHYEKLKGSPEDNEQKQLFVEQHKHYLDEIIEQISEFSKRVILADANLDKVLSAYNKHRDKPIREQAENIIHLFTLTNLGAPAAFKYFDTTIDRKRYTSTKEVLDATLIHQSITGLYETRIDLSQLGGDGGGSSGGGPAPGGTLNIEDEYRLHETSKGPDVPLGSTWLSDFPQAWAETGGMGLAFRQAPLIISLKATSTPVSIKQYPMSQEARLGIKPHIQRLLDQGILVPCQSPWNTPLLPVKKPGTNDYRPVQDLREVNKRVEDIHPTVPNPYNLLSGLPPSHQWYTVLDLKDAFFCLRLHPTSQSLFAFEWKDPEMGISGQLTWTRLPQGFKNSPTLFNEALHRDLADFRIQHPDLILLQYVDDLLLAATSELDCQQGTRALLQTLGDLGYRASAKKAQICQKQVKYLGYLLKEGQRWLTEARKETVMGQPTPKTPRQLREFLGKAGLCRLFIPGFAEMAAPLYPLTKPGTLFKWGPDQQKAYQEIKQALLTAPALGLPDLTKPFELFVDEKQGYAKGVLTQKLGPWRRPVAYLSKKLDPVAAGWPPCLRMVAAIAVLTKDVGKLTMGQPLVILAPHAVEALVKQPPDRWLSNARMTHYQALLLDTDRVQFGPIVALNPATLLPLPEEGLQHDCLDILAEAHGTRPDLTDQPLPDADHTWYTDGSSFLQEGQRRAGAAVTTETEVIWAKALPAGTSAQRAELIALTQALKMAAGKKLNVYTDSRYAFATAHIHGEIYRRRGWLTSEGKEIKNKDEILALLKALFLPKRLSIIHCPGHQKGNHAEARGNRMADQAAREVATRETPETSTLLAGKRTADGSEFEKRTADGSEFESPKKKAKVE

SEQ ID NO: 7393 - protein, 2094 aa, synthetic construct
MPAAKRVKLDGGDKKYSIGLDIGTNSVGWAVITDEYKVPSKKFKVLGNTDRHSIKKNLIGALLFDSGETAEATRLKRTARRRYTRRKNRICYLQEIFSNEMAKVDDSFFHRLEESFLVEEDKKHERHPIFGNIVDEVAYHEKYPTIYHLRKKLVDSTDKADLRLIYLALAHMIKFRGHFLIEGDLNPDNSDVDKLFIQLVQTYNQLFEENPINASGVDAKAILSARLSKSRRLENLIAQLPGEKKNGLFGNLIALSLGLTPNFKSNFDLAEDAKLQLSKDTYDDDLDNLLAQIGDQYADLFLAAKNLSDAILLSDILRVNTEITKAPLSASMIKRYDEHHQDLTLLKALVRQQLPEKYKEIFFDQSKNGYAGYIDGGASQEEFYKFIKPILEKMDGTEELLVKLNREDLLRKQRTFDNGSIPHQIHLGELHAILRRQEDFYPFLKDNREKIEKILTFRIPYYVGPLARGNSRFAWMTRKSEETITPWNFEEVVDKGASAQSFIERMTNFDKNLPNEKVLPKHSLLYEYFTVYNELTKVKYVTEGMRKPAFLSGEQKKAIVDLLFKTNRKVTVKQLKEDYFKKIECFDSVEISGVEDRFNASLGTYHDLLKIIKDKDFLDNEENEDILEDIVLTLTLFEDREMIEERLKTYAHLFDDKVMKQLKRRRYTGWGRLSRKLINGIRDKQSGKTILDFLKSDGFANRNFMQLIHDDSLTFKEDIQKAQVSGQGDSLHEHIANLAGSPAIKKGILQTVKVVDELVKVMGRHKPENIVIEMARENQTTQKGQKNSRERMKRIEEGIKELGSQILKEHPVENTQLQNEKLYLYYLQNGRDMYVDQELDINRLSDYDVDHIVPQSFLKDDSIDNKVLTRSDKARGKSDNVPSEEVVKKMKNYWRQLLNAKLITQRKFDNLTKAERGGLSELDKAGFIKRQLVETRQITKHVAQILDSRMNTKYDENDKLIREVKVITLKSKLVSDFRKDFQFYKVREINNYHHAHDAYLNAVVGTALIKKYPKLESEFVYGDYKVYDVRKMIAKSEQEIGKATAKYFFYSNIMNFFKTEITLANGEIRKRPLIETNGETGEIVWDKGRDFATVRKVLSMPQVNIVKKTEVQTGGFSKESILPKRNSDKLIARKKDWDPKKYGGFDSPTVAYSVLVVAKVEKGKSKKLKSVKELLGITIMERSSFEKNPIDFLEAKGYKEVKKDLIIKLPKYSLFELENGRKRMLASAGELQKGNELALPSKYVNFLYLASHYEKLKGSPEDNEQKQLFVEQHKHYLDEIIEQISEFSKRVILADANLDKVLSAYNKHRDKPIREQAENIIHLFTLTNLGAPAAFKYFDTTIDRKRYTSTKEVLDATLIHQSITGLYETRIDLSQLGGDGGGSSGGGPAPGGTLNIEDEHRLHETSKEPDVSLGSTWLSDFPQAWAETGGMGLAVRQAPLIIPLKATSTPVSIKQYPMSQEARLGIKPHIQRLLDQGILVPCQSPWNTPLLPVKKPGTNDYRPVQDLREVNKRVEDIHPTVPNPYNLLSGLPPSHQWYTVLDLKDAFFCLRLHPTSQPLFAFEWRDPEMGISGQLTWTRLPQGFKNSPTLFNEALHRDLADFRIQHPDLILLQYVDDLLLAATSELDCQQGTRALLQTLGNLGYRASAKKAQICQKQVKYLGYLLKEGQRWLTEARKETVMGQPTPKTPRQLREFLGTAGFCRLWIPGFAEMAAPLYPLTKPGTLFNWGPDQQKAYQEIKQALLTAPALGLPDLTKPFELFVDEKQGYAKGVLTQKLGPWRRPVAYLSKKLDPVAAGWPPCLRMVAAIAVLTKDAGKLTMGQPLVILAPHAVEALVKQPPDRWLSNARMTHYQALLLDTDRVQFGPVVALNPATLLPLPEEGLQHNCLDILAEAHGTRPDLTDQPLPDADHTWYTDGSSLLQEGQRKAGAAVTTETEVIWAKALPAGTSAQRAELIALTQALKMAEGKKLNVYTDSRYAFATAHIHGEIYRRRGWLTSEGKEIKNKDEILALLKALFLPKRLSIIHCPGHQKGHSAEARGNRMADQAARKAAITETPDTSTLLAGKRTADGSEFEKRTADGSEFESPKKKAKVE

SEQ ID NO: 7394 - protein, 2094 aa, synthetic construct; identical to SEQ ID NO: 7393

SEQ ID NO: 7395 - protein, 2088 aa, synthetic construct; identical to SEQ ID NO: 4532

SEQ ID NO: 7396 - protein, 2088 aa, synthetic construct
MPAAKRVKLDGGDKKYSIGLDIGTNSVGWAVITDEYKVPSKKFKVLGNTDRHSIKKNLIGALLFDSGETAEATRLKRTARRRYTRRKNRICYLQEIFSNEMAKVDDSFFHRLEESFLVEEDKKHERHPIFGNIVDEVAYHEKYPTIYHLRKKLVDSTDKADLRLIYLALAHMIKFRGHFLIEGDLNPDNSDVDKLFIQLVQTYNQLFEENPINASGVDAKAILSARLSKSRRLENLIAQLPGEKKNGLFGNLIALSLGLTPNFKSNFDLAEDAKLQLSKDTYDDDLDNLLAQIGDQYADLFLAAKNLSDAILLSDILRVNTEITKAPLSASMIKRYDEHHQDLTLLKALVRQQLPEKYKEIFFDQSKNGYAGYIDGGASQEEFYKFIKPILEKMDGTEELLVKLNREDLLRKQRTFDNGSIPHQIHLGELHAILRRQEDFYPFLKDNREKIEKILTFRIPYYVGPLARGNSRFAWMTRKSEETITPWNFEEVVDKGASAQSFIERMTNFDKNLPNEKVLPKHSLLYEYFTVYNELTKVKYVTEGMRKPAFLSGEQKKAIVDLLFKTNRKVTVKQLKEDYFKKIECFDSVEISGVEDRFNASLGTYHDLLKIIKDKDFLDNEENEDILEDIVLTLTLFEDREMIEERLKTYAHLFDDKVMKQLKRRRYTGWGRLSRKLINGIRDKQSGKTILDFLKSDGFANRNFMQLIHDDSLTFKEDIQKAQVSGQGDSLHEHIANLAGSPAIKKGILQTVKVVDELVKVMGRHKPENIVIEMARENQTTQKGQKNSRERMKRIEEGIKELGSQILKEHPVENTQLQNEKLYLYYLQNGRDMYVDQELDINRLSDYDVDHIVPQSFLKDDSIDNKVLTRSDKARGKSDNVPSEEVVKKMKNYWRQLLNAKLITQRKFDNLTKAERGGLSELDKAGFIKRQLVETRQITKHVAQILDSRMNTKYDENDKLIREVKVITLKSKLVSDFRKDFQFYKVREINNYHHAHDAYLNAVVGTALIKKYPKLESEFVYGDYKVYDVRKMIAKSEQEIGKATAKYFFYSNIMNFFKTEITLANGEIRKRPLIETNGETGEIVWDKGRDFATVRKVLSMPQVNIVKKTEVQTGGFSKESILPKRNSDKLIARKKDWDPKKYGGFDSPTVAYSVLVVAKVEKGKSKKLKSVKELLGITIMERSSFEKNPIDFLEAKGYKEVKKDLIIKLPKYSLFELENGRKRMLASAGELQKGNELALPSKYVNFLYLASHYEKLKGSPEDNEQKQLFVEQHKHYLDEIIEQISEFSKRVILADANLDKVLSAYNKHRDKPIREQAENIIHLFTLTNLGAPAAFKYFDTTIDRKRYTSTKEVLDATLIHQSITGLYETRIDLSQLGGDGGGSSGGGPAPGGTLQLDDEYRLYSPLVKPDQNIQFWLEQFPQAWAETAGMGLAKQVPPQVIQLKASATPVSVRQYPLSKEAQEGIRPHVQRLIQQGILVPVQSPWNTPLLPVRKPGTNDYRPVQDLREVNKRVQDIHPTVPNPYNLLCALPPQRSWYTVLDLKDAFFCLRLHPTSQPLFAFEWRDPGTGRTGQLTWTRLPQGFKNSPTIFDEALHRDLANFRIQHPQVTLLQYVDDLLLAGATKQDCLEGTKALLLELSDLGYRASAKKAQICRREVTYLGYSLRDGQRWLTEARKKTVVQIPAPTTAKQVREFLGTAGFCRLWIPGFATLAAPLYPLTKEKGEFSWAPEHQKAFDAIKKALLSAPALALPDVTKPFTLYVDERKGVARGVLTQTLGPWRRPVAYLSKKLDPVASGWPVCLKAIAAVAILVKDADKLTLGQNITVIAPHALENIVRQPPDRWMTNARMTHYQSLLLTERVTFAPPAALNPATLLPEETDEPVTHDCHQLLIEETGVRKDLTDIPLTGEVLTWFTDGSSYVVEGKRMAGAAVVDGTRTIWASSLPEGTSAQKAELMALTQALRLAEGKSINIYTDSRYAFATAHVHGAIYKQRGLLTSAGREIKNKEEILSLLEALHLPKRLAIIHCPGHQKAKDPISRGNQMADRVAKQAAQGVNLLAGKRTADGSEFEKRTADGSEFESPKKKAKVE

SEQ ID NO: 7397 - protein, 2088 aa, synthetic construct; identical to SEQ ID NO: 4532

SEQ ID NO: 7398 - protein, 2085 aa, synthetic construct
MPAAKRVKLDGGDKKYSIGLDIGTNSVGWAVITDEYKVPSKKFKVLGNTDRHSIKKNLIGALLFDSGETAEATRLKRTARRRYTRRKNRICYLQEIFSNEMAKVDDSFFHRLEESFLVEEDKKHERHPIFGNIVDEVAYHEKYPTIYHLRKKLVDSTDKADLRLIYLALAHMIKFRGHFLIEGDLNPDNSDVDKLFIQLVQTYNQLFEENPINASGVDAKAILSARLSKSRRLENLIAQLPGEKKNGLFGNLIALSLGLTPNFKSNFDLAEDAKLQLSKDTYDDDLDNLLAQIGDQYADLFLAAKNLSDAILLSDILRVNTEITKAPLSASMIKRYDEHHQDLTLLKALVRQQLPEKYKEIFFDQSKNGYAGYIDGGASQEEFYKFIKPILEKMDGTEELLVKLNREDLLRKQRTFDNGSIPHQIHLGELHAILRRQEDFYPFLKDNREKIEKILTFRIPYYVGPLARGNSRFAWMTRKSEETITPWNFEEVVDKGASAQSFIERMTNFDKNLPNEKVLPKHSLLYEYFTVYNELTKVKYVTEGMRKPAFLSGEQKKAIVDLLFKTNRKVTVKQLKEDYFKKIECFDSVEISGVEDRFNASLGTYHDLLKIIKDKDFLDNEENEDILEDIVLTLTLFEDREMIEERLKTYAHLFDDKVMKQLKRRRYTGWGRLSRKLINGIRDKQSGKTILDFLKSDGFANRNFMQLIHDDSLTFKEDIQKAQVSGQGDSLHEHIANLAGSPAIKKGILQTVKVVDELVKVMGRHKPENIVIEMARENQTTQKGQKNSRERMKRIEEGIKELGSQILKEHPVENTQLQNEKLYLYYLQNGRDMYVDQELDINRLSDYDVDHIVPQSFLKDDSIDNKVLTRSDKARGKSDNVPSEEVVKKMKNYWRQLLNAKLITQRKFDNLTKAERGGLSELDKAGFIKRQLVETRQITKHVAQILDSRMNTKYDENDKLIREVKVITLKSKLVSDFRKDFQFYKVREINNYHHAHDAYLNAVVGTALIKKYPKLESEFVYGDYKVYDVRKMIAKSEQEIGKATAKYFFYSNIMNFFKTEITLANGEIRKRPLIETNGETGEIVWDKGRDFATVRKVLSMPQVNIVKKTEVQTGGFSKESILPKRNSDKLIARKKDWDPKKYGGFDSPTVAYSVLVVAKVEKGKSKKLKSVKELLGITIMERSSFEKNPIDFLEAKGYKEVKKDLIIKLPKYSLFELENGRKRMLASAGELQKGNELALPSKYVNFLYLASHYEKLKGSPEDNEQKQLFVEQHKHYLDEIIEQISEFSKRVILADANLDKVLSAYNKHRDKPIREQAENIIHLFTLTNLGAPAAFKYFDTTIDRKRYTSTKEVLDATLIHQSITGLYETRIDLSQLGGDGGGSSGGGPAPGGIPWLMKKPLQLTTLVPLQEYEERLLKQTMLTGSYKEKLQSLFLKYDALWQHWENQVGHRRIKPHHIATGTVNPRPQKQYPINPKAKASIQTVINDLLKQGVLIQQNSIMNTPVYPVPKPDGKWRMVLDYREVNKTIPLIAAQNQHSAGILSSIFRGKYKTTLDLSNGFWAHSITPESYWLTAFTWLGQQYCWTRLPQGFLNSPALFNADVVDLLKEVPNVQVYVDDIYISHDDPREHLEQLEKVFSLLLNAGYVVSLKKSEIAQHEVEFLGFNITKEGRGLTETFKQKLLNITPPRDLKQLQSILGKLNFARNFIPNFSELVKPLYNIIATAPGKYITWTTDNSQQLQNIISMLNSAENLEERNPEVRLIMKVNTSPSAGYIRFYNEFAKRPIMYLNYVYTKAEVKFTNTEKLLTTIHKGLIKALDLGMGQEILVYSPIVSMTKIQKTPLPERKALPIRWITWMSYLEDPRIQFHYDKTLPELQQVPTVTDDIIAKIKHPSEFSMVFYTDGSAIKHPNVNKSHNAGMGIAQVQFKPEFTVINTWSIPLGDHTAQLAEVAAVEFACKKALKIDGPVLIVTDSFYVAESVNKELPYWQSNGFFNNKKKPLKHVSKWKSIADCIQLKPDIIIIHEKGHQPTASTFHTEGNNLADKLATQGSYVVNAGKRTADGSEFEKRTADGSEFESPKKKAKVE

SEQ ID NO: 7399 - protein, 2174 aa, synthetic construct
MPAAKRVKLDGGDKKYSIGLDIGTNSVGWAVITDEYKVPSKKFKVLGNTDRHSIKKNLIGALLFDSGETAEATRLKRTARRRYTRRKNRICYLQEIFSNEMAKVDDSFFHRLEESFLVEEDKKHERHPIFGNIVDEVAYHEKYPTIYHLRKKLVDSTDKADLRLIYLALAHMIKFRGHFLIEGDLNPDNSDVDKLFIQLVQTYNQLFEENPINASGVDAKAILSARLSKSRRLENLIAQLPGEKKNGLFGNLIALSLGLTPNFKSNFDLAEDAKLQLSKDTYDDDLDNLLAQIGDQYADLFLAAKNLSDAILLSDILRVNTEITKAPLSASMIKRYDEHHQDLTLLKALVRQQLPEKYKEIFFDQSKNGYAGYIDGGASQEEFYKFIKPILEKMDGTEELLVKLNREDLLRKQRTFDNGSIPHQIHLGELHAILRRQEDFYPFLKDNREKIEKILTFRIPYYVGPLARGNSRFAWMTRKSEETITPWNFEEVVDKGASAQSFIERMTNFDKNLPNEKVLPKHSLLYEYFTVYNELTKVKYVTEGMRKPAFLSGEQKKAIVDLLFKTNRKVTVKQLKEDYFKKIECFDSVEISGVEDRFNASLGTYHDLLKIIKDKDFLDNEENEDILEDIVLTLTLFEDREMIEERLKTYAHLFDDKVMKQLKRRRYTGWGRLSRKLINGIRDKQSGKTILDFLKSDGFANRNFMQLIHDDSLTFKEDIQKAQVSGQGDSLHEHIANLAGSPAIKKGILQTVKVVDELVKVMGRHKPENIVIEMARENQTTQKGQKNSRERMKRIEEGIKELGSQILKEHPVENTQLQNEKLYLYYLQNGRDMYVDQELDINRLSDYDVDHIVPQSFLKDDSIDNKVLTRSDKARGKSDNVPSEEVVKKMKNYWRQLLNAKLITQRKFDNLTKAERGGLSELDKAGFIKRQLVETRQITKHVAQILDSRMNTKYDENDKLIREVKVITLKSKLVSDFRKDFQFYKVREINNYHHAHDAYLNAVVGTALIKKYPKLESEFVYGDYKVYDVRKMIAKSEQEIGKATAKYFFYSNIMNFFKTEITLANGEIRKRPLIETNGETGEIVWDKGRDFATVRKVLSMPQVNIVKKTEVQTGGFSKESILPKRNSDKLIARKKDWDPKKYGGFDSPTVAYSVLVVAKVEKGKSKKLKSVKELLGITIMERSSFEKNPIDFLEAKGYKEVKKDLIIKLPKYSLFELENGRKRMLASAGELQKGNELALPSKYVNFLYLASHYEKLKGSPEDNEQKQLFVEQHKHYLDEIIEQISEFSKRVILADANLDKVLSAYNKHRDKPIREQAENIIHLFTLTNLGAPAAFKYFDTTIDRKRYTSTKEVLDATLIHQSITGLYETRIDLSQLGGDGGGSSGGGPAPGGMDPLQLLQPLEAEIKGTKLKAHWNSGATITCVPQAFLEEEVPIKNIWIKTIHGEKEQPVYYLTFKIQGRKVEAEVISSPYDYILVSPSDIPWLMKKPLQLTTLVPLQEYEERLLKQTMLTGSYKEKLQSLFLKYDALWQHWENQVGHRRIKPHHIATGTVNPRPQKQYPINPKAKASIQTVINDLLKQGVLIQQNSIMNTPVYPVPKPDGKWRMVLDYREVNKTIPLIAAQNQHSAGILSSIFRGKYKTTLDLSNGFWAHSITPESYWLTAFTWLGQQYCWTRLPQGFLNSPALFNADVVDLLKEVPNVQVYVDDIYISHDDPREHLEQLEKVFSLLLNAGYVVSLKKSEIAQHEVEFLGFNITKEGRGLTETFKQKLLNITPPRDLKQLQSILGLLNFARNFIPNFSELVKPLYNIIATAPGKYITWTTDNSQQLQNIISMLNSAENLEERNPEVRLIMKVNTSPSAGYIRFYNEFAKRPIMYLNYVYTKAEVKFTNTEKLLTTIHKGLIKALDLGMGQEILVYSPIVSMTKIQKTPLPERKALPIRWITWMSYLEDPRIQFHYDKTLPELQQVPTVTDDIIAKIKHPSEFSMVFYTDGSAIKHPNVNKSHNAGMGIAQVQFKPEFTVINTWSIPLGDHTAQLAEVAAVEFACKKALKIDGPVLIVTDSFYVAESVNKELPYWQSNGFFNNKKKPLKHVSKWKSIADCIQLKPDIIIIHEKGHQPTASTFHTEGNNLADKLATQGSYVVNAGKRTADGSEFEKRTADGSEFESPKKKAKVE

SEQ ID NO: 7400 - protein, 2092 aa, synthetic construct
MPAAKRVKLDGGDKKYSIGLDIGTNSVGWAVITDEYKVPSKKFKVLGNTDRHSIKKNLIGALLFDSGETAEATRLKRTARRRYTRRKNRICYLQEIFSNEMAKVDDSFFHRLEESFLVEEDKKHERHPIFGNIVDEVAYHEKYPTIYHLRKKLVDSTDKADLRLIYLALAHMIKFRGHFLIEGDLNPDNSDVDKLFIQLVQTYNQLFEENPINASGVDAKAILSARLSKSRRLENLIAQLPGEKKNGLFGNLIALSLGLTPNFKSNFDLAEDAKLQLSKDTYDDDLDNLLAQIGDQYADLFLAAKNLSDAILLSDILRVNTEITKAPLSASMIKRYDEHHQDLTLLKALVRQQLPEKYKEIFFDQSKNGYAGYIDGGASQEEFYKFIKPILEKMDGTEELLVKLNREDLLRKQRTFDNGSIPHQIHLGELHAILRRQEDFYPFLKDNREKIEKILTFRIPYYVGPLARGNSRFAWMTRKSEETITPWNFEEVVDKGASAQSFIERMTNFDKNLPNEKVLPKHSLLYEYFTVYNELTKVKYVTEGMRKPAFLSGEQKKAIVDLLFKTNRKVTVKQLKEDYFKKIECFDSVEISGVEDRFNASLGTYHDLLKIIKDKDFLDNEENEDILEDIVLTLTLFEDREMIEERLKTYAHLFDDKVMKQLKRRRYTGWGRLSRKLINGIRDKQSGKTILDFLKSDGFANRNFMQLIHDDSLTFKEDIQKAQVSGQGDSLHEHIANLAGSPAIKKGILQTVKVVDELVKVMGRHKPENIVIEMARENQTTQKGQKNSRERMKRIEEGIKELGSQILKEHPVENTQLQNEKLYLYYLQNGRDMYVDQELDINRLSDYDVDHIVPQSFLKDDSIDNKVLTRSDKARGKSDNVPSEEVVKKMKNYWRQLLNAKLITQRKFDNLTKAERGGLSELDKAGFIKRQLVETRQITKHVAQILDSRMNTKYDENDKLIREVKVITLKSKLVSDFRKDFQFYKVREINNYHHAHDAYLNAVVGTALIKKYPKLESEFVYGDYKVYDVRKMIAKSEQEIGKATAKYFFYSNIMNFFKTEITLANGEIRKRPLIETNGETGEIVWDKGRDFATVRKVLSMPQVNIVKKTEVQTGGFSKESILPKRNSDKLIARKKDWDPKKYGGFDSPTVAYSVLVVAKVEKGKSKKLKSVKELLGITIMERSSFEKNPIDFLEAKGYKEVKKDLIIKLPKYSLFELENGRKRMLASAGELQKGNELALPSKYVNFLYLASHYEKLKGSPEDNEQKQLFVEQHKHYLDEIIEQISEFSKRVILADANLDKVLSAYNKHRDKPIREQAENIIHLFTLTNLGAPAAFKYFDTTIDRKRYTSTKEVLDATLIHQSITGLYETRIDLSQLGGDGGGSSGGGPAPGGVLNLEEEYRLHEKPVPSSIDPSWLQLFPTVWAERAGMGLANQVPPVVVELRSGASPVAVRQYPMSKEAREGIRPHIQRFLDLGVLVPCQSPWNTPLLPVKKPGTNDYRPVQDLREINKRVQDIHPTVPNPYNLLSSLPPSHTWYSVLDLKDAFFCLKLHPNSQPLFAFEWRDPEKGNTGQLTWTRLPQGFKNSPTLFNEALHRDLAPFRALNPQVVLLQYVDDLLVAAPTYRDCKEGTQKLLQELSKLGYRVSAKKAQLCQKEVTYLGYLLKEGKRWLTPARKATVMKIPPPTTPRQVREFLGKAGFCRLFIPGFASLAAPLYPLTKPSIPFIWTEEHQKAFDRIKEALLSAPALALPDLTKPFTLYVDERAGVARGVLTQTLGPWRRPVAYLSKKLDPVASGWPTCLKAVAAVALLLKDADKLTLGQNVTVIASHSLESIVRQPPDRWMTNARMTHYQSLLLNERVSFAPPAVLNPATLLPVESEATPVHRCSEILAEETGTRRDLKDQPLPGVPAWYTDGSSFIAEGKRRAGAAIVDGKRTVWASSLPEGTSAQKAELVALTQALRLAEGKDINIYTDSRYAFATAHIHGAIYKQRGWLTSAGKDIKNKEEILALLEAIHLPKRVAIIHCPGHQKGNDPVATGNRRADEAAKQAALSTRVLAETTKPAGKRTADGSEFEKRTADGSEFESPKKKAKVE

SEQ ID NO: 7401 - protein, 2094 aa, synthetic construct
MPAAKRVKLDGGDKKYSIGLDIGTNSVGWAVITDEYKVPSKKFKVLGNTDRHSIKKNLIGALLFDSGETAEATRLKRTARRRYTRRKNRICYLQEIFSNEMAKVDDSFFHRLEESFLVEEDKKHERHPIFGNIVDEVAYHEKYPTIYHLRKKLVDSTDKADLRLIYLALAHMIKFRGHFLIEGDLNPDNSDVDKLFIQLVQTYNQLFEENPINASGVDAKAILSARLSKSRRLENLIAQLPGEKKNGLFGNLIALSLGLTPNFKSNFDLAEDAKLQLSKDTYDDDLDNLLAQIGDQYADLFLAAKNLSDAILLSDILRVNTEITKAPLSASMIKRYDEHHQDLTLLKALVRQQLPEKYKEIFFDQSKNGYAGYIDGGASQEEFYKFIKPILEKMDGTEELLVKLNREDLLRKQRTFDNGSIPHQIHLGELHAILRRQEDFYPFLKDNREKIEKILTFRIPYYVGPLARGNSRFAWMTRKSEETITPWNFEEVVDKGASAQSFIERMTNFDKNLPNEKVLPKHSLLYEYFTVYNELTKVKYVTEGMRKPAFLSGEQKKAIVDLLFKTNRKVTVKQLKEDYFKKIECFDSVEISGVEDRFNASLGTYHDLLKIIKDKDFLDNEENEDILEDIVLTLTLFEDREMIEERLKTYAHLFDDKVMKQLKRRRYTGWGRLSRKLINGIRDKQSGKTILDFLKSDGFANRNFMQLIHDDSLTFKEDIQKAQVSGQGDSLHEHIANLAGSPAIKKGILQTVKVVDELVKVMGRHKPENIVIEMARENQTTQKGQKNSRERMKRIEEGIKELGSQILKEHPVENTQLQNEKLYLYYLQNGRDMYVDQELDINRLSDYDVDHIVPQSFLKDDSIDNKVLTRSDKARGKSDNVPSEEVVKKMKNYWRQLLNAKLITQRKFDNLTKAERGGLSELDKAGFIKRQLVETRQITKHVAQILDSRMNTKYDENDKLIREVKVITLKSKLVSDFRKDFQFYKVREINNYHHAHDAYLNAVVGTALIKKYPKLESEFVYGDYKVYDVRKMIAKSEQEIGKATAKYFFYSNIMNFFKTEITLANGEIRKRPLIETNGETGEIVWDKGRDFATVRKVLSMPQVNIVKKTEVQTGGFSKESILPKRNSDKLIARKKDWDPKKYGGFDSPTVAYSVLVVAKVEKGKSKKLKSVKELLGITIMERSSFEKNPIDFLEAKGYKEVKKDLIIKLPKYSLFELENGRKRMLASAGELQKGNELALPSKYVNFLYLASHYEKLKGSPEDNEQKQLFVEQHKHYLDEIIEQISEFSKRVILADANLDKVLSAYNKHRDKPIREQAENIIHLFTLTNLGAPAAFKYFDTTIDRKRYTSTKEVLDATLIHQSITGLYETRIDLSQLGGDGGGSSGGGPAPGGTLNIEDEYRLHETSKEPDVPLGSTWLSDFPQAWAETGGMGLAVRQAPLIIPLKATSTPVSIKQYPMSQEARLGIKPHIQRLLDQGILVPCQSPWNTPLLPVKKPGTNDYRPVQDLREVNKRVEDIHPTVPNPYNLLSGLPPSHQWYTVLDLKDAFFCLRLHPTSQPLFAFEWRDPEMGISGQLTWTRLPQGFKNSPTLFNEALHRDLADFRIQHPDLILLQYVDDLLLAATSEQDCQRGTRALLQTLGNLGYRASAKKAQICQKQVKYLGYLLKEGQRWLTEARKETVMGQPTPKTPRQLREFLGTAGFCRLWIPGFAEMAAPLYPLTKPGTLFNWGPDQQKAYQEIKQALLTAPALGLPDLTKPFELFVDEKQGYAKGVLTQKLGPWRRPVAYLSKKLDPVAAGWPPCLRMVAAIAVLTKDAGKLTMGQPLVILAPHAVEALVKQPPDRWLSNARMTHYQAMLLDTDRVQFGPVVALNPATLLPLPEKEAPHDCLEILAETHGTRPDLTDQPIPDADYTWYTDGSSFLQEGQRRAGAAVTTETEVIWARALPAGTSAQRAELIALTQALKMAEGKKLNVYTDSRYAFATAHVHGEIYRRRGWLTSEGREIKNKNEILALLKALFLPKRLSIIHCPGHQKGNSAEARGNRMADQAAREAAMKAVLETSTLLAGKRTADGSEFEKRTADGSEFESPKKKAKVE

SEQ ID NO: 7402 - protein, 2096 aa, synthetic construct
MPAAKRVKLDGGDKKYSIGLDIGTNSVGWAVITDEYKVPSKKFKVLGNTDRHSIKKNLIGALLFDSGETAEATRLKRTARRRYTRRKNRICYLQEIFSNEMAKVDDSFFHRLEESFLVEEDKKHERHPIFGNIVDEVAYHEKYPTIYHLRKKLVDSTDKADLRLIYLALAHMIKFRGHFLIEGDLNPDNSDVDKLFIQLVQTYNQLFEENPINASGVDAKAILSARLSKSRRLENLIAQLPGEKKNGLFGNLIALSLGLTPNFKSNFDLAEDAKLQLSKDTYDDDLDNLLAQIGDQYADLFLAAKNLSDAILLSDILRVNTEITKAPLSASMIKRYDEHHQDLTLLKALVRQQLPEKYKEIFFDQSKNGYAGYIDGGASQEEFYKFIKPILEKMDGTEELLVKLNREDLLRKQRTFDNGSIPHQIHLGELHAILRRQEDFYPFLKDNREKIEKILTFRIPYYVGPLARGNSRFAWMTRKSEETITPWNFEEVVDKGASAQSFIERMTNFDKNLPNEKVLPKHSLLYEYFTVYNELTKVKYVTEGMRKPAFLSGEQKKAIVDLLFKTNRKVTVKQLKEDYFKKIECFDSVEISGVEDRFNASLGTYHDLLKIIKDKDFLDNEENEDILEDIVLTLTLFEDREMIEERLKTYAHLFDDKVMKQLKRRRYTGWGRLSRKLINGIRDKQSGKTILDFLKSDGFANRNFMQLIHDDSLTFKEDIQKAQVSGQGDSLHEHIANLAGSPAIKKGILQTVKVVDELVKVMGRHKPENIVIEMARENQTTQKGQKNSRERMKRIEEGIKELGSQILKEHPVENTQLQNEKLYLYYLQNGRDMYVDQELDINRLSDYDVDHIVPQSFLKDDSIDNKVLTRSDKARGKSDNVPSEEVVKKMKNYWRQLLNAKLITQRKFDNLTKAERGGLSELDKAGFIKRQLVETRQITKHVAQILDSRMNTKYDENDKLIREVKVITLKSKLVSDFRKDFQFYKVREINNYHHAHDAYLNAVVGTALIKKYPKLESEFVYGDYKVYDVRKMIAKSEQEIGKATAKYFFYSNIMNFFKTEITLANGEIRKRPLIETNGETGEIVWDKGRDFATVRKVLSMPQVNIVKKTEVQTGGFSKESILPKRNSDKLIARKKDWDPKKYGGFDSPTVAYSVLVVAKVEKGKSKKLKSVKELLGITIMERSSFEKNPIDFLEAKGYKEVKKDLIIKLPKYSLFELENGRKRMLASAGELQKGNELALPSKYVNFLYLASHYEKLKGSPEDNEQKQLFVEQHKHYLDEIIEQISEFSKRVILADANLDKVLSAYNKHRDKPIREQAENIIHLFTLTNLGAPAAFKYFDTTIDRKRYTSTKEVLDATLIHQSITGLYETRIDLSQLGGDGGGSSPAPGGGGGTAPLEEEYRLFLEAPIQNVTLLEQWKREIPKVWAEINPPGLASTQAPIHVQLLSTALPVRVRQYPITLEAKRSLRETIRKFRAAGILRPVHSPWNTPLLPVRKSGTSEYRMVQDLREVNKRVETIHPTVPNPYTLLSLLPPDRIWYSVLDLKDAFFCIPLAPESQLIFAFEWADAEEGESGQLTWTRLPQGFKNSPTLFNEALNRDLQGFRLDHPSVSLLQYVDDLLIAADTQAACLSATRDLLMTLAELGYRVSGKKAQLCQEEVTYLGFKIHKGSRSLSNSRTQAILQIPVPKTKRQVREFLGTIGYCRLWIPGFAELAQPLYAATRPGNDPLVWGEKEEEAFQSLKLALTQPPALALPSLDKPFQLFVEETSGAAKGVLTQALGPWKRPVAYLSKRLDPVAAGWPRCLRAIAAAALLTREASKLTFGQDIEITSSHNLESLLRSPPDKWLTNARITQYQVLLLDPPRVRFKQTAALNPATLLPETDDTLPIHHCLDTLDSLTSTRPDLTDQPLAQAEATLFTDGSSYIRDGKRYAGAAVVTLDSVIWAEPLPIGTSAQKAELIALTKALEWSKDKSVNIYTDSRYAFATLHVHGMIYRERGWLTAGGKAIKNAPEILALLTAVWLPKRVAVMHCKGHQKDDAPTSTGNRRADEVAREVAIRPLSTQATISAGKRTADGSEFEKRTADGSEFESPKKKAKVE

SEQ ID NO: 7403 - protein, 2096 aa, synthetic construct
MPAAKRVKLDGGDKKYSIGLDIGTNSVGWAVITDEYKVPSKKFKVLGNTDRHSIKKNLIGALLFDSGETAEATRLKRTARRRYTRRKNRICYLQEIFSNEMAKVDDSFFHRLEESFLVEEDKKHERHPIFGNIVDEVAYHEKYPTIYHLRKKLVDSTDKADLRLIYLALAHMIKFRGHFLIEGDLNPDNSDVDKLFIQLVQTYNQLFEENPINASGVDAKAILSARLSKSRRLENLIAQLPGEKKNGLFGNLIALSLGLTPNFKSNFDLAEDAKLQLSKDTYDDDLDNLLAQIGDQYADLFLAAKNLSDAILLSDILRVNTEITKAPLSASMIKRYDEHHQDLTLLKALVRQQLPEKYKEIFFDQSKNGYAGYIDGGASQEEFYKFIKPILEKMDGTEELLVKLNREDLLRKQRTFDNGSIPHQIHLGELHAILRRQEDFYPFLKDNREKIEKILTFRIPYYVGPLARGNSRFAWMTRKSEETITPWNFEEVVDKGASAQSFIERMTNFDKNLPNEKVLPKHSLLYEYFTVYNELTKVKYVTEGMRKPAFLSGEQKKAIVDLLFKTNRKVTVKQLKEDYFKKIECFDSVEISGVEDRFNASLGTYHDLLKIIKDKDFLDNEENEDILEDIVLTLTLFEDREMIEERLKTYAHLFDDKVMKQLKRRRYTGWGRLSRKLINGIRDKQSGKTILDFLKSDGFANRNFMQLIHDDSLTFKEDIQKAQVSGQGDSLHEHIANLAGSPAIKKGILQTVKVVDELVKVMGRHKPENIVIEMARENQTTQKGQKNSRERMKRIEEGIKELGSQILKEHPVENTQLQNEKLYLYYLQNGRDMYVDQELDINRLSDYDVDHIVPQSFLKDDSIDNKVLTRSDKARGKSDNVPSEEVVKKMKNYWRQLLNAKLITQRKFDNLTKAERGGLSELDKAGFIKRQLVETRQITKHVAQILDSRMNTKYDENDKLIREVKVITLKSKLVSDFRKDFQFYKVREINNYHHAHDAYLNAVVGTALIKKYPKLESEFVYGDYKVYDVRKMIAKSEQEIGKATAKYFFYSNIMNFFKTEITLANGEIRKRPLIETNGETGEIVWDKGRDFATVRKVLSMPQVNIVKKTEVQTGGFSKESILPKRNSDKLIARKKDWDPKKYGGFDSPTVAYSVLVVAKVEKGKSKKLKSVKELLGITIMERSSFEKNPIDFLEAKGYKEVKKDLIIKLPKYSLFELENGRKRMLASAGELQKGNELALPSKYVNFLYLASHYEKLKGSPEDNEQKQLFVEQHKHYLDEIIEQISEFSKRVILADANLDKVLSAYNKHRDKPIREQAENIIHLFTLTNLGAPAAFKYFDTTIDRKRYTSTKEVLDATLIHQSITGLYETRIDLSQLGGDGGGSSPAPGGGGGTAPLEEEYRLFLEAPIQNVTLLEQWKREIPKVWAEINPPGLASTQAPIHVQLLSTALPVRVRQYPITLEAKRSLRETIRKFRAAGILRPVHSPWNTPLLPVRKSGTSEYRMVQDLREVNKRVETIHPTVPNPYTLLSLLPPDRIWYSVLDLKDAFFCIPLAPESQLIFAFEWADAEEGESGQLTWTRLPQGFKNSPTLFNEALNRDLQGFRLDHPSVSLLQYVDDLLIAADTQAACLSATRDLLMTLAELGYRVSGKKAQLCQEEVTYLGFKIHKGSRSLSNSRTQAILQIPVPKTKRQVREFLGKIGYCRLFIPGFAELAQPLYAATRPGNDPLVWGEKEEEAFQSLKLALTQPPALALPSLDKPFQLFVEETSGAAKGVLTQALGPWKRPVAYLSKRLDPVAAGWPRCLRAIAAAALLTREASKLTFGQDIEITSSHNLESLLRSPPDKWLTNARITQYQVLLLDPPRVRFKQTAALNPATLLPETDDTLPIHHCLDTLDSLTSTRPDLTDQPLAQAEATLFTDGSSYIRDGKRYAGAAVVTLDSVIWAEPLPIGTSAQKAELIALTKALEWSKDKSVNIYTDSRYAFATLHVHGMIYRERGWLTAGGKAIKNAPEILALLTAVWLPKRVAVMHCKGHQKDDAPTSTGNRRADEVAREVAIRPLSTQATISAGKRTADGSEFEKRTADGSEFESPKKKAKVE

SEQ ID NO: 7404 - protein, 2092 aa, synthetic construct
MPAAKRVKLDGGDKKYSIGLDIGTNSVGWAVITDEYKVPSKKFKVLGNTDRHSIKKNLIGALLFDSGETAEATRLKRTARRRYTRRKNRICYLQEIFSNEMAKVDDSFFHRLEESFLVEEDKKHERHPIFGNIVDEVAYHEKYPTIYHLRKKLVDSTDKADLRLIYLALAHMIKFRGHFLIEGDLNPDNSDVDKLFIQLVQTYNQLFEENPINASGVDAKAILSARLSKSRRLENLIAQLPGEKKNGLFGNLIALSLGLTPNFKSNFDLAEDAKLQLSKDTYDDDLDNLLAQIGDQYADLFLAAKNLSDAILLSDILRVNTEITKAPLSASMIKRYDEHHQDLTLLKALVRQQLPEKYKEIFFDQSKNGYAGYIDGGASQEEFYKFIKPILEKMDGTEELLVKLNREDLLRKQRTFDNGSIPHQIHLGELHAILRRQEDFYPFLKDNREKIEKILTFRIPYYVGPLARGNSRFAWMTRKSEETITPWNFEEVVDKGASAQSFIERMTNFDKNLPNEKVLPKHSLLYEYFTVYNELTKVKYVTEGMRKPAFLSGEQKKAIVDLLFKTNRKVTVKQLKEDYFKKIECFDSVEISGVEDRFNASLGTYHDLLKIIKDKDFLDNEENEDILEDIVLTLTLFEDREMIEERLKTYAHLFDDKVMKQLKRRRYTGWGRLSRKLINGIRDKQSGKTILDFLKSDGFANRNFMQLIHDDSLTFKEDIQKAQVSGQGDSLHEHIANLAGSPAIKKGILQTVKVVDELVKVMGRHKPENIVIEMARENQTTQKGQKNSRERMKRIEEGIKELGSQILKEHPVENTQLQNEKLYLYYLQNGRDMYVDQELDINRLSDYDVDHIVPQSFLKDDSIDNKVLTRSDKARGKSDNVPSEEVVKKMKNYWRQLLNAKLITQRKFDNLTKAERGGLSELDKAGFIKRQLVETRQITKHVAQILDSRMNTKYDENDKLIREVKVITLKSKLVSDFRKDFQFYKVREINNYHHAHDAYLNAVVGTALIKKYPKLESEFVYGDYKVYDVRKMIAKSEQEIGKATAKYFFYSNIMNFFKTEITLANGEIRKRPLIETNGETGEIVWDKGRDFATVRKVLSMPQVNIVKKTEVQTGGFSKESILPKRNSDKLIARKKDWDPKKYGGFDSPTVAYSVLVVAKVEKGKSKKLKSVKELLGITIMERSSFEKNPIDFLEAKGYKEVKKDLIIKLPKYSLFELENGRKRMLASAGELQKGNELALPSKYVNFLYLASHYEKLKGSPEDNEQKQLFVEQHKHYLDEIIEQISEFSKRVILADANLDKVLSAYNKHRDKPIREQAENIIHLFTLTNLGAPAAFKYFDTTIDRKRYTSTKEVLDATLIHQSITGLYETRIDLSQLGGDGGGSSPAPGGGGGVLNLEEEYRLHEKPVPSSIDPSWLQLFPTVWAERAGMGLANQVPPVVVELRSGASPVAVRQYPMSKEAREGIRPHIQKFLDLGVLVPCRSPWNTPLLPVKKPGTNDYRPVQDLREINKRVQDIHPTVPNPYNLLSSLPPSYTWYSVLDLKDAFFCLRLHPNSQPLFAFEWKDPEKGNTGQLTWTRLPQGFKNSPTLFNEALHRDLAPFRALNPQVVLLQYVDDLLVAAPTYEDCKKGTQKLLQELSKLGYRVSAKKAQLCQREVTYLGYLLKEGKRWLTPARKATVMKIPVPTTPRQVREFLGKAGFCRLFIPGFASLAAPLYPLTKPSIPFIWTEEHQQAFDHIKKALLSAPALALPDLTKPFTLYIDERAGVARGVLTQTLGPWRRPVAYLSKKLDPVASGWPTCLKAVAAVALLLKDADKLTLGQNVTVIASHSLESIVRQPPDRWMTNARMTHYQSLLLNERVSFAPPAVLNPATLLPVESEATPVHRCSEILAEETGTRRDLEDQPLPGVPTWYTDGSSFITEGKRRAGAPIVDGKRTVWASSLPEGTSAQKAELVALTQALRLAEGKNINIYTDSRYAFATAHIHGAIYKQRGWLTSAGKDIKNKEEILALLEAIHLPRRVAIIHCPGHQRGSNPVATGNRRADEAAKQAALSTRVLAGTTKPAGKRTADGSEFEKRTADGSEFESPKKKAKVE

SEQ ID NO: 7405 - protein, 2125 aa, synthetic construct
MPAAKRVKLDGGDKKYSIGLDIGTNSVGWAVITDEYKVPSKKFKVLGNTDRHSIKKNLIGALLFDSGETAEATRLKRTARRRYTRRKNRICYLQEIFSNEMAKVDDSFFHRLEESFLVEEDKKHERHPIFGNIVDEVAYHEKYPTIYHLRKKLVDSTDKADLRLIYLALAHMIKFRGHFLIEGDLNPDNSDVDKLFIQLVQTYNQLFEENPINASGVDAKAILSARLSKSRRLENLIAQLPGEKKNGLFGNLIALSLGLTPNFKSNFDLAEDAKLQLSKDTYDDDLDNLLAQIGDQYADLFLAAKNLSDAILLSDILRVNTEITKAPLSASMIKRYDEHHQDLTLLKALVRQQLPEKYKEIFFDQSKNGYAGYIDGGASQEEFYKFIKPILEKMDGTEELLVKLNREDLLRKQRTFDNGSIPHQIHLGELHAILRRQEDFYPFLKDNREKIEKILTFRIPYYVGPLARGNSRFAWMTRKSEETITPWNFEEVVDKGASAQSFIERMTNFDKNLPNEKVLPKHSLLYEYFTVYNELTKVKYVTEGMRKPAFLSGEQKKAIVDLLFKTNRKVTVKQLKEDYFKKIECFDSVEISGVEDRFNASLGTYHDLLKIIKDKDFLDNEENEDILEDIVLTLTLFEDREMIEERLKTYAHLFDDKVMKQLKRRRYTGWGRLSRKLINGIRDKQSGKTILDFLKSDGFANRNFMQLIHDDSLTFKEDIQKAQVSGQGDSLHEHIANLAGSPAIKKGILQTVKVVDELVKVMGRHKPENIVIEMARENQTTQKGQKNSRERMKRIEEGIKELGSQILKEHPVENTQLQNEKLYLYYLQNGRDMYVDQELDINRLSDYDVDHIVPQSFLKDDSIDNKVLTRSDKARGKSDNVPSEEVVKKMKNYWRQLLNAKLITQRKFDNLTKAERGGLSELDKAGFIKRQLVETRQITKHVAQILDSRMNTKYDENDKLIREVKVITLKSKLVSDFRKDFQFYKVREINNYHHAHDAYLNAVVGTALIKKYPKLESEFVYGDYKVYDVRKMIAKSEQEIGKATAKYFFYSNIMNFFKTEITLANGEIRKRPLIETNGETGEIVWDKGRDFATVRKVLSMPQVNIVKKTEVQTGGFSKESILPKRNSDKLIARKKDWDPKKYGGFDSPTVAYSVLVVAKVEKGKSKKLKSVKELLGITIMERSSFEKNPIDFLEAKGYKEVKKDLIIKLPKYSLFELENGRKRMLASAGELQKGNELALPSKYVNFLYLASHYEKLKGSPEDNEQKQLFVEQHKHYLDEIIEQISEFSKRVILADANLDKVLSAYNKHRDKPIREQAENIIHLFTLTNLGAPAAFKYFDTTIDRKRYTSTKEVLDATLIHQSITGLYETRIDLSQLGGDGGGSSPAPGGGGGLLGRDLLTKLKAQIQFSTEGPQVTWEDRPAMCLVLNLEEEYRLHEKPVPPSIDPSWLQLFPMVWAEKAGMGLANQVPPVVVELKSDASPVAVRQYPMSKEAREGIRPHIQRFLDLGILVPCQSPWNTPLLPVKKPGTNDYRPVQDLREVNKRVQDIHPTVPNPYNLLSSLPPSHTWYSVLDLKDAFFCLKLHPNSQPLFAFEWRDPEKGNTGQLTWTRLPQGFKNSPTLFDEALHRDLASFRALNPQVVMLQYVDDLLVAAPTYRDCKEGTRRLLQELSKLGYRVSAKKAQLCREEVTYLGYLLKGGKRWLTPARKATVMKIPTPTTPRQVREFLGTAGFCRLWIPGFASLAAPLYPLTREKVPFTWTEAHQEAFGRIKEALLSAPALALPDLTKPFALYVDEKEGVARGVLTQTLGPWRRPVAYLSKKLDPVASGWPTCLKAIAAVALLLKDADKLTLGQNVLVIAPHNLESIVRQPPDRWMTNARMTHYQSLLLNERVSFAPPAILNPATLLPVESDDTPIHICSEILAEETGTRPDLRDQPLPGVPAWYTDGSSFIMDGRRQAGAAIVDNKRTVWASNLPEGTSAQKAELIALTQALRLAEGKSINIYTDSRYAFATAHVHGAIYKQRGLLTSAGKDIKNKEEILALLEAIHLPKRVAIIHCPGHQRGTDPVATGNRKADEAAKQAAQSTRILTETTKNAGKRTADGSEFEKRTADGSEFESPKKKAKVE

SEQ ID NO: 7406 - protein, 2216 aa, synthetic construct
MPAAKRVKLDGGDKKYSIGLDIGTNSVGWAVITDEYKVPSKKFKVLGNTDRHSIKKNLIGALLFDSGETAEATRLKRTARRRYTRRKNRICYLQEIFSNEMAKVDDSFFHRLEESFLVEEDKKHERHPIFGNIVDEVAYHEKYPTIYHLRKKLVDSTDKADLRLIYLALAHMIKFRGHFLIEGDLNPDNSDVDKLFIQLVQTYNQLFEENPINASGVDAKAILSARLSKSRRLENLIAQLPGEKKNGLFGNLIALSLGLTPNFKSNFDLAEDAKLQLSKDTYDDDLDNLLAQIGDQYADLFLAAKNLSDAILLSDILRVNTEITKAPLSASMIKRYDEHHQDLTLLKALVRQQLPEKYKEIFFDQSKNGYAGYIDGGASQEEFYKFIKPILEKMDGTEELLVKLNREDLLRKQRTFDNGSIPHQIHLGELHAILRRQEDFYPFLKDNREKIEKILTFRIPYYVGPLARGNSRFAWMTRKSEETITPWNFEEVVDKGASAQSFIERMTNFDKNLPNEKVLPKHSLLYEYFTVYNELTKVKYVTEGMRKPAFLSGEQKKAIVDLLFKTNRKVTVKQLKEDYFKKIECFDSVEISGVEDRFNASLGTYHDLLKIIKDKDFLDNEENEDILEDIVLTLTLFEDREMIEERLKTYAHLFDDKVMKQLKRRRYTGWGRLSRKLINGIRDKQSGKTILDFLKSDGFANRNFMQLIHDDSLTFKEDIQKAQVSGQGDSLHEHIANLAGSPAIKKGILQTVKVVDELVKVMGRHKPENIVIEMARENQTTQKGQKNSRERMKRIEEGIKELGSQILKEHPVENTQLQNEKLYLYYLQNGRDMYVDQELDINRLSDYDVDHIVPQSFLKDDSIDNKVLTRSDKARGKSDNVPSEEVVKKMKNYWRQLLNAKLITQRKFDNLTKAERGGLSELDKAGFIKRQLVETRQITKHVAQILDSRMNTKYDENDKLIREVKVITLKSKLVSDFRKDFQFYKVREINNYHHAHDAYLNAVVGTALIKKYPKLESEFVYGDYKVYDVRKMIAKSEQEIGKATAKYFFYSNIMNFFKTEITLANGEIRKRPLIETNGETGEIVWDKGRDFATVRKVLSMPQVNIVKKTEVQTGGFSKESILPKRNSDKLIARKKDWDPKKYGGFDSPTVAYSVLVVAKVEKGKSKKLKSVKELLGITIMERSSFEKNPIDFLEAKGYKEVKKDLIIKLPKYSLFELENGRKRMLASAGELQKGNELALPSKYVNFLYLASHYEKLKGSPEDNEQKQLFVEQHKHYLDEIIEQISEFSKRVILADANLDKVLSAYNKHRDKPIREQAENIIHLFTLTNLGAPAAFKYFDTTIDRKRYTSTKEVLDATLIHQSITGLYETRIDLSQLGGDGGGSSPAPGGGGGTLGDQGSRGSDPLPEPRVTLTVEGIPTEFLVNTGAEHSVLTKPMGKMGSKRTVVAGATGSKVYPWTTKRLLKIGQKQVTHSFLVIPECPAPLLGRDLLTKLKAQIQFSTEGPQVTWEDRPAMCLVLNLEEEYRLHEKPVPPSIDPSWLQLFPMVWAEKAGMGLANQVPPVVVELKSDASPVAVRQYPMSKEAREGIRPHIQRFLDLGILVPCQSPWNTPLLPVKKPGTNDYRPVQDLREVNKRVQDIHPTVPNPYNLLSSLPPSHTWYSVLDLKDAFFCLKLHPNSQPLFAFEWRDPEKGNTGQLTWTRLPQGFKNSPTLFNEALHRDLASFRALNPQVVMLQYVDDLLVAAPTYRDCKEGTRRLLQELSKLGYRVSAKKAQLCREEVTYLGYLLKGGKRWLTPARKATVMKIPTPTTPRQVREFLGTAGFCRLWIPGFASLAAPLYPLTRPKVPFTWTEAHQEAFGRIKEALLSAPALALPDLTKPFALYVDEKEGVARGVLTQTLGPWRRPVAYLSKKLDPVASGWPTCLKAIAAVALLLKDADKLTLGQNVLVIAPHNLESIVRQPPDRWMTNARMTHYQSLLLNERVSFAPPAILNPATLLPVESDDTPIHICSEILAEETGTRPDLRDQPLPGVPAWYTDGSSFIMDGRRQAGAAIVDNKRTVWASNLPEGTSAQKAELIALTQALRLAEGKSINIYTDSRYAFATAHVHGAIYKQRGWLTSAGKDIKNKEEILALLEAIHLPKRVAIIHCPGHQRGTDPVATGNRKADEAAKQAAQSTRILTETTKNAGKRTADGSEFEKRTADGSEFESPKKKAKVE

SEQ ID NO: 7407 - protein, 2216 aa, synthetic construct
MPAAKRVKLDGGDKKYSIGLDIGTNSVGWAVITDEYKVPSKKFKVLGNTDRHSIKKNLIGALLFDSGETAEATRLKRTARRRYTRRKNRICYLQEIFSNEMAKVDDSFFHRLEESFLVEEDKKHERHPIFGNIVDEVAYHEKYPTIYHLRKKLVDSTDKADLRLIYLALAHMIKFRGHFLIEGDLNPDNSDVDKLFIQLVQTYNQLFEENPINASGVDAKAILSARLSKSRRLENLIAQLPGEKKNGLFGNLIALSLGLTPNFKSNFDLAEDAKLQLSKDTYDDDLDNLLAQIGDQYADLFLAAKNLSDAILLSDILRVNTEITKAPLSASMIKRYDEHHQDLTLLKALVRQQLPEKYKEIFFDQSKNGYAGYIDGGASQEEFYKFIKPILEKMDGTEELLVKLNREDLLRKQRTFDNGSIPHQIHLGELHAILRRQEDFYPFLKDNREKIEKILTFRIPYYVGPLARGNSRFAWMTRKSEETITPWNFEEVVDKGASAQSFIERMTNFDKNLPNEKVLPKHSLLYEYFTVYNELTKVKYVTEGMRKPAFLSGEQKKAIVDLLFKTNRKVTVKQLKEDYFKKIECFDSVEISGVEDRFNASLGTYHDLLKIIKDKDFLDNEENEDILEDIVLTLTLFEDREMIEERLKTYAHLFDDKVMKQLKRRRYTGWGRLSRKLINGIRDKQSGKTILDFLKSDGFANRNFMQLIHDDSLTFKEDIQKAQVSGQGDSLHEHIANLAGSPAIKKGILQTVKVVDELVKVMGRHKPENIVIEMARENQTTQKGQKNSRERMKRIEEGIKELGSQILKEHPVENTQLQNEKLYLYYLQNGRDMYVDQELDINRLSDYDVDHIVPQSFLKDDSIDNKVLTRSDKARGKSDNVPSEEVVKKMKNYWRQLLNAKLITQRKFDNLTKAERGGLSELDKAGFIKRQLVETRQITKHVAQILDSRMNTKYDENDKLIREVKVITLKSKLVSDFRKDFQFYKVREINNYHHAHDAYLNAVVGTALIKKYPKLESEFVYGDYKVYDVRKMIAKSEQEIGKATAKYFFYSNIMNFFKTEITLANGEIRKRPLIETNGETGEIVWDKGRDFATVRKVLSMPQVNIVKKTEVQTGGFSKESILPKRNSDKLIARKKDWDPKKYGGFDSPTVAYSVLVVAKVEKGKSKKLKSVKELLGITIMERSSFEKNPIDFLEAKGYKEVKKDLIIKLPKYSLFELENGRKRMLASAGELQKGNELALPSKYVNFLYLASHYEKLKGSPEDNEQKQLFVEQHKHYLDEIIEQISEFSKRVILADANLDKVLSAYNKHRDKPIREQAENIIHLFTLTNLGAPAAFKYFDTTIDRKRYTSTKEVLDATLIHQSITGLYETRIDLSQLGGDGGGSSPAPGGGGGTLGDQGSRGSDPLPEPRVTLTVEGIPTEFLVNTGAEHSVLTKPMGKMGSKRTVVAGATGSKVYPWTTKRLLKIGQKQVTHSFLVIPECPAPLLGRDLLTKLKAQIQFSTEGPQVTWEDRPAMCLVLNLEEEYRLHEKPVPPSIDPSWLQLFPMVWAEKAGMGLANQVPPVVVELKSDASPVAVRQYPMSKEAREGIRPHIQRFLDLGILVPCQSPWNTPLLPVKKPGTNDYRPVQDLREVNKRVQDIHPTVPNPYNLLSSLPPSHTWYSVLDLKDAFFCLKLHPNSQPLFAFEWRDPEKGNTGQLTWTRLPQGFKNSPTLFNEALHRDLASFRALNPQVVMLQYVDDLLVAAPTYRDCKEGTRRLLQELSKLGYRVSAKKAQLCREEVTYLGYLLKGGKRWLTPARKATVMKIPTPTTPRQVREFLGKAGFCRLFIPGFASLAAPLYPLTRPKVPFTWTEAHQEAFGRIKEALLSAPALALPDLTKPFALYVDEKEGVARGVLTQTLGPWRRPVAYLSKKLDPVASGWPTCLKAIAAVALLLKDADKLTLGQNVLVIAPHNLESIVRQPPDRWMTNARMTHYQSLLLNERVSFAPPAILNPATLLPVESDDTPIHICSEILAEETGTRPDLRDQPLPGVPAWYTDGSSFIMDGRRQAGAAIVDNKRTVWASNLPEGTSAQKAELIALTQALRLAEGKSINIYTDSRYAFATAHVHGAIYKQRGWLTSAGKDIKNKEEILALLEAIHLPKRVAIIHCPGHQRGTDPVATGNRKADEAAKQAAQSTRILTETTKNAGKRTADGSEFEKRTADGSEFESPKKKAKVE

SEQ ID NO: 7408 - protein, 2094 aa, synthetic construct
MPAAKRVKLDGGDKKYSIGLDIGTNSVGWAVITDEYKVPSKKFKVLGNTDRHSIKKNLIGALLFDSGETAEATRLKRTARRRYTRRKNRICYLQEIFSNEMAKVDDSFFHRLEESFLVEEDKKHERHPIFGNIVDEVAYHEKYPTIYHLRKKLVDSTDKADLRLIYLALAHMIKFRGHFLIEGDLNPDNSDVDKLFIQLVQTYNQLFEENPINASGVDAKAILSARLSKSRRLENLIAQLPGEKKNGLFGNLIALSLGLTPNFKSNFDLAEDAKLQLSKDTYDDDLDNLLAQIGDQYADLFLAAKNLSDAILLSDILRVNTEITKAPLSASMIKRYDEHHQDLTLLKALVRQQLPEKYKEIFFDQSKNGYAGYIDGGASQEEFYKFIKPILEKMDGTEELLVKLNREDLLRKQRTFDNGSIPHQIHLGELHAILRRQEDFYPFLKDNREKIEKILTFRIPYYVGPLARGNSRFAWMTRKSEETITPWNFEEVVDKGASAQSFIERMTNFDKNLPNEKVLPKHSLLYEYFTVYNELTKVKYVTEGMRKPAFLSGEQKKAIVDLLFKTNRKVTVKQLKEDYFKKIECFDSVEISGVEDRFNASLGTYHDLLKIIKDKDFLDNEENEDILEDIVLTLTLFEDREMIEERLKTYAHLFDDKVMKQLKRRRYTGWGRLSRKLINGIRDKQSGKTILDFLKSDGFANRNFMQLIHDDSLTFKEDIQKAQVSGQGDSLHEHIANLAGSPAIKKGILQTVKVVDELVKVMGRHKPENIVIEMARENQTTQKGQKNSRERMKRIEEGIKELGSQILKEHPVENTQLQNEKLYLYYLQNGRDMYVDQELDINRLSDYDVDHIVPQSFLKDDSIDNKVLTRSDKARGKSDNVPSEEVVKKMKNYWRQLLNAKLITQRKFDNLTKAERGGLSELDKAGFIKRQLVETRQITKHVAQILDSRMNTKYDENDKLIREVKVITLKSKLVSDFRKDFQFYKVREINNYHHAHDAYLNAVVGTALIKKYPKLESEFVYGDYKVYDVRKMIAKSEQEIGKATAKYFFYSNIMNFFKTEITLANGEIRKRPLIETNGETGEIVWDKGRDFATVRKVLSMPQVNIVKKTEVQTGGFSKESILPKRNSDKLIARKKDWDPKKYGGFDSPTVAYSVLVVAKVEKGKSKKLKSVKELLGITIMERSSFEKNPIDFLEAKGYKEVKKDLIIKLPKYSLFELENGRKRMLASAGELQKGNELALPSKYVNFLYLASHYEKLKGSPEDNEQKQLFVEQHKHYLDEIIEQISEFSKRVILADANLDKVLSAYNKHRDKPIREQAENIIHLFTLTNLGAPAAFKYFDTTIDRKRYTSTKEVLDATLIHQSITGLYETRIDLSQLGGDGGGSSPAPGGGGGTLNLEDEYRLYETSAEPEVSPGSTWLSDFPQAWAETGGMGLAVRQAPLIIPLKATSTPVSIKQYPMSQEAKLGIKPHIQRLLDQGILVPCQSPWNTPLLPVKKPGTNDYRPVQDLREVNKRVEDIHPTVPNPYNLLSGLPPSHRWYTVLDLKDAFFCLRLHPTSQPLFAFEWRDPGMGISGQLTWTRLPQGFKNSPTLFNEALHRDLADFRIQHPDLILLQYVDDILLAATSELDCQQGTRALLLTLGNLGYRASAKKAQLCQKQVKYLGYLLKEGQRWLTEARKETVMGQPTPKTPRQLREFLGTAGFCRLWIPGFAEMAAPLYPLTKPGTLFNWGPDQQKAYQEIKQALLTAPALGLPDLTKPFELFVDEKQGYAKGVLTQKLGPWRRPVAYLSKKLDPVAAGWPPCLRMVAAIAVLRKDAGKLTMGQPLVILAPHAVEALVKQPPDRWLSNARMTHYQAMLLDTDRVQFGPVVALNPATLLPLPEEGAPHDCLEILAETHGTRPDLTDQPIPDADHTWYTDGSSFLQEGQRKAGAAVTTETEVIWARALPAGTSAQRAELIALTQALKMAEGKRLNVYTDSRYAFATAHIHGEIYRRRGWLTSEGREIKNKSEILALLKALFLPKRLSIIHCLGHQKGDSAEARGNRLADQAAREAAIKTPPDTSTLLAGKRTADGSEFEKRTADGSEFESPKKKAKVE

SEQ ID NO: 7409 - protein, 2094 aa, synthetic construct
MPAAKRVKLDGGDKKYSIGLDIGTNSVGWAVITDEYKVPSKKFKVLGNTDRHSIKKNLIGALLFDSGETAEATRLKRTARRRYTRRKNRICYLQEIFSNEMAKVDDSFFHRLEESFLVEEDKKHERHPIFGNIVDEVAYHEKYPTIYHLRKKLVDSTDKADLRLIYLALAHMIKFRGHFLIEGDLNPDNSDVDKLFIQLVQTYNQLFEENPINASGVDAKAILSARLSKSRRLENLIAQLPGEKKNGLFGNLIALSLGLTPNFKSNFDLAEDAKLQLSKDTYDDDLDNLLAQIGDQYADLFLAAKNLSDAILLSDILRVNTEITKAPLSASMIKRYDEHHQDLTLLKALVRQQLPEKYKEIFFDQSKNGYAGYIDGGASQEEFYKFIKPILEKMDGTEELLVKLNREDLLRKQRTFDNGSIPHQIHLGELHAILRRQEDFYPFLKDNREKIEKILTFRIPYYVGPLARGNSRFAWMTRKSEETITPWNFEEVVDKGASAQSFIERMTNFDKNLPNEKVLPKHSLLYEYFTVYNELTKVKYVTEGMRKPAFLSGEQKKAIVDLLFKTNRKVTVKQLKEDYFKKIECFDSVEISGVEDRFNASLGTYHDLLKIIKDKDFLDNEENEDILEDIVLTLTLFEDREMIEERLKTYAHLFDDKVMKQLKRRRYTGWGRLSRKLINGIRDKQSGKTILDFLKSDGFANRNFMQLIHDDSLTFKEDIQKAQVSGQGDSLHEHIANLAGSPAIKKGILQTVKVVDELVKVMGRHKPENIVIEMARENQTTQKGQKNSRERMKRIEEGIKELGSQILKEHPVENTQLQNEKLYLYYLQNGRDMYVDQELDINRLSDYDVDHIVPQSFLKDDSIDNKVLTRSDKARGKSDNVPSEEVVKKMKNYWRQLLNAKLITQRKFDNLTKAERGGLSELDKAGFIKRQLVETRQITKHVAQILDSRMNTKYDENDKLIREVKVITLKSKLVSDFRKDFQFYKVREINNYHHAHDAYLNAVVGTALIKKYPKLESEFVYGDYKVYDVRKMIAKSEQEIGKATAKYFFYSNIMNFFKTEITLANGEIRKRPLIETNGETGEIVWDKGRDFATVRKVLSMPQVNIVKKTEVQTGGFSKESILPKRNSDKLIARKKDWDPKKYGGFDSPTVAYSVLVVAKVEKGKSKKLKSVKELLGITIMERSSFEKNPIDFLEAKGYKEVKKDLIIKLPKYSLFELENGRKRMLASAGELQKGNELALPSKYVNFLYLASHYEKLKGSPEDNEQKQLFVEQHKHYLDEIIEQISEFSKRVILADANLDKVLSAYNKHRDKPIREQAENIIHLFTLTNLGAPAAFKYFDTTIDRKRYTSTKEVLDATLIHQSITGLYETRIDLSQLGGDGGGSSPAPGGGGGTLNIEDEYRLHETSKGPDVPLGSTWLSDFPQAWAETGGMGLAFRQAPLIISLKATSTPVSIKQYPMSQEARLGIKPHIQRLLDQGILVPCQSPWNTPLLPVKKPGTNDYRPVQDLREVNKRVEDIHPTVPNPYNLLSGLPPSHQWYTVLDLKDAFFCLRLHPTSQSLFAFEWKDPEMGISGQLTWTRLPQGFKNSPTLFNEALHRDLADFRIQHPDLILLQYVDDLLLAATSELDCQQGTRALLQTLGDLGYRASAKKAQICQKQVKYLGYLLKEGQRWLTEARKETVMGQPTPKTPRQLREFLGTAGLCRLWIPGFAEMAAPLYPLTKPGTLFKWGPDQQKAYQEIKQALLTAPALGLPDLTKPFELFVDEKQGYAKGVLTQKLGPWRRPVAYLSKKLDPVAAGWPPCLRMVAAIAVLTKDVGKLTMGQPLVILAPHAVEALVKQPPDRWLSNARMTHYQALLLDTDRVQFGPIVALNPATLLPLPEEGLQHDCLDILAEAHGTRPDLTDQPLPDADHTWYTDGSSFLQEGQRRAGAAVTTETEVIWAKALPAGTSAQRAELIALTQALKMAAGKKLNVYTDSRYAFATAHIHGEIYRRRGWLTSEGKEIKNKDEILALLKALFLPKRLSIIHCPGHQKGNHAEARGNRMADQAAREVATRETPETSTLLAGKRTADGSEFEKRTADGSEFESPKKKAKVE

SEQ ID NO: 7410 - protein, 2094 aa, synthetic construct
MPAAKRVKLDGGDKKYSIGLDIGTNSVGWAVITDEYKVPSKKFKVLGNTDRHSIKKNLIGALLFDSGETAEATRLKRTARRRYTRRKNRICYLQEIFSNEMAKVDDSFFHRLEESFLVEEDKKHERHPIFGNIVDEVAYHEKYPTIYHLRKKLVDSTDKADLRLIYLALAHMIKFRGHFLIEGDLNPDNSDVDKLFIQLVQTYNQLFEENPINASGVDAKAILSARLSKSRRLENLIAQLPGEKKNGLFGNLIALSLGLTPNFKSNFDLAEDAKLQLSKDTYDDDLDNLLAQIGDQYADLFLAAKNLSDAILLSDILRVNTEITKAPLSASMIKRYDEHHQDLTLLKALVRQQLPEKYKEIFFDQSKNGYAGYIDGGASQEEFYKFIKPILEKMDGTEELLVKLNREDLLRKQRTFDNGSIPHQIHLGELHAILRRQEDFYPFLKDNREKIEKILTFRIPYYVGPLARGNSRFAWMTRKSEETITPWNFEEVVDKGASAQSFIERMTNFDKNLPNEKVLPKHSLLYEYFTVYNELTKVKYVTEGMRKPAFLSGEQKKAIVDLLFKTNRKVTVKQLKEDYFKKIECFDSVEISGVEDRFNASLGTYHDLLKIIKDKDFLDNEENEDILEDIVLTLTLFEDREMIEERLKTYAHLFDDKVMKQLKRRRYTGWGRLSRKLINGIRDKQSGKTILDFLKSDGFANRNFMQLIHDDSLTFKEDIQKAQVSGQGDSLHEHIANLAGSPAIKKGILQTVKVVDELVKVMGRHKPENIVIEMARENQTTQKGQKNSRERMKRIEEGIKELGSQILKEHPVENTQLQNEKLYLYYLQNGRDMYVDQELDINRLSDYDVDHIVPQSFLKDDSIDNKVLTRSDKARGKSDNVPSEEVVKKMKNYWRQLLNAKLITQRKFDNLTKAERGGLSELDKAGFIKRQLVETRQITKHVAQILDSRMNTKYDENDKLIREVKVITLKSKLVSDFRKDFQFYKVREINNYHHAHDAYLNAVVGTALIKKYPKLESEFVYGDYKVYDVRKMIAKSEQEIGKATAKYFFYSNIMNFFKTEITLANGEIRKRPLIETNGETGEIVWDKGRDFATVRKVLSMPQVNIVKKTEVQTGGFSKESILPKRNSDKLIARKKDWDPKKYGGFDSPTVAYSVLVVAKVEKGKSKKLKSVKELLGITIMERSSFEKNPIDFLEAKGYKEVKKDLIIKLPKYSLFELENGRKRMLASAGELQKGNELALPSKYVNFLYLASHYEKLKGSPEDNEQKQLFVEQHKHYLDEIIEQISEFSKRVILADANLDKVLSAYNKHRDKPIREQAENIIHLFTLTNLGAPAAFKYFDTTIDRKRYTSTKEVLDATLIHQSITGLYETRIDLSQLGGDGGGSSPAPGGGGGTLNIEDEYRLHETSKGPDVPLGSTWLSDFPQAWAETGGMGLAVRQAPLIIPLKATSTPVSIKQYPMSQEARLGIKPHIQRLLDQGILVPCQSPWNTPLLPVKKPGTNDYRPVQDLREVNKRVEDIHPTVPNPYNLLSGLPPSHQWYTVLDLKDAFFCLRLHPTSQSLFAFEWRDPEMGISGQLTWTRLPQGFKNSPTLFNEALHRDLADFRIQHPDLILLQYVDDLLLAATSELDCQQGTRALLQTLGDLGYRASAKKAQICQKQVKYLGYLLKEGQRWLTEARKETVMGQPTPKTPRQLREFLGTAGFCRLWIPGFAEMAAPLYPLTKPGTLFEWGPDQQKAYQEIKQALLTAPALGLPDLTKPFELFVDEKQGYAKGVLTQKLGPWRRPVAYLSKKLDPVAAGWPPCLRMVAAIAVLTKDAGKLTMGQPLVILAPHAVEALVKQPPDRWLSNARMTHYQALLLDTDRVQFGPIVALNPATLLPLPEEGLQHDCLDILAEAHGTRPDLTDQPLPDADHTWYTDGSSFLQEGQRKAGAAVTTETEVVWAKALPAGTSAQRAELIALTQALKMAEGKKLNVYTDSRYAFATAHIHGEIYRRRGWLTSEGKEIKNKDEILALLKALFLPKRLSIIHCPGHQKGNRAEARGNRMADQAAREVATRETPETSTLLAGKRTADGSEFEKRTADGSEFESPKKKAKVE

SEQ ID NO: 7411 - protein, 2094 aa, synthetic construct
MPAAKRVKLDGGDKKYSIGLDIGTNSVGWAVITDEYKVPSKKFKVLGNTDRHSIKKNLIGALLFDSGETAEATRLKRTARRRYTRRKNRICYLQEIFSNEMAKVDDSFFHRLEESFLVEEDKKHERHPIFGNIVDEVAYHEKYPTIYHLRKKLVDSTDKADLRLIYLALAHMIKFRGHFLIEGDLNPDNSDVDKLFIQLVQTYNQLFEENPINASGVDAKAILSARLSKSRRLENLIAQLPGEKKNGLFGNLIALSLGLTPNFKSNFDLAEDAKLQLSKDTYDDDLDNLLAQIGDQYADLFLAAKNLSDAILLSDILRVNTEITKAPLSASMIKRYDEHHQDLTLLKALVRQQLPEKYKEIFFDQSKNGYAGYIDGGASQEEFYKFIKPILEKMDGTEELLVKLNREDLLRKQRTFDNGSIPHQIHLGELHAILRRQEDFYPFLKDNREKIEKILTFRIPYYVGPLARGNSRFAWMTRKSEETITPWNFEEVVDKGASAQSFIERMTNFDKNLPNEKVLPKHSLLYEYFTVYNELTKVKYVTEGMRKPAFLSGEQKKAIVDLLFKTNRKVTVKQLKEDYFKKIECFDSVEISGVEDRFNASLGTYHDLLKIIKDKDFLDNEENEDILEDIVLTLTLFEDREMIEERLKTYAHLFDDKVMKQLKRRRYTGWGRLSRKLINGIRDKQSGKTILDFLKSDGFANRNFMQLIHDDSLTFKEDIQKAQVSGQGDSLHEHIANLAGSPAIKKGILQTVKVVDELVKVMGRHKPENIVIEMARENQTTQKGQKNSRERMKRIEEGIKELGSQILKEHPVENTQLQNEKLYLYYLQNGRDMYVDQELDINRLSDYDVDHIVPQSFLKDDSIDNKVLTRSDKARGKSDNVPSEEVVKKMKNYWRQLLNAKLITQRKFDNLTKAERGGLSELDKAGFIKRQLVETRQITKHVAQILDSRMNTKYDENDKLIREVKVITLKSKLVSDFRKDFQFYKVREINNYHHAHDAYLNAVVGTALIKKYPKLESEFVYGDYKVYDVRKMIAKSEQEIGKATAKYFFYSNIMNFFKTEITLANGEIRKRPLIETNGETGEIVWDKGRDFATVRKVLSMPQVNIVKKTEVQTGGFSKESILPKRNSDKLIARKKDWDPKKYGGFDSPTVAYSVLVVAKVEKGKSKKLKSVKELLGITIMERSSFEKNPIDFLEAKGYKEVKKDLIIKLPKYSLFELENGRKRMLASAGELQKGNELALPSKYVNFLYLASHYEKLKGSPEDNEQKQLFVEQHKHYLDEIIEQISEFSKRVILADANLDKVLSAYNKHRDKPIREQAENIIHLFTLTNLGAPAAFKYFDTTIDRKRYTSTKEVLDATLIHQSITGLYETRIDLSQLGGDGGGSSPAPGGGGGTLNIEDEHRLHETSKEPDVSLGSTWLSDFPQAWAETGGMGLAVRQAPLIIPLKATSTPVSIKQYPMSQEARLGIKPHIQRLLDQGILVPCQSPWNTPLLPVKKPGTNDYRPVQDLREVNKRVEDIHPTVPNPYNLLSGLPPSHQWYTVLDLKDAFFCLRLHPTSQPLFAFEWRDPEMGISGQLTWTRLPQGFKNSPTLFDEALHRDLADFRIQHPDLILLQYVDDLLLAATSELDCQQGTRALLQTLGNLGYRASAKKAQICQKQVKYLGYLLKEGQRWLTEARKETVMGQPTPKTPRQLREFLGTAGFCRLWIPGFAEMAAPLYPLTKTGTLFNWGPDQQKAYQEIKQALLTAPALGLPDLTKPFELFVDEKQGYAKGVLTQKLGPWRRPVAYLSKKLDPVAAGWPPCLRMVAAIAVLTKDAGKLTMGQPLVILAPHAVEALVKQPPDRWLSNARMTHYQALLLDTDRVQFGPVVALNPATLLPLPEEGLQHNCLDILAEAHGTRPDLTDQPLPDADHTWYTDGSSLLQEGQRKAGAAVTTETEVIWAKALPAGTSAQRAELIALTQALKMAEGKKLNVYTDSRYAFATAHIHGEIYRRRGLLTSEGKEIKNKDEILALLKALFLPKRLSIIHCPGHQKGHSAEARGNRMADQAARKAAITETPDTSTLLAGKRTADGSEFEKRTADGSEFESPKKKAKVE

SEQ ID NO: 7412 - protein, 2100 aa, synthetic construct
MPAAKRVKLDGGDKKYSIGLDIGTNSVGWAVITDEYKVPSKKFKVLGNTDRHSIKKNLIGALLFDSGETAEATRLKRTARRRYTRRKNRICYLQEIFSNEMAKVDDSFFHRLEESFLVEEDKKHERHPIFGNIVDEVAYHEKYPTIYHLRKKLVDSTDKADLRLIYLALAHMIKFRGHFLIEGDLNPDNSDVDKLFIQLVQTYNQLFEENPINASGVDAKAILSARLSKSRRLENLIAQLPGEKKNGLFGNLIALSLGLTPNFKSNFDLAEDAKLQLSKDTYDDDLDNLLAQIGDQYADLFLAAKNLSDAILLSDILRVNTEITKAPLSASMIKRYDEHHQDLTLLKALVRQQLPEKYKEIFFDQSKNGYAGYIDGGASQEEFYKFIKPILEKMDGTEELLVKLNREDLLRKQRTFDNGSIPHQIHLGELHAILRRQEDFYPFLKDNREKIEKILTFRIPYYVGPLARGNSRFAWMTRKSEETITPWNFEEVVDKGASAQSFIERMTNFDKNLPNEKVLPKHSLLYEYFTVYNELTKVKYVTEGMRKPAFLSGEQKKAIVDLLFKTNRKVTVKQLKEDYFKKIECFDSVEISGVEDRFNASLGTYHDLLKIIKDKDFLDNEENEDILEDIVLTLTLFEDREMIEERLKTYAHLFDDKVMKQLKRRRYTGWGRLSRKLINGIRDKQSGKTILDFLKSDGFANRNFMQLIHDDSLTFKEDIQKAQVSGQGDSLHEHIANLAGSPAIKKGILQTVKVVDELVKVMGRHKPENIVIEMARENQTTQKGQKNSRERMKRIEEGIKELGSQILKEHPVENTQLQNEKLYLYYLQNGRDMYVDQELDINRLSDYDVDHIVPQSFLKDDSIDNKVLTRSDKARGKSDNVPSEEVVKKMKNYWRQLLNAKLITQRKFDNLTKAERGGLSELDKAGFIKRQLVETRQITKHVAQILDSRMNTKYDENDKLIREVKVITLKSKLVSDFRKDFQFYKVREINNYHHAHDAYLNAVVGTALIKKYPKLESEFVYGDYKVYDVRKMIAKSEQEIGKATAKYFFYSNIMNFFKTEITLANGEIRKRPLIETNGETGEIVWDKGRDFATVRKVLSMPQVNIVKKTEVQTGGFSKESILPKRNSDKLIARKKDWDPKKYGGFDSPTVAYSVLVVAKVEKGKSKKLKSVKELLGITIMERSSFEKNPIDFLEAKGYKEVKKDLIIKLPKYSLFELENGRKRMLASAGELQKGNELALPSKYVNFLYLASHYEKLKGSPEDNEQKQLFVEQHKHYLDEIIEQISEFSKRVILADANLDKVLSAYNKHRDKPIREQAENIIHLFTLTNLGAPAAFKYFDTTIDRKRYTSTKEVLDATLIHQSITGLYETRIDLSQLGGDGGPAPGGGGSSGGTVSLQDEHRLFDIPVTTSLPDVWLQDFPQAWAETGGLGRAKCQAPIIIDLKPTAVPVSIKQYPMSLEAHMGIRQHIIKFLELGVLRPCRSPWNTPLLPVKKPGTQDYRPVQDLREINKRTVDIHPTVPNPYNLLSTLKPDYSWYTVLDLKDAFFCLPLAPQSQELFAFEWKDPERGISGQLTWTRLPQGFKNSPTLFNEALHRDLTDFRTQHPEVTLLQYVDDLLLAAPTKKACTQGTRHLLQELGEKGYRASAKKAQICQTKVTYLGYILSEGKRWLTPGRIETVARIPPPRNPREVREFLGTAGFCRLWIPGFAELAAPLYALTKPSTPFTWQTEHQLAFEALKKALLSAPALGLPDTSKPFTLFLDERQGIAKGVLTQKLGPWKRPVAYLSKKLDPVAAGWPPCLRIMAATAMLVKDSAKLTLGQPLTVITPHTLEAIVRQPPDRWITNARLTHYQALLLDTDRVQFGPPVTLNPATLLPVPENQPSPHDCRQVLAETHGTREDLKDQELPDADHTWYTDGSSYLDSGTRRAGAAVVDGHNTIWAQSLPPGTSAQKAELIALTKALELSKGKKANIYTDSRYAFATAHTHGSIYERRGWLTSEGKEIKNKAEIIALLKALFLPQEVAIIHCPGHQKGQDPVAVGNRQADRVARQAAMAEVLTLATEPDNTSHITAGKRTADGSEFEKRTADGSEFESPKKKAKVE

SEQ ID NO: 7413 - protein, 1999 aa, synthetic construct
MPAAKRVKLDGGDKKYSIGLDIGTNSVGWAVITDEYKVPSKKFKVLGNTDRHSIKKNLIGALLFDSGETAEATRLKRTARRRYTRRKNRICYLQEIFSNEMAKVDDSFFHRLEESFLVEEDKKHERHPIFGNIVDEVAYHEKYPTIYHLRKKLVDSTDKADLRLIYLALAHMIKFRGHFLIEGDLNPDNSDVDKLFIQLVQTYNQLFEENPINASGVDAKAILSARLSKSRRLENLIAQLPGEKKNGLFGNLIALSLGLTPNFKSNFDLAEDAKLQLSKDTYDDDLDNLLAQIGDQYADLFLAAKNLSDAILLSDILRVNTEITKAPLSASMIKRYDEHHQDLTLLKALVRQQLPEKYKEIFFDQSKNGYAGYIDGGASQEEFYKFIKPILEKMDGTEELLVKLNREDLLRKQRTFDNGSIPHQIHLGELHAILRRQEDFYPFLKDNREKIEKILTFRIPYYVGPLARGNSRFAWMTRKSEETITPWNFEEVVDKGASAQSFIERMTNFDKNLPNEKVLPKHSLLYEYFTVYNELTKVKYVTEGMRKPAFLSGEQKKAIVDLLFKTNRKVTVKQLKEDYFKKIECFDSVEISGVEDRFNASLGTYHDLLKIIKDKDFLDNEENEDILEDIVLTLTLFEDREMIEERLKTYAHLFDDKVMKQLKRRRYTGWGRLSRKLINGIRDKQSGKTILDFLKSDGFANRNFMQLIHDDSLTFKEDIQKAQVSGQGDSLHEHIANLAGSPAIKKGILQTVKVVDELVKVMGRHKPENIVIEMARENQTTQKGQKNSRERMKRIEEGIKELGSQILKEHPVENTQLQNEKLYLYYLQNGRDMYVDQELDINRLSDYDVDHIVPQSFLKDDSIDNKVLTRSDKARGKSDNVPSEEVVKKMKNYWRQLLNAKLITQRKFDNLTKAERGGLSELDKAGFIKRQLVETRQITKHVAQILDSRMNTKYDENDKLIREVKVITLKSKLVSDFRKDFQFYKVREINNYHHAHDAYLNAVVGTALIKKYPKLESEFVYGDYKVYDVRKMIAKSEQEIGKATAKYFFYSNIMNFFKTEITLANGEIRKRPLIETNGETGEIVWDKGRDFATVRKVLSMPQVNIVKKTEVQTGGFSKESILPKRNSDKLIARKKDWDPKKYGGFDSPTVAYSVLVVAKVEKGKSKKLKSVKELLGITIMERSSFEKNPIDFLEAKGYKEVKKDLIIKLPKYSLFELENGRKRMLASAGELQKGNELALPSKYVNFLYLASHYEKLKGSPEDNEQKQLFVEQHKHYLDEIIEQISEFSKRVILADANLDKVLSAYNKHRDKPIREQAENIIHLFTLTNLGAPAAFKYFDTTIDRKRYTSTKEVLDATLIHQSITGLYETRIDLSQLGGDGGPAPGGGGSSGGGVLDTPPSHIGLEHLPPPPEVPQFPLNLERLQALQDLVHRSLEAGYISPWDGPGNNPVFPVRKPNGAWRFVHDLRATNALTKPIPALSPGPPDLTAPPTHPPHIICLDLKDAFFQIPVEDRFRFYLSFTLPSPGGLQPHRRFAWRVLPQGFINSPALFQRALQEPLRQVSAAFSQSLLVSYMDDILYASPTEEQRSQCYQALAARLRDLGFQVASEKTSQTPSPVPFLGQMVHEQIVTYQSLPTLQISSPISLHQLQAVLGDLQWVSRGTPTTRRPLQLLYSSLKRHHDPRAIIQLSPEQLQGIAELRQALSHNARSRYNEQEPLLAYVHLTRAGSTLVLFQKGAQFPLAYFQTPLTDNQASPWGLLLLLGCQYLQTQALSSYAKPILKYYHNLPKTSLDNWIQSSEDPRVQELLQLWPQISSQGIQPPGPWKTLITRAEVFLTPQFSPDPIPAALCLFSDGATGRGAYCLWKDHLLDFQAVPAPESAQKGELAGLLAGLAAAPPEPVNIWVDSKYLYSLLRTWVLGAWLQPDPVPSYALLYKSLLRHPAIVVGHVRSHSSASHPIASLNNYVDQLAGKRTADGSEFEKRTADGSEFESPKKKAKVE

SEQ ID NO: 7414 - protein, 2171 aa, synthetic construct
MPAAKRVKLDGGDKKYSIGLDIGTNSVGWAVITDEYKVPSKKFKVLGNTDRHSIKKNLIGALLFDSGETAEATRLKRTARRRYTRRKNRICYLQEIFSNEMAKVDDSFFHRLEESFLVEEDKKHERHPIFGNIVDEVAYHEKYPTIYHLRKKLVDSTDKADLRLIYLALAHMIKFRGHFLIEGDLNPDNSDVDKLFIQLVQTYNQLFEENPINASGVDAKAILSARLSKSRRLENLIAQLPGEKKNGLFGNLIALSLGLTPNFKSNFDLAEDAKLQLSKDTYDDDLDNLLAQIGDQYADLFLAAKNLSDAILLSDILRVNTEITKAPLSASMIKRYDEHHQDLTLLKALVRQQLPEKYKEIFFDQSKNGYAGYIDGGASQEEFYKFIKPILEKMDGTEELLVKLNREDLLRKQRTFDNGSIPHQIHLGELHAILRRQEDFYPFLKDNREKIEKILTFRIPYYVGPLARGNSRFAWMTRKSEETITPWNFEEVVDKGASAQSFIERMTNFDKNLPNEKVLPKHSLLYEYFTVYNELTKVKYVTEGMRKPAFLSGEQKKAIVDLLFKTNRKVTVKQLKEDYFKKIECFDSVEISGVEDRFNASLGTYHDLLKIIKDKDFLDNEENEDILEDIVLTLTLFEDREMIEERLKTYAHLFDDKVMKQLKRRRYTGWGRLSRKLINGIRDKQSGKTILDFLKSDGFANRNFMQLIHDDSLTFKEDIQKAQVSGQGDSLHEHIANLAGSPAIKKGILQTVKVVDELVKVMGRHKPENIVIEMARENQTTQKGQKNSRERMKRIEEGIKELGSQILKEHPVENTQLQNEKLYLYYLQNGRDMYVDQELDINRLSDYDVDHIVPQSFLKDDSIDNKVLTRSDKARGKSDNVPSEEVVKKMKNYWRQLLNAKLITQRKFDNLTKAERGGLSELDKAGFIKRQLVETRQITKHVAQILDSRMNTKYDENDKLIREVKVITLKSKLVSDFRKDFQFYKVREINNYHHAHDAYLNAVVGTALIKKYPKLESEFVYGDYKVYDVRKMIAKSEQEIGKATAKYFFYSNIMNFFKTEITLANGEIRKRPLIETNGETGEIVWDKGRDFATVRKVLSMPQVNIVKKTEVQTGGFSKESILPKRNSDKLIARKKDWDPKKYGGFDSPTVAYSVLVVAKVEKGKSKKLKSVKELLGITIMERSSFEKNPIDFLEAKGYKEVKKDLIIKLPKYSLFELENGRKRMLASAGELQKGNELALPSKYVNFLYLASHYEKLKGSPEDNEQKQLFVEQHKHYLDEIIEQISEFSKRVILADANLDKVLSAYNKHRDKPIREQAENIIHLFTLTNLGAPAAFKYFDTTIDRKRYTSTKEVLDATLIHQSITGLYETRIDLSQLGGDGGPAPGGGGSSGGMDLLKPLTVERKGVKIKGYWNSQADITCVPKDLLQGEEPVRQQNVTTIHGTQEGDVYYVNLKIDGRRINTEVIGTTLDYAIITPGDVPWILKKPLELTIKLDLEEQQGTLLNNSILSKKGKEELKQLFEKYSALWQSWENQVGHRRIRPHKIATGTVKPTPQKQYHINPKAKPDIQIVINDLLKQGVLIQKESTMNTPVYPVPKPNGRWRMVLDYRAVNKVTPLIAVQNQHSYGILGSLFKGRYKTTIDLSNGFWAHPIVPEDYWITAFTWQGKQYCWTVLPQGFLNSPGLFTGDVVDLLQGIPNVEVYVDDVYISHDSEKEHLEYLDILFNRLKEAGYIISLKKSNIANSIVDFLGFQITNEGRGLTDTFKEKLENITAPTTLKQLQSILGLLNFARNFIPDFTELIAPLYALIPKSTKNYVPWQIEHSTTLETLITKLNGAEYLQGRKGDKTLIMKVNASYTTGYIRYYNEGEKKPISYVSIVFSKTELKFTELEKLLTTVHKGLLKALDLSMGQNIHVYSPIVSMQNIQKTPQTAKKALASRWLSWLSYLEDPRIRFFYDPQMPALKDLPAVDTGKDNKKHPSNFQHIFYTDGSAITSPTKEGHLNAGMGIVYFINKDGNLQKQQEWSISLGNHTAQFAEIAAFEFALKKCLPLGGNILVVTDSNYVAKAYNEELDVWASNGFVNNRKKPLKHISKWKSVADLKRLRPDVVVTHEPGHQKLDSSPHAYGNNLADQLATQASFKVHAGKRTADGSEFEKRTADGSEFESPKKKAKVE

SEQ ID NO: 7415 - protein, 2093 aa, synthetic construct
MPAAKRVKLDGGDKKYSIGLDIGTNSVGWAVITDEYKVPSKKFKVLGNTDRHSIKKNLIGALLFDSGETAEATRLKRTARRRYTRRKNRICYLQEIFSNEMAKVDDSFFHRLEESFLVEEDKKHERHPIFGNIVDEVAYHEKYPTIYHLRKKLVDSTDKADLRLIYLALAHMIKFRGHFLIEGDLNPDNSDVDKLFIQLVQTYNQLFEENPINASGVDAKAILSARLSKSRRLENLIAQLPGEKKNGLFGNLIALSLGLTPNFKSNFDLAEDAKLQLSKDTYDDDLDNLLAQIGDQYADLFLAAKNLSDAILLSDILRVNTEITKAPLSASMIKRYDEHHQDLTLLKALVRQQLPEKYKEIFFDQSKNGYAGYIDGGASQEEFYKFIKPILEKMDGTEELLVKLNREDLLRKQRTFDNGSIPHQIHLGELHAILRRQEDFYPFLKDNREKIEKILTFRIPYYVGPLARGNSRFAWMTRKSEETITPWNFEEVVDKGASAQSFIERMTNFDKNLPNEKVLPKHSLLYEYFTVYNELTKVKYVTEGMRKPAFLSGEQKKAIVDLLFKTNRKVTVKQLKEDYFKKIECFDSVEISGVEDRFNASLGTYHDLLKIIKDKDFLDNEENEDILEDIVLTLTLFEDREMIEERLKTYAHLFDDKVMKQLKRRRYTGWGRLSRKLINGIRDKQSGKTILDFLKSDGFANRNFMQLIHDDSLTFKEDIQKAQVSGQGDSLHEHIANLAGSPAIKKGILQTVKVVDELVKVMGRHKPENIVIEMARENQTTQKGQKNSRERMKRIEEGIKELGSQILKEHPVENTQLQNEKLYLYYLQNGRDMYVDQELDINRLSDYDVDHIVPQSFLKDDSIDNKVLTRSDKARGKSDNVPSEEVVKKMKNYWRQLLNAKLITQRKFDNLTKAERGGLSELDKAGFIKRQLVETRQITKHVAQILDSRMNTKYDENDKLIREVKVITLKSKLVSDFRKDFQFYKVREINNYHHAHDAYLNAVVGTALIKKYPKLESEFVYGDYKVYDVRKMIAKSEQEIGKATAKYFFYSNIMNFFKTEITLANGEIRKRPLIETNGETGEIVWDKGRDFATVRKVLSMPQVNIVKKTEVQTGGFSKESILPKRNSDKLIARKKDWDPKKYGGFDSPTVAYSVLVVAKVEKGKSKKLKSVKELLGITIMERSSFEKNPIDFLEAKGYKEVKKDLIIKLPKYSLFELENGRKRMLASAGELQKGNELALPSKYVNFLYLASHYEKLKGSPEDNEQKQLFVEQHKHYLDEIIEQISEFSKRVILADANLDKVLSAYNKHRDKPIREQAENIIHLFTLTNLGAPAAFKYFDTTIDRKRYTSTKEVLDATLIHQSITGLYETRIDLSQLGGDGGPAPGGGGSSGGTLQLEEEYRLFEPESTQKQEMDIWLKNFPQAWAETGGMGTAHCQAPVLIQLKATATPISIRQYPMPHEAYQGIKPHIRRMLDQGILKPCQSPWNTPLLPVKKPGTEDYRPVQDLREVNKRVEDIHPTVPNPYNLLSTLPPSHPWYTVLDLKDAFFCLRLHSESQLLFAFEWRDPEIGLSGQLTWTRLPQGFKNSPTLFNEALHSDLADFRVRYPALVLLQYVDDLLLAAATRTECLEGTKALLETLGNKGYRASAKKAQICLQEVTYLGYSLKDGQRWLTKARKEAILSIPVPKNSRQVREFLGTAGYCRLWIPGFAELAAPLYPLTRPGTLFQWGTEQQLAFEDIKKALLSSPALGLPDITKPFELFIDENSGFAKGVLVQKLGPWKRPVAYLSKKLDTVASGWPPCLRMVAAIAILVKDAGKLTLGQPLTILTSHPVEALVRQPPNKWLSNARMTHYQAMLLDAERVHFGPTVSLNPATLLPLPSGGNHHDCLQILAETHGTRPDLTDQPLPDADLTWYTDGSSFIRNGEREAGAAVTTESEVIWAAPLPPGTSAQRAELIALTQALKMAEGKKLTVYTDSRYAFATTHVHGEIYRRRGWLTSEGKEIKNKNEILALLEALFLPKRLSIIHCPGHQKGDSPQAKGNRLADDTAKKAATETHSSLTVLPAGKRTADGSEFEKRTADGSEFESPKKKAKVE

SEQ ID NO: 7416 - protein, 2216 aa, synthetic construct
MPAAKRVKLDGGDKKYSIGLDIGTNSVGWAVITDEYKVPSKKFKVLGNTDRHSIKKNLIGALLFDSGETAEATRLKRTARRRYTRRKNRICYLQEIFSNEMAKVDDSFFHRLEESFLVEEDKKHERHPIFGNIVDEVAYHEKYPTIYHLRKKLVDSTDKADLRLIYLALAHMIKFRGHFLIEGDLNPDNSDVDKLFIQLVQTYNQLFEENPINASGVDAKAILSARLSKSRRLENLIAQLPGEKKNGLFGNLIALSLGLTPNFKSNFDLAEDAKLQLSKDTYDDDLDNLLAQIGDQYADLFLAAKNLSDAILLSDILRVNTEITKAPLSASMIKRYDEHHQDLTLLKALVRQQLPEKYKEIFFDQSKNGYAGYIDGGASQEEFYKFIKPILEKMDGTEELLVKLNREDLLRKQRTFDNGSIPHQIHLGELHAILRRQEDFYPFLKDNREKIEKILTFRIPYYVGPLARGNSRFAWMTRKSEETITPWNFEEVVDKGASAQSFIERMTNFDKNLPNEKVLPKHSLLYEYFTVYNELTKVKYVTEGMRKPAFLSGEQKKAIVDLLFKTNRKVTVKQLKEDYFKKIECFDSVEISGVEDRFNASLGTYHDLLKIIKDKDFLDNEENEDILEDIVLTLTLFEDREMIEERLKTYAHLFDDKVMKQLKRRRYTGWGRLSRKLINGIRDKQSGKTILDFLKSDGFANRNFMQLIHDDSLTFKEDIQKAQVSGQGDSLHEHIANLAGSPAIKKGILQTVKVVDELVKVMGRHKPENIVIEMARENQTTQKGQKNSRERMKRIEEGIKELGSQILKEHPVENTQLQNEKLYLYYLQNGRDMYVDQELDINRLSDYDVDHIVPQSFLKDDSIDNKVLTRSDKARGKSDNVPSEEVVKKMKNYWRQLLNAKLITQRKFDNLTKAERGGLSELDKAGFIKRQLVETRQITKHVAQILDSRMNTKYDENDKLIREVKVITLKSKLVSDFRKDFQFYKVREINNYHHAHDAYLNAVVGTALIKKYPKLESEFVYGDYKVYDVRKMIAKSEQEIGKATAKYFFYSNIMNFFKTEITLANGEIRKRPLIETNGETGEIVWDKGRDFATVRKVLSMPQVNIVKKTEVQTGGFSKESILPKRNSDKLIARKKDWDPKKYGGFDSPTVAYSVLVVAKVEKGKSKKLKSVKELLGITIMERSSFEKNPIDFLEAKGYKEVKKDLIIKLPKYSLFELENGRKRMLASAGELQKGNELALPSKYVNFLYLASHYEKLKGSPEDNEQKQLFVEQHKHYLDEIIEQISEFSKRVILADANLDKVLSAYNKHRDKPIREQAENIIHLFTLTNLGAPAAFKYFDTTIDRKRYTSTKEVLDATLIHQSITGLYETRIDLSQLGGDGGPAPGGGGSSGGTLGDQGSRGSDPLPEPRVTLTVEGIPTEFLVNTGAEHSVLTKPMGKMGSKRTVVAGATGSKVYPWTTKRLLKIGQKQVTHSFLVIPECPAPLLGRDLLTKLKAQIQFSTEGPQVTWEDRPAMCLVLNLEEEYRLHEKPVPPSIDPSWLQLFPMVWAEKAGMGLANQVPPVVVELKSDASPVAVRQYPMSKEAREGIRPHIQRFLDLGILVPCQSPWNTPLLPVKKPGTNDYRPVQDLREVNKRVQDIHPTVPNPYNLLSSLPPSHTWYSVLDLKDAFFCLKLHPNSQPLFAFEWRDPEKGNTGQLTWTRLPQGFKNSPTLFDEALHRDLASFRALNPQVVMLQYVDDLLVAAPTYRDCKEGTRRLLQELSKLGYRVSAKKAQLCREEVTYLGYLLKGGKRWLTPARKATVMKIPTPTTPRQVREFLGTAGFCRLWIPGFASLAAPLYPLTREKVPFTWTEAHQEAFGRIKEALLSAPALALPDLTKPFALYVDEKEGVARGVLTQTLGPWRRPVAYLSKKLDPVASGWPTCLKAIAAVALLLKDADKLTLGQNVLVIAPHNLESIVRQPPDRWMTNARMTHYQSLLLNERVSFAPPAILNPATLLPVESDDTPIHICSEILAEETGTRPDLRDQPLPGVPAWYTDGSSFIMDGRRQAGAAIVDNKRTVWASNLPEGTSAQKAELIALTQALRLAEGKSINIYTDSRYAFATAHVHGAIYKQRGLLTSAGKDIKNKEEILALLEAIHLPKRVAIIHCPGHQRGTDPVATGNRKADEAAKQAAQSTRILTETTKNAGKRTADGSEFEKRTADGSEFESPKKKAKVE

SEQ ID NO: 7417 - protein, 2125 aa, synthetic construct
MPAAKRVKLDGGDKKYSIGLDIGTNSVGWAVITDEYKVPSKKFKVLGNTDRHSIKKNLIGALLFDSGETAEATRLKRTARRRYTRRKNRICYLQEIFSNEMAKVDDSFFHRLEESFLVEEDKKHERHPIFGNIVDEVAYHEKYPTIYHLRKKLVDSTDKADLRLIYLALAHMIKFRGHFLIEGDLNPDNSDVDKLFIQLVQTYNQLFEENPINASGVDAKAILSARLSKSRRLENLIAQLPGEKKNGLFGNLIALSLGLTPNFKSNFDLAEDAKLQLSKDTYDDDLDNLLAQIGDQYADLFLAAKNLSDAILLSDILRVNTEITKAPLSASMIKRYDEHHQDLTLLKALVRQQLPEKYKEIFFDQSKNGYAGYIDGGASQEEFYKFIKPILEKMDGTEELLVKLNREDLLRKQRTFDNGSIPHQIHLGELHAILRRQEDFYPFLKDNREKIEKILTFRIPYYVGPLARGNSRFAWMTRKSEETITPWNFEEVVDKGASAQSFIERMTNFDKNLPNEKVLPKHSLLYEYFTVYNELTKVKYVTEGMRKPAFLSGEQKKAIVDLLFKTNRKVTVKQLKEDYFKKIECFDSVEISGVEDRFNASLGTYHDLLKIIKDKDFLDNEENEDILEDIVLTLTLFEDREMIEERLKTYAHLFDDKVMKQLKRRRYTGWGRLSRKLINGIRDKQSGKTILDFLKSDGFANRNFMQLIHDDSLTFKEDIQKAQVSGQGDSLHEHIANLAGSPAIKKGILQTVKVVDELVKVMGRHKPENIVIEMARENQTTQKGQKNSRERMKRIEEGIKELGSQILKEHPVENTQLQNEKLYLYYLQNGRDMYVDQELDINRLSDYDVDHIVPQSFLKDDSIDNKVLTRSDKARGKSDNVPSEEVVKKMKNYWRQLLNAKLITQRKFDNLTKAERGGLSELDKAGFIKRQLVETRQITKHVAQILDSRMNTKYDENDKLIREVKVITLKSKLVSDFRKDFQFYKVREINNYHHAHDAYLNAVVGTALIKKYPKLESEFVYGDYKVYDVRKMIAKSEQEIGKATAKYFFYSNIMNFFKTEITLANGEIRKRPLIETNGETGEIVWDKGRDFATVRKVLSMPQVNIVKKTEVQTGGFSKESILPKRNSDKLIARKKDWDPKKYGGFDSPTVAYSVLVVAKVEKGKSKKLKSVKELLGITIMERSSFEKNPIDFLEAKGYKEVKKDLIIKLPKYSLFELENGRKRMLASAGELQKGNELALPSKYVNFLYLASHYEKLKGSPEDNEQKQLFVEQHKHYLDEIIEQISEFSKRVILADANLDKVLSAYNKHRDKPIREQAENIIHLFTLTNLGAPAAFKYFDTTIDRKRYTSTKEVLDATLIHQSITGLYETRIDLSQLGGDGGPAPGGGGSSGGLLGRDLLTKLKAQIQFSTEGPQVTWEDRPAMCLVLNLEEEYRLHEKPVPPSIDPSWLQLFPMVWAEKAGMGLANQVPPVVVELKSDASPVAVRQYPMSKEAREGIRPHIQRFLDLGILVPCQSPWNTPLLPVKKPGTNDYRPVQDLREVNKRVQDIHPTVPNPYNLLSSLPPSHTWYSVLDLKDAFFCLKLHPNSQPLFAFEWRDPEKGNTGQLTWTRLPQGFKNSPTLFNEALHRDLASFRALNPQVVMLQYVDDLLVAAPTYRDCKEGTRRLLQELSKLGYRVSAKKAQLCREEVTYLGYLLKGGKRWLTPARKATVMKIPTPTTPRQVREFLGTAGFCRLWIPGFASLAAPLYPLTRPKVPFTWTEAHQEAFGRIKEALLSAPALALPDLTKPFALYVDEKEGVARGVLTQTLGPWRRPVAYLSKKLDPVASGWPTCLKAIAAVALLLKDADKLTLGQNVLVIAPHNLESIVRQPPDRWMTNARMTHYQSLLLNERVSFAPPAILNPATLLPVESDDTPIHICSEILAEETGTRPDLRDQPLPGVPAWYTDGSSFIMDGRRQAGAAIVDNKRTVWASNLPEGTSAQKAELIALTQALRLAEGKSINIYTDSRYAFATAHVHGAIYKQRGWLTSAGKDIKNKEEILALLEAIHLPKRVAIIHCPGHQRGTDPVATGNRKADEAAKQAAQSTRILTETTKNAGKRTADGSEFEKRTADGSEFESPKKKAKVE

SEQ ID NO: 7418 - protein, 2216 aa, synthetic construct
MPAAKRVKLDGGDKKYSIGLDIGTNSVGWAVITDEYKVPSKKFKVLGNTDRHSIKKNLIGALLFDSGETAEATRLKRTARRRYTRRKNRICYLQEIFSNEMAKVDDSFFHRLEESFLVEEDKKHERHPIFGNIVDEVAYHEKYPTIYHLRKKLVDSTDKADLRLIYLALAHMIKFRGHFLIEGDLNPDNSDVDKLFIQLVQTYNQLFEENPINASGVDAKAILSARLSKSRRLENLIAQLPGEKKNGLFGNLIALSLGLTPNFKSNFDLAEDAKLQLSKDTYDDDLDNLLAQIGDQYADLFLAAKNLSDAILLSDILRVNTEITKAPLSASMIKRYDEHHQDLTLLKALVRQQLPEKYKEIFFDQSKNGYAGYIDGGASQEEFYKFIKPILEKMDGTEELLVKLNREDLLRKQRTFDNGSIPHQIHLGELHAILRRQEDFYPFLKDNREKIEKILTFRIPYYVGPLARGNSRFAWMTRKSEETITPWNFEEVVDKGASAQSFIERMTNFDKNLPNEKVLPKHSLLYEYFTVYNELTKVKYVTEGMRKPAFLSGEQKKAIVDLLFKTNRKVTVKQLKEDYFKKIECFDSVEISGVEDRFNASLGTYHDLLKIIKDKDFLDNEENEDILEDIVLTLTLFEDREMIEERLKTYAHLFDDKVMKQLKRRRYTGWGRLSRKLINGIRDKQSGKTILDFLKSDGFANRNFMQLIHDDSLTFKEDIQKAQVSGQGDSLHEHIANLAGSPAIKKGILQTVKVVDELVKVMGRHKPENIVIEMARENQTTQKGQKNSRERMKRIEEGIKELGSQILKEHPVENTQLQNEKLYLYYLQNGRDMYVDQELDINRLSDYDVDHIVPQSFLKDDSIDNKVLTRSDKARGKSDNVPSEEVVKKMKNYWRQLLNAKLITQRKFDNLTKAERGGLSELDKAGFIKRQLVETRQITKHVAQILDSRMNTKYDENDKLIREVKVITLKSKLVSDFRKDFQFYKVREINNYHHAHDAYLNAVVGTALIKKYPKLESEFVYGDYKVYDVRKMIAKSEQEIGKATAKYFFYSNIMNFFKTEITLANGEIRKRPLIETNGETGEIVWDKGRDFATVRKVLSMPQVNIVKKTEVQTGGFSKESILPKRNSDKLIARKKDWDPKKYGGFDSPTVAYSVLVVAKVEKGKSKKLKSVKELLGITIMERSSFEKNPIDFLEAKGYKEVKKDLIIKLPKYSLFELENGRKRMLASAGELQKGNELALPSKYVNFLYLASHYEKLKGSPEDNEQKQLFVEQHKHYLDEIIEQISEFSKRVILADANLDKVLSAYNKHRDKPIREQAENIIHLFTLTNLGAPAAFKYFDTTIDRKRYTSTKEVLDATLIHQSITGLYETRIDLSQLGGDGGPAPGGGGSSGGTLGDQGSRGSDPLPEPRVTLTVEGIPTEFLVNTGAEHSVLTKPMGKMGSKRTVVAGATGSKVYPWTTKRLLKIGQKQVTHSFLVIPECPAPLLGRDLLTKLKAQIQFSTEGPQVTWEDRPAMCLVLNLEEEYRLHEKPVPPSIDPSWLQLFPMVWAEKAGMGLANQVPPVVVELKSDASPVAVRQYPMSKEAREGIRPHIQRFLDLGILVPCQSPWNTPLLPVKKPGTNDYRPVQDLREVNKRVQDIHPTVPNPYNLLSSLPPSHTWYSVLDLKDAFFCLKLHPNSQPLFAFEWRDPEKGNTGQLTWTRLPQGFKNSPTLFNEALHRDLASFRALNPQVVMLQYVDDLLVAAPTYRDCKEGTRRLLQELSKLGYRVSAKKAQLCREEVTYLGYLLKGGKRWLTPARKATVMKIPTPTTPRQVREFLGTAGFCRLWIPGFASLAAPLYPLTRPKVPFTWTEAHQEAFGRIKEALLSAPALALPDLTKPFALYVDEKEGVARGVLTQTLGPWRRPVAYLSKKLDPVASGWPTCLKAIAAVALLLKDADKLTLGQNVLVIAPHNLESIVRQPPDRWMTNARMTHYQSLLLNERVSFAPPAILNPATLLPVESDDTPIHICSEILAEETGTRPDLRDQPLPGVPAWYTDGSSFIMDGRRQAGAAIVDNKRTVWASNLPEGTSAQKAELIALTQALRLAEGKSINIYTDSRYAFATAHVHGAIYKQRGWLTSAGKDIKNKEEILALLEAIHLPKRVAIIHCPGHQRGTDPVATGNRKADEAAKQAAQSTRILTETTKNAGKRTADGSEFEKRTADGSEFESPKKKAKVE

SEQ ID NO: 7419 - protein, 2094 aa, synthetic construct
MPAAKRVKLDGGDKKYSIGLDIGTNSVGWAVITDEYKVPSKKFKVLGNTDRHSIKKNLIGALLFDSGETAEATRLKRTARRRYTRRKNRICYLQEIFSNEMAKVDDSFFHRLEESFLVEEDKKHERHPIFGNIVDEVAYHEKYPTIYHLRKKLVDSTDKADLRLIYLALAHMIKFRGHFLIEGDLNPDNSDVDKLFIQLVQTYNQLFEENPINASGVDAKAILSARLSKSRRLENLIAQLPGEKKNGLFGNLIALSLGLTPNFKSNFDLAEDAKLQLSKDTYDDDLDNLLAQIGDQYADLFLAAKNLSDAILLSDILRVNTEITKAPLSASMIKRYDEHHQDLTLLKALVRQQLPEKYKEIFFDQSKNGYAGYIDGGASQEEFYKFIKPILEKMDGTEELLVKLNREDLLRKQRTFDNGSIPHQIHLGELHAILRRQEDFYPFLKDNREKIEKILTFRIPYYVGPLARGNSRFAWMTRKSEETITPWNFEEVVDKGASAQSFIERMTNFDKNLPNEKVLPKHSLLYEYFTVYNELTKVKYVTEGMRKPAFLSGEQKKAIVDLLFKTNRKVTVKQLKEDYFKKIECFDSVEISGVEDRFNASLGTYHDLLKIIKDKDFLDNEENEDILEDIVLTLTLFEDREMIEERLKTYAHLFDDKVMKQLKRRRYTGWGRLSRKLINGIRDKQSGKTILDFLKSDGFANRNFMQLIHDDSLTFKEDIQKAQVSGQGDSLHEHIANLAGSPAIKKGILQTVKVVDELVKVMGRHKPENIVIEMARENQTTQKGQKNSRERMKRIEEGIKELGSQILKEHPVENTQLQNEKLYLYYLQNGRDMYVDQELDINRLSDYDVDHIVPQSFLKDDSIDNKVLTRSDKARGKSDNVPSEEVVKKMKNYWRQLLNAKLITQRKFDNLTKAERGGLSELDKAGFIKRQLVETRQITKHVAQILDSRMNTKYDENDKLIREVKVITLKSKLVSDFRKDFQFYKVREINNYHHAHDAYLNAVVGTALIKKYPKLESEFVYGDYKVYDVRKMIAKSEQEIGKATAKYFFYSNIMNFFKTEITLANGEIRKRPLIETNGETGEIVWDKGRDFATVRKVLSMPQVNIVKKTEVQTGGFSKESILPKRNSDKLIARKKDWDPKKYGGFDSPTVAYSVLVVAKVEKGKSKKLKSVKELLGITIMERSSFEKNPIDFLEAKGYKEVKKDLIIKLPKYSLFELENGRKRMLASAGELQKGNELALPSKYVNFLYLASHYEKLKGSPEDNEQKQLFVEQHKHYLDEIIEQISEFSKRVILADANLDKVLSAYNKHRDKPIREQAENIIHLFTLTNLGAPAAFKYFDTTIDRKRYTSTKEVLDATLIHQSITGLYETRIDLSQLGGDGGPAPGGGGSSGGTLNLEDEYRLYETSAEPEVSPGSTWLSDFPQAWAETGGMGLAVRQAPLIIPLKATSTPVSIKQYPMSQEAKLGIKPHIQRLLDQGILVPCQSPWNTPLLPVKKPGTNDYRPVQDLREVNKRVEDIHPTVPNPYNLLSGLPPSHRWYTVLDLKDAFFCLRLHPTSQPLFAFEWRDPGMGISGQLTWTRLPQGFKNSPTLFNEALHRDLADFRIQHPDLILLQYVDDILLAATSELDCQQGTRALLLTLGNLGYRASAKKAQLCQKQVKYLGYLLKEGQRWLTEARKETVMGQPTPKTPRQLREFLGTAGFCRLWIPGFAEMAAPLYPLTKPGTLFNWGPDQQKAYQEIKQALLTAPALGLPDLTKPFELFVDEKQGYAKGVLTQKLGPWRRPVAYLSKKLDPVAAGWPPCLRMVAAIAVLRKDAGKLTMGQPLVILAPHAVEALVKQPPDRWLSNARMTHYQAMLLDTDRVQFGPVVALNPATLLPLPEEGAPHDCLEILAETHGTRPDLTDQPIPDADHTWYTDGSSFLQEGQRKAGAAVTTETEVIWARALPAGTSAQRAELIALTQALKMAEGKRLNVYTDSRYAFATAHIHGEIYRRRGWLTSEGREIKNKSEILALLKALFLPKRLSIIHCLGHQKGDSAEARGNRLADQAAREAAIKTPPDTSTLLAGKRTADGSEFEKRTADGSEFESPKKKAKVE

SEQ ID NO: 7420 - protein, 2094 aa, synthetic construct
MPAAKRVKLDGGDKKYSIGLDIGTNSVGWAVITDEYKVPSKKFKVLGNTDRHSIKKNLIGALLFDSGETAEATRLKRTARRRYTRRKNRICYLQEIFSNEMAKVDDSFFHRLEESFLVEEDKKHERHPIFGNIVDEVAYHEKYPTIYHLRKKLVDSTDKADLRLIYLALAHMIKFRGHFLIEGDLNPDNSDVDKLFIQLVQTYNQLFEENPINASGVDAKAILSARLSKSRRLENLIAQLPGEKKNGLFGNLIALSLGLTPNFKSNFDLAEDAKLQLSKDTYDDDLDNLLAQIGDQYADLFLAAKNLSDAILLSDILRVNTEITKAPLSASMIKRYDEHHQDLTLLKALVRQQLPEKYKEIFFDQSKNGYAGYIDGGASQEEFYKFIKPILEKMDGTEELLVKLNREDLLRKQRTFDNGSIPHQIHLGELHAILRRQEDFYPFLKDNREKIEKILTFRIPYYVGPLARGNSRFAWMTRKSEETITPWNFEEVVDKGASAQSFIERMTNFDKNLPNEKVLPKHSLLYEYFTVYNELTKVKYVTEGMRKPAFLSGEQKKAIVDLLFKTNRKVTVKQLKEDYFKKIECFDSVEISGVEDRFNASLGTYHDLLKIIKDKDFLDNEENEDILEDIVLTLTLFEDREMIEERLKTYAHLFDDKVMKQLKRRRYTGWGRLSRKLINGIRDKQSGKTILDFLKSDGFANRNFMQLIHDDSLTFKEDIQKAQVSGQGDSLHEHIANLAGSPAIKKGILQTVKVVDELVKVMGRHKPENIVIEMARENQTTQKGQKNSRERMKRIEEGIKELGSQILKEHPVENTQLQNEKLYLYYLQNGRDMYVDQELDINRLSDYDVDHIVPQSFLKDDSIDNKVLTRSDKARGKSDNVPSEEVVKKMKNYWRQLLNAKLITQRKFDNLTKAERGGLSELDKAGFIKRQLVETRQITKHVAQILDSRMNTKYDENDKLIREVKVITLKSKLVSDFRKDFQFYKVREINNYHHAHDAYLNAVVGTALIKKYPKLESEFVYGDYKVYDVRKMIAKSEQEIGKATAKYFFYSNIMNFFKTEITLANGEIRKRPLIETNGETGEIVWDKGRDFATVRKVLSMPQVNIVKKTEVQTGGFSKESILPKRNSDKLIARKKDWDPKKYGGFDSPTVAYSVLVVAKVEKGKSKKLKSVKELLGITIMERSSFEKNPIDFLEAKGYKEVKKDLIIKLPKYSLFELENGRKRMLASAGELQKGNELALPSKYVNFLYLASHYEKLKGSPEDNEQKQLFVEQHKHYLDEIIEQISEFSKRVILADANLDKVLSAYNKHRDKPIREQAENIIHLFTLTNLGAPAAFKYFDTTIDRKRYTSTKEVLDATLIHQSITGLYETRIDLSQLGGDGGPAPGGGGSSGGTLGIEDEYRLHETSTEPDVSLGSTWLSDFPQAWAETGGMGLAVRQAPLIIPLKATSTPVSIQQYPMSHEARLGIKPHIQRLLDQGILVPCQSPWNTPLLPVKKPGTNDYRPVQDLREVNKRVEDIHPTVPNPYNLLSGLPPSHQWYTVLDLKDAFFCLRLHPTSQPLFAFEWRDPGMGISGQLTWTRLPQGFKNSPTLFDEALHRDLADFRIQHPDLILLQYVDDILLAATSELDCQQGTRALLQTLGDLGYRASAKKAQICQKQVKYLGYLLREGQRWLTEARKETVMGQPVPKTPRQLREFLGTAGFCRLWIPGFAEMAAPLYPLTKTGTLFSWGPDQQKAYQEIKQALLTAPALGLPDLTKPFELFVDEKQGYAKGVLTQKLGPWRRPVAYLSKKLDPVAAGWPPCLRMVAAIAVLTKDAGKLTMGQPLVILAPHAVEALVKQPPDRWLSNARMTHYQAMLLDTDRVQFGPVVALNPATLLPLPEEGAPHDCLEILAETHGTRPDLTDQPIPDADHTWYTDGSSFLQEGQRKAGAAVTTETEVIWAGALPAGTSAQRAELIALTQALKMAEGKRLNVYTDSRYAFATAHIHGEIYRRRGLLTSEGREIKNKSEILALLKALFLPKRLSIIHCLGHQKGDSAEARGNRLADQAAREAAIKTPPDTSTLLAGKRTADGSEFEKRTADGSEFESPKKKAKVE

SEQ ID NO: 7421 - protein, 2094 aa, synthetic construct
MPAAKRVKLDGGDKKYSIGLDIGTNSVGWAVITDEYKVPSKKFKVLGNTDRHSIKKNLIGALLFDSGETAEATRLKRTARRRYTRRKNRICYLQEIFSNEMAKVDDSFFHRLEESFLVEEDKKHERHPIFGNIVDEVAYHEKYPTIYHLRKKLVDSTDKADLRLIYLALAHMIKFRGHFLIEGDLNPDNSDVDKLFIQLVQTYNQLFEENPINASGVDAKAILSARLSKSRRLENLIAQLPGEKKNGLFGNLIALSLGLTPNFKSNFDLAEDAKLQLSKDTYDDDLDNLLAQIGDQYADLFLAAKNLSDAILLSDILRVNTEITKAPLSASMIKRYDEHHQDLTLLKALVRQQLPEKYKEIFFDQSKNGYAGYIDGGASQEEFYKFIKPILEKMDGTEELLVKLNREDLLRKQRTFDNGSIPHQIHLGELHAILRRQEDFYPFLKDNREKIEKILTFRIPYYVGPLARGNSRFAWMTRKSEETITPWNFEEVVDKGASAQSFIERMTNFDKNLPNEKVLPKHSLLYEYFTVYNELTKVKYVTEGMRKPAFLSGEQKKAIVDLLFKTNRKVTVKQLKEDYFKKIECFDSVEISGVEDRFNASLGTYHDLLKIIKDKDFLDNEENEDILEDIVLTLTLFEDREMIEERLKTYAHLFDDKVMKQLKRRRYTGWGRLSRKLINGIRDKQSGKTILDFLKSDGFANRNFMQLIHDDSLTFKEDIQKAQVSGQGDSLHEHIANLAGSPAIKKGILQTVKVVDELVKVMGRHKPENIVIEMARENQTTQKGQKNSRERMKRIEEGIKELGSQILKEHPVENTQLQNEKLYLYYLQNGRDMYVDQELDINRLSDYDVDHIVPQSFLKDDSIDNKVLTRSDKARGKSDNVPSEEVVKKMKNYWRQLLNAKLITQRKFDNLTKAERGGLSELDKAGFIKRQLVETRQITKHVAQILDSRMNTKYDENDKLIREVKVITLKSKLVSDFRKDFQFYKVREINNYHHAHDAYLNAVVGTALIKKYPKLESEFVYGDYKVYDVRKMIAKSEQEIGKATAKYFFYSNIMNFFKTEITLANGEIRKRPLIETNGETGEIVWDKGRDFATVRKVLSMPQVNIVKKTEVQTGGFSKESILPKRNSDKLIARKKDWDPKKYGGFDSPTVAYSVLVVAKVEKGKSKKLKSVKELLGITIMERSSFEKNPIDFLEAKGYKEVKKDLIIKLPKYSLFELENGRKRMLASAGELQKGNELALPSKYVNFLYLASHYEKLKGSPEDNEQKQLFVEQHKHYLDEIIEQISEFSKRVILADANLDKVLSAYNKHRDKPIREQAENIIHLFTLTNLGAPAAFKYFDTTIDRKRYTSTKEVLDATLIHQSITGLYETRIDLSQLGGDGGPAPGGGGSSGGTLGIEDEYRLHETSTEPDVSLGSTWLSDFPQAWAETGGMGLAVRQAPLIIPLKATSTPVSIQQYPMSHEARLGIKPHIQRLLDQGILVPCQSPWNTPLLPVKKPGTNDYRPVQDLREVNKRVEDIHPTVPNPYNLLSGLPPSHQWYTVLDLKDAFFCLRLHPTSQPLFAFEWRDPGMGISGQLTWTRLPQGFKNSPTLFNEALHRDLADFRIQHPDLILLQYVDDILLAATSELDCQQGTRALLQTLGDLGYRASAKKAQICQKQVKYLGYLLREGQRWLTEARKETVMGQPVPKTPRQLREFLGTAGFCRLWIPGFAEMAAPLYPLTKPGTLFSWGPDQQKAYQEIKQALLTAPALGLPDLTKPFELFVDEKQGYAKGVLTQKLGPWRRPVAYLSKKLDPVAAGWPPCLRMVAAIAVLTKDAGKLTMGQPLVILAPHAVEALVKQPPDRWLSNARMTHYQAMLLDTDRVQFGPVVALNPATLLPLPEEGAPHDCLEILAETHGTRPDLTDQPIPDADHTWYTDGSSFLQEGQRKAGAAVTTETEVIWAGALPAGTSAQRAELIALTQALKMAEGKRLNVYTDSRYAFATAHIHGEIYRRRGWLTSEGREIKNKSEILALLKALFLPKRLSIIHCLGHQKGDSAEARGNRLADQAAREAAIKTPPDTSTLLAGKRTADGSEFEKRTADGSEFESPKKKAKVE

SEQ ID NO: 7422 - protein, 2094 aa, synthetic construct; identical to SEQ ID NO: 7421

SEQ ID NO: 7423 - protein, 2094 aa, synthetic construct
MPAAKRVKLDGGDKKYSIGLDIGTNSVGWAVITDEYKVPSKKFKVLGNTDRHSIKKNLIGALLFDSGETAEATRLKRTARRRYTRRKNRICYLQEIFSNEMAKVDDSFFHRLEESFLVEEDKKHERHPIFGNIVDEVAYHEKYPTIYHLRKKLVDSTDKADLRLIYLALAHMIKFRGHFLIEGDLNPDNSDVDKLFIQLVQTYNQLFEENPINASGVDAKAILSARLSKSRRLENLIAQLPGEKKNGLFGNLIALSLGLTPNFKSNFDLAEDAKLQLSKDTYDDDLDNLLAQIGDQYADLFLAAKNLSDAILLSDILRVNTEITKAPLSASMIKRYDEHHQDLTLLKALVRQQLPEKYKEIFFDQSKNGYAGYIDGGASQEEFYKFIKPILEKMDGTEELLVKLNREDLLRKQRTFDNGSIPHQIHLGELHAILRRQEDFYPFLKDNREKIEKILTFRIPYYVGPLARGNSRFAWMTRKSEETITPWNFEEVVDKGASAQSFIERMTNFDKNLPNEKVLPKHSLLYEYFTVYNELTKVKYVTEGMRKPAFLSGEQKKAIVDLLFKTNRKVTVKQLKEDYFKKIECFDSVEISGVEDRFNASLGTYHDLLKIIKDKDFLDNEENEDILEDIVLTLTLFEDREMIEERLKTYAHLFDDKVMKQLKRRRYTGWGRLSRKLINGIRDKQSGKTILDFLKSDGFANRNFMQLIHDDSLTFKEDIQKAQVSGQGDSLHEHIANLAGSPAIKKGILQTVKVVDELVKVMGRHKPENIVIEMARENQTTQKGQKNSRERMKRIEEGIKELGSQILKEHPVENTQLQNEKLYLYYLQNGRDMYVDQELDINRLSDYDVDHIVPQSFLKDDSIDNKVLTRSDKARGKSDNVPSEEVVKKMKNYWRQLLNAKLITQRKFDNLTKAERGGLSELDKAGFIKRQLVETRQITKHVAQILDSRMNTKYDENDKLIREVKVITLKSKLVSDFRKDFQFYKVREINNYHHAHDAYLNAVVGTALIKKYPKLESEFVYGDYKVYDVRKMIAKSEQEIGKATAKYFFYSNIMNFFKTEITLANGEIRKRPLIETNGETGEIVWDKGRDFATVRKVLSMPQVNIVKKTEVQTGGFSKESILPKRNSDKLIARKKDWDPKKYGGFDSPTVAYSVLVVAKVEKGKSKKLKSVKELLGITIMERSSFEKNPIDFLEAKGYKEVKKDLIIKLPKYSLFELENGRKRMLASAGELQKGNELALPSKYVNFLYLASHYEKLKGSPEDNEQKQLFVEQHKHYLDEIIEQISEFSKRVILADANLDKVLSAYNKHRDKPIREQAENIIHLFTLTNLGAPAAFKYFDTTIDRKRYTSTKEVLDATLIHQSITGLYETRIDLSQLGGDGGPAPGGGGSSGGTLNIEDEYRLHETSKEPDVSLGSTWLSDFPQAWAETGGMGLAVRQAPLIIPLKATSTPVSIKQYPMSQEARLGIKPHIQRLLDQGILVPCQSPWNTPLLPVKKPGTNDYRPVQDLREVNKRVEDIHPTVPNPYNLLSGLPPSHQWYTVLDLKDAFFCLRLHPTSQPLFAFEWRDPEMGISGQLTWTRLPQGFKNSPTLFDEALHRDLAGFRIQHPDLILLQYVDDLLLAATSELDCQQGTRALLQTLGDLGYRASAKKAQICQKQVKYLGYLLKEGQRWLTEARKETVMGQPIPKTPRQLREFLGTAGFCRLWIPGFAEMAAPLYPLTKTGTLFNWGPDQQKAFQEIKQALLTAPALGLPDLTKPFELFVDEKQGYAKGVLTQKLGPWRRPVAYLSKKLDPVAAGWPPCLRMVAAIAVLTKDAGKLTMGQPLVILAPHAVEALVKQPPDRWLSNARMTHYQALLLDTDRVQFGPVVALNPATLLPLPEEGLQHDCLDILAEAHGTRSDLMDQPLPDADHTWYTDGSSFLQEGQRKAGAAVTTETEVIWARALPAGTSAQRAELIALTQALKMAEGKKLNVYTDSRYAFATAHIHGEIYRRRGLLTSEGKEIKNKDEILALLKALFLPKRLSIIHCPGHQKGNSAEARGNRMADQAAREVATRETPETSTLLAGKRTADGSEFEKRTADGSEFESPKKKAKVE

SEQ ID NO: 7424 - protein, 2094 aa, synthetic construct
MPAAKRVKLDGGDKKYSIGLDIGTNSVGWAVITDEYKVPSKKFKVLGNTDRHSIKKNLIGALLFDSGETAEATRLKRTARRRYTRRKNRICYLQEIFSNEMAKVDDSFFHRLEESFLVEEDKKHERHPIFGNIVDEVAYHEKYPTIYHLRKKLVDSTDKADLRLIYLALAHMIKFRGHFLIEGDLNPDNSDVDKLFIQLVQTYNQLFEENPINASGVDAKAILSARLSKSRRLENLIAQLPGEKKNGLFGNLIALSLGLTPNFKSNFDLAEDAKLQLSKDTYDDDLDNLLAQIGDQYADLFLAAKNLSDAILLSDILRVNTEITKAPLSASMIKRYDEHHQDLTLLKALVRQQLPEKYKEIFFDQSKNGYAGYIDGGASQEEFYKFIKPILEKMDGTEELLVKLNREDLLRKQRTFDNGSIPHQIHLGELHAILRRQEDFYPFLKDNREKIEKILTFRIPYYVGPLARGNSRFAWMTRKSEETITPWNFEEVVDKGASAQSFIERMTNFDKNLPNEKVLPKHSLLYEYFTVYNELTKVKYVTEGMRKPAFLSGEQKKAIVDLLFKTNRKVTVKQLKEDYFKKIECFDSVEISGVEDRFNASLGTYHDLLKIIKDKDFLDNEENEDILEDIVLTLTLFEDREMIEERLKTYAHLFDDKVMKQLKRRRYTGWGRLSRKLINGIRDKQSGKTILDFLKSDGFANRNFMQLIHDDSLTFKEDIQKAQVSGQGDSLHEHIANLAGSPAIKKGILQTVKVVDELVKVMGRHKPENIVIEMARENQTTQKGQKNSRERMKRIEEGIKELGSQILKEHPVENTQLQNEKLYLYYLQNGRDMYVDQELDINRLSDYDVDHIVPQSFLKDDSIDNKVLTRSDKARGKSDNVPSEEVVKKMKNYWRQLLNAKLITQRKFDNLTKAERGGLSELDKAGFIKRQLVETRQITKHVAQILDSRMNTKYDENDKLIREVKVITLKSKLVSDFRKDFQFYKVREINNYHHAHDAYLNAVVGTALIKKYPKLESEFVYGDYKVYDVRKMIAKSEQEIGKATAKYFFYSNIMNFFKTEITLANGEIRKRPLIETNGETGEIVWDKGRDFATVRKVLSMPQVNIVKKTEVQTGGFSKESILPKRNSDKLIARKKDWDPKKYGGFDSPTVAYSVLVVAKVEKGKSKKLKSVKELLGITIMERSSFEKNPIDFLEAKGYKEVKKDLIIKLPKYSLFELENGRKRMLASAGELQKGNELALPSKYVNFLYLASHYEKLKGSPEDNEQKQLFVEQHKHYLDEIIEQISEFSKRVILADANLDKVLSAYNKHRDKPIREQAENIIHLFTLTNLGAPAAFKYFDTTIDRKRYTSTKEVLDATLIHQSITGLYETRIDLSQLGGDGGPAPGGGGSSGGTLNIEDEYRLHETSKGPDVPLGSTWLSDFPQAWAETGGMGLAVRQAPLIIPLKATSTPVSIKQYPMSQEARLGIKPHIQRLLDQGILVPCQSPWNTPLLPVKKPGTNDYRPVQDLREVNKRVEDIHPTVPNPYNLLSGLPPSHQWYTVLDLKDAFFCLRLHPTSQSLFAFEWRDPEMGISGQLTWTRLPQGFKNSPTLFNEALHRDLADFRIQHPDLILLQYVDDLLLAATSELDCQQGTRALLQTLGDLGYRASAKKAQICQKQVKYLGYLLKEGQRWLTEARKETVMGQPTPKTPRQLREFLGKAGFCRLFIPGFAEMAAPLYPLTKPGTLFEWGPDQQKAYQEIKQALLTAPALGLPDLTKPFELFVDEKQGYAKGVLTQKLGPWRRPVAYLSKKLDPVAAGWPPCLRMVAAIAVLTKDAGKLTMGQPLVILAPHAVEALVKQPPDRWLSNARMTHYQALLLDTDRVQFGPIVALNPATLLPLPEEGLQHDCLDILAEAHGTRPDLTDQPLPDADHTWYTDGSSFLQEGQRKAGAAVTTETEVVWAKALPAGTSAQRAELIALTQALKMAEGKKLNVYTDSRYAFATAHIHGEIYRRRGWLTSEGKEIKNKDEILALLKALFLPKRLSIIHCPGHQKGNRAEARGNRMADQAAREVATRETPETSTLLAGKRTADGSEFEKRTADGSEFESPKKKAKVE

SEQ ID NO: 7425 - protein, 2094 aa, synthetic construct
MPAAKRVKLDGGDKKYSIGLDIGTNSVGWAVITDEYKVPSKKFKVLGNTDRHSIKKNLIGALLFDSGETAEATRLKRTARRRYTRRKNRICYLQEIFSNEMAKVDDSFFHRLEESFLVEEDKKHERHPIFGNIVDEVAYHEKYPTIYHLRKKLVDSTDKADLRLIYLALAHMIKFRGHFLIEGDLNPDNSDVDKLFIQLVQTYNQLFEENPINASGVDAKAILSARLSKSRRLENLIAQLPGEKKNGLFGNLIALSLGLTPNFKSNFDLAEDAKLQLSKDTYDDDLDNLLAQIGDQYADLFLAAKNLSDAILLSDILRVNTEITKAPLSASMIKRYDEHHQDLTLLKALVRQQLPEKYKEIFFDQSKNGYAGYIDGGASQEEFYKFIKPILEKMDGTEELLVKLNREDLLRKQRTFDNGSIPHQIHLGELHAILRRQEDFYPFLKDNREKIEKILTFRIPYYVGPLARGNSRFAWMTRKSEETITPWNFEEVVDKGASAQSFIERMTNFDKNLPNEKVLPKHSLLYEYFTVYNELTKVKYVTEGMRKPAFLSGEQKKAIVDLLFKTNRKVTVKQLKEDYFKKIECFDSVEISGVEDRFNASLGTYHDLLKIIKDKDFLDNEENEDILEDIVLTLTLFEDREMIEERLKTYAHLFDDKVMKQLKRRRYTGWGRLSRKLINGIRDKQSGKTILDFLKSDGFANRNFMQLIHDDSLTFKEDIQKAQVSGQGDSLHEHIANLAGSPAIKKGILQTVKVVDELVKVMGRHKPENIVIEMARENQTTQKGQKNSRERMKRIEEGIKELGSQILKEHPVENTQLQNEKLYLYYLQNGRDMYVDQELDINRLSDYDVDHIVPQSFLKDDSIDNKVLTRSDKARGKSDNVPSEEVVKKMKNYWRQLLNAKLITQRKFDNLTKAERGGLSELDKAGFIKRQLVETRQITKHVAQILDSRMNTKYDENDKLIREVKVITLKSKLVSDFRKDFQFYKVREINNYHHAHDAYLNAVVGTALIKKYPKLESEFVYGDYKVYDVRKMIAKSEQEIGKATAKYFFYSNIMNFFKTEITLANGEIRKRPLIETNGETGEIVWDKGRDFATVRKVLSMPQVNIVKKTEVQTGGFSKESILPKRNSDKLIARKKDWDPKKYGGFDSPTVAYSVLVVAKVEKGKSKKLKSVKELLGITIMERSSFEKNPIDFLEAKGYKEVKKDLIIKLPKYSLFELENGRKRMLASAGELQKGNELALPSKYVNFLYLASHYEKLKGSPEDNEQKQLFVEQHKHYLDEIIEQISEFSKRVILADANLDKVLSAYNKHRDKPIREQAENIIHLFTLTNLGAPAAFKYFDTTIDRKRYTSTKEVLDATLIHQSITGLYETRIDLSQLGGDGGPAPGGGGSSGGTLNIEDEHRLHETSKEPDVSLGSTWLSDFPQAWAETGGMGLAVRQAPLIIPLKATSTPVSIKQYPMSQEARLGIKPHIQRLLDQGILVPCQSPWNTPLLPVKKPGTNDYRPVQDLREVNKRVEDIHPTVPNPYNLLSGLPPSHQWYTVLDLKDAFFCLRLHPTSQPLFAFEWRDPEMGISGQLTWTRLPQGFKNSPTLFNEALHRDLADFRIQHPDLILLQYVDDLLLAATSELDCQQGTRALLQTLGNLGYRASAKKAQICQKQVKYLGYLLKEGQRWLTEARKETVMGQPTPKTPRQLREFLGTAGFCRLWIPGFAEMAAPLYPLTKPGTLFNWGPDQQKAYQEIKQALLTAPALGLPDLTKPFELFVDEKQGYAKGVLTQKLGPWRRPVAYLSKKLDPVAAGWPPCLRMVAAIAVLTKDAGKLTMGQPLVILAPHAVEALVKQPPDRWLSNARMTHYQALLLDTDRVQFGPVVALNPATLLPLPEEGLQHNCLDILAEAHGTRPDLTDQPLPDADHTWYTDGSSLLQEGQRKAGAAVTTETEVIWAKALPAGTSAQRAELIALTQALKMAEGKKLNVYTDSRYAFATAHIHGEIYRRRGWLTSEGKEIKNKDEILALLKALFLPKRLSIIHCPGHQKGHSAEARGNRMADQAARKAAITETPDTSTLLAGKRTADGSEFEKRTADGSEFESPKKKAKVE

SEQ ID NO: 7426 - protein, 2094 aa, synthetic construct; identical to SEQ ID NO: 7425

SEQ ID NO: 7427 - protein, 2114 aa, synthetic construct
MPAAKRVKLDGGDKKYSIGLDIGTNSVGWAVITDEYKVPSKKFKVLGNTDRHSIKKNLIGALLFDSGETAEATRLKRTARRRYTRRKNRICYLQEIFSNEMAKVDDSFFHRLEESFLVEEDKKHERHPIFGNIVDEVAYHEKYPTIYHLRKKLVDSTDKADLRLIYLALAHMIKFRGHFLIEGDLNPDNSDVDKLFIQLVQTYNQLFEENPINASGVDAKAILSARLSKSRRLENLIAQLPGEKKNGLFGNLIALSLGLTPNFKSNFDLAEDAKLQLSKDTYDDDLDNLLAQIGDQYADLFLAAKNLSDAILLSDILRVNTEITKAPLSASMIKRYDEHHQDLTLLKALVRQQLPEKYKEIFFDQSKNGYAGYIDGGASQEEFYKFIKPILEKMDGTEELLVKLNREDLLRKQRTFDNGSIPHQIHLGELHAILRRQEDFYPFLKDNREKIEKILTFRIPYYVGPLARGNSRFAWMTRKSEETITPWNFEEVVDKGASAQSFIERMTNFDKNLPNEKVLPKHSLLYEYFTVYNELTKVKYVTEGMRKPAFLSGEQKKAIVDLLFKTNRKVTVKQLKEDYFKKIECFDSVEISGVEDRFNASLGTYHDLLKIIKDKDFLDNEENEDILEDIVLTLTLFEDREMIEERLKTYAHLFDDKVMKQLKRRRYTGWGRLSRKLINGIRDKQSGKTILDFLKSDGFANRNFMQLIHDDSLTFKEDIQKAQVSGQGDSLHEHIANLAGSPAIKKGILQTVKVVDELVKVMGRHKPENIVIEMARENQTTQKGQKNSRERMKRIEEGIKELGSQILKEHPVENTQLQNEKLYLYYLQNGRDMYVDQELDINRLSDYDVDHIVPQSFLKDDSIDNKVLTRSDKARGKSDNVPSEEVVKKMKNYWRQLLNAKLITQRKFDNLTKAERGGLSELDKAGFIKRQLVETRQITKHVAQILDSRMNTKYDENDKLIREVKVITLKSKLVSDFRKDFQFYKVREINNYHHAHDAYLNAVVGTALIKKYPKLESEFVYGDYKVYDVRKMIAKSEQEIGKATAKYFFYSNIMNFFKTEITLANGEIRKRPLIETNGETGEIVWDKGRDFATVRKVLSMPQVNIVKKTEVQTGGFSKESILPKRNSDKLIARKKDWDPKKYGGFDSPTVAYSVLVVAKVEKGKSKKLKSVKELLGITIMERSSFEKNPIDFLEAKGYKEVKKDLIIKLPKYSLFELENGRKRMLASAGELQKGNELALPSKYVNFLYLASHYEKLKGSPEDNEQKQLFVEQHKHYLDEIIEQISEFSKRVILADANLDKVLSAYNKHRDKPIREQAENIIHLFTLTNLGAPAAFKYFDTTIDRKRYTSTKEVLDATLIHQSITGLYETRIDLSQLGGDGGPAPGGGGSSGGVQEISDSRPMLHIYLNGRRFLGLLDTGADKTCIAGRDWPANWPIHQTESSLQGLGMACGVARSSQPLRWQHEDKSGIIHPFVIPTLPFTLWGRDIMKDIKVRLMTDSPDDSQDLMIGAIESNLFADQISWKSDQPVWLNQWPLKQEKLQALQQLVTEQLQLGHLEESNSPWNTPVFVIKKKSGKWRLLQDLRAVNATMHDMGALQPGLPSPVAVPKGWEIIIIDLQDCFFNIKLHPEDCKRFAFSVPSPNFKRPYQRFQWKVLPQGMKNSPTLCQKFVDKAILTVRDKYQDSYIVHYMDDILLAHPSRSIVDEILTSMIQALNKHGLVVSTEKIQKYDNLKYLGTHIQGDSVSYQKLQIRTDKLRTLNDFQKLLGNINWIRPFLKLTTGELKPLFEILNPDSNPISTRKLTPEACKALQLMNERLSTARVKRLDLSQPWSLCILKTEYTPTACLWQDGVVEWIHLPHISPKVITPYDIFCTQLIIKGRHRSKELFSKDPDYIVVPYTKVQFDLLLQEKEDWPISLLGFLGEVHFHLPKDPLLTFTLQTAIIFPHMTSTTPLEKGIVIFTDGSANGRSVTYIQGREPIIKENTQNTAQQAEIVAVITAFEEVSQPFNLYTDSKYVTGLFPEIETATLSPRTKIYTELKHLQRLIHKRQEKFYIGHIRGHTGLPGPLAQGNAYADSLTRILTAAGKRTADGSEFEKRTADGSEFESPKKKAKVE

SEQ ID NO: 7428 - protein, 2114 aa, synthetic construct
MPAAKRVKLDGGDKKYSIGLDIGTNSVGWAVITDEYKVPSKKFKVLGNTDRHSIKKNLIGALLFDSGETAEATRLKRTARRRYTRRKNRICYLQEIFSNEMAKVDDSFFHRLEESFLVEEDKKHERHPIFGNIVDEVAYHEKYPTIYHLRKKLVDSTDKADLRLIYLALAHMIKFRGHFLIEGDLNPDNSDVDKLFIQLVQTYNQLFEENPINASGVDAKAILSARLSKSRRLENLIAQLPGEKKNGLFGNLIALSLGLTPNFKSNFDLAEDAKLQLSKDTYDDDLDNLLAQIGDQYADLFLAAKNLSDAILLSDILRVNTEITKAPLSASMIKRYDEHHQDLTLLKALVRQQLPEKYKEIFFDQSKNGYAGYIDGGASQEEFYKFIKPILEKMDGTEELLVKLNREDLLRKQRTFDNGSIPHQIHLGELHAILRRQEDFYPFLKDNREKIEKILTFRIPYYVGPLARGNSRFAWMTRKSEETITPWNFEEVVDKGASAQSFIERMTNFDKNLPNEKVLPKHSLLYEYFTVYNELTKVKYVTEGMRKPAFLSGEQKKAIVDLLFKTNRKVTVKQLKEDYFKKIECFDSVEISGVEDRFNASLGTYHDLLKIIKDKDFLDNEENEDILEDIVLTLTLFEDREMIEERLKTYAHLFDDKVMKQLKRRRYTGWGRLSRKLINGIRDKQSGKTILDFLKSDGFANRNFMQLIHDDSLTFKEDIQKAQVSGQGDSLHEHIANLAGSPAIKKGILQTVKVVDELVKVMGRHKPENIVIEMARENQTTQKGQKNSRERMKRIEEGIKELGSQILKEHPVENTQLQNEKLYLYYLQNGRDMYVDQELDINRLSDYDVDHIVPQSFLKDDSIDNKVLTRSDKARGKSDNVPSEEVVKKMKNYWRQLLNAKLITQRKFDNLTKAERGGLSELDKAGFIKRQLVETRQITKHVAQILDSRMNTKYDENDKLIREVKVITLKSKLVSDFRKDFQFYKVREINNYHHAHDAYLNAVVGTALIKKYPKLESEFVYGDYKVYDVRKMIAKSEQEIGKATAKYFFYSNIMNFFKTEITLANGEIRKRPLIETNGETGEIVWDKGRDFATVRKVLSMPQVNIVKKTEVQTGGFSKESILPKRNSDKLIARKKDWDPKKYGGFDSPTVAYSVLVVAKVEKGKSKKLKSVKELLGITIMERSSFEKNPIDFLEAKGYKEVKKDLIIKLPKYSLFELENGRKRMLASAGELQKGNELALPSKYVNFLYLASHYEKLKGSPEDNEQKQLFVEQHKHYLDEIIEQISEFSKRVILADANLDKVLSAYNKHRDKPIREQAENIIHLFTLTNLGAPAAFKYFDTTIDRKRYTSTKEVLDATLIHQSITGLYETRIDLSQLGGDGGPAPGGGGSSGGVQEISDSRPMLHIYLNGRRFLGLLDTGADKTCIAGRDWPANWPIHQTESSLQGLGMACGVARSSQPLRWQHEDKSGIIHPFVIPTLPFTLWGRDIMKDIKVRLMTDSPDDSQDLMIGAIESNLFADQISWKSDQPVWLNQWPLKQEKLQALQQLVTEQLQLGHLEESNSPWNTPVFVIKKKSGKWRLLQDLRAVNATMHDMGALQPGLPSPVAVPKGWEIIIIDLQDCFFNIKLHPEDCKRFAFSVPSPNFKRPYQRFQWKVLPQGMKNSPTLCQKFVDKAILTVRDKYQDSYIVHYMDDILLAHPSRSIVDEILTSMIQALNKHGLVVSTEKIQKYDNLKYLGTHIQGDSVSYQKLQIRTDKLRTLNDFQKLLGNINWIRPFLKLTTGELKPLFEILNGDSNPISTRKLTPEACKALQLMNERLSTARVKRLDLSQPWSLCILKTEYTPTACLWQDGVVEWIHLPHISPKVITPYDIFCTQLIIKGRHRSKELFSKDPDYIVVPYTKVQFDLLLQEKEDWPISLLGFLGEVHFHLPKDPLLTFTLQTAIIFPHMTSTTPLEKGIVIFTDGSANGRSVTYIQGREPIIKENTQNTAQQAEIVAVITAFEEVSQPFNLYTDSKYVTGLFPEIETATLSPRTKIYTELKHLQRLIHKRQEKFYIGHIRGHTGLPGPLAQGNAYADSLTRILTAAGKRTADGSEFEKRTADGSEFESPKKKAKVE

SEQ ID NO: 7429 - protein, 2086 aa, synthetic construct
MPAAKRVKLDGGDKKYSIGLDIGTNSVGWAVITDEYKVPSKKFKVLGNTDRHSIKKNLIGALLFDSGETAEATRLKRTARRRYTRRKNRICYLQEIFSNEMAKVDDSFFHRLEESFLVEEDKKHERHPIFGNIVDEVAYHEKYPTIYHLRKKLVDSTDKADLRLIYLALAHMIKFRGHFLIEGDLNPDNSDVDKLFIQLVQTYNQLFEENPINASGVDAKAILSARLSKSRRLENLIAQLPGEKKNGLFGNLIALSLGLTPNFKSNFDLAEDAKLQLSKDTYDDDLDNLLAQIGDQYADLFLAAKNLSDAILLSDILRVNTEITKAPLSASMIKRYDEHHQDLTLLKALVRQQLPEKYKEIFFDQSKNGYAGYIDGGASQEEFYKFIKPILEKMDGTEELLVKLNREDLLRKQRTFDNGSIPHQIHLGELHAILRRQEDFYPFLKDNREKIEKILTFRIPYYVGPLARGNSRFAWMTRKSEETITPWNFEEVVDKGASAQSFIERMTNFDKNLPNEKVLPKHSLLYEYFTVYNELTKVKYVTEGMRKPAFLSGEQKKAIVDLLFKTNRKVTVKQLKEDYFKKIECFDSVEISGVEDRFNASLGTYHDLLKIIKDKDFLDNEENEDILEDIVLTLTLFEDREMIEERLKTYAHLFDDKVMKQLKRRRYTGWGRLSRKLINGIRDKQSGKTILDFLKSDGFANRNFMQLIHDDSLTFKEDIQKAQVSGQGDSLHEHIANLAGSPAIKKGILQTVKVVDELVKVMGRHKPENIVIEMARENQTTQKGQKNSRERMKRIEEGIKELGSQILKEHPVENTQLQNEKLYLYYLQNGRDMYVDQELDINRLSDYDVDHIVPQSFLKDDSIDNKVLTRSDKARGKSDNVPSEEVVKKMKNYWRQLLNAKLITQRKFDNLTKAERGGLSELDKAGFIKRQLVETRQITKHVAQILDSRMNTKYDENDKLIREVKVITLKSKLVSDFRKDFQFYKVREINNYHHAHDAYLNAVVGTALIKKYPKLESEFVYGDYKVYDVRKMIAKSEQEIGKATAKYFFYSNIMNFFKTEITLANGEIRKRPLIETNGETGEIVWDKGRDFATVRKVLSMPQVNIVKKTEVQTGGFSKESILPKRNSDKLIARKKDWDPKKYGGFDSPTVAYSVLVVAKVEKGKSKKLKSVKELLGITIMERSSFEKNPIDFLEAKGYKEVKKDLIIKLPKYSLFELENGRKRMLASAGELQKGNELALPSKYVNFLYLASHYEKLKGSPEDNEQKQLFVEQHKHYLDEIIEQISEFSKRVILADANLDKVLSAYNKHRDKPIREQAENIIHLFTLTNLGAPAAFKYFDTTIDRKRYTSTKEVLDATLIHQSITGLYETRIDLSQLGGDGGPAPGGGGSSGGLDDEYRLYSPLVKPDQNIQFWLEQFPQAWAETAGMGLAKQVPPQVIQLKASATPVSVRQYPLSKEAQEGIRPHVQRLIQQGILVPVQSPWNTPLLPVRKPGTNDYRPVQDLREVNKRVQDIHPTVPNPYNLLCALPPQRSWYTVLDLKDAFFCLRLHPTSQPLFAFEWRDPGTGRTGQLTWTRLPQGFKNSPTIFNEALHRDLANFRIQHPQVTLLQYVDDLLLAGATKQDCLEGTKALLLELSDLGYRASAKKAQICRREVTYLGYSLRDGQRWLTEARKKTVVQIPAPTTAKQVREFLGKAGFCRLFIPGFATLAAPLYPLTKPKGEFSWAPEHQKAFDAIKKALLSAPALALPDVTKPFTLYVDERKGVARGVLTQTLGPWRRPVAYLSKKLDPVASGWPVCLKAIAAVAILVKDADKLTLGQNITVIAPHALENIVRQPPDRWMTNARMTHYQSLLLTERVTFAPPAALNPATLLPEETDEPVTHDCHQLLIEETGVRKDLTDIPLTGEVLTWFTDGSSYVVEGKRMAGAAVVDGTRTIWASSLPEGTSAQKAELMALTQALRLAEGKSINIYTDSRYAFATAHVHGAIYKQRGWLTSAGREIKNKEEILSLLEALHLPKRLAIIHCPGHQKAKDPISRGNQMADRVAKQAAQGVNLLPAGKRTADGSEFEKRTADGSEFESPKKKAKVE

SEQ ID NO: 7430 - protein, 2086 aa, synthetic construct; identical to SEQ ID NO: 7429

SEQ ID NO: 7431 - protein, 2085 aa, synthetic construct
MPAAKRVKLDGGDKKYSIGLDIGTNSVGWAVITDEYKVPSKKFKVLGNTDRHSIKKNLIGALLFDSGETAEATRLKRTARRRYTRRKNRICYLQEIFSNEMAKVDDSFFHRLEESFLVEEDKKHERHPIFGNIVDEVAYHEKYPTIYHLRKKLVDSTDKADLRLIYLALAHMIKFRGHFLIEGDLNPDNSDVDKLFIQLVQTYNQLFEENPINASGVDAKAILSARLSKSRRLENLIAQLPGEKKNGLFGNLIALSLGLTPNFKSNFDLAEDAKLQLSKDTYDDDLDNLLAQIGDQYADLFLAAKNLSDAILLSDILRVNTEITKAPLSASMIKRYDEHHQDLTLLKALVRQQLPEKYKEIFFDQSKNGYAGYIDGGASQEEFYKFIKPILEKMDGTEELLVKLNREDLLRKQRTFDNGSIPHQIHLGELHAILRRQEDFYPFLKDNREKIEKILTFRIPYYVGPLARGNSRFAWMTRKSEETITPWNFEEVVDKGASAQSFIERMTNFDKNLPNEKVLPKHSLLYEYFTVYNELTKVKYVTEGMRKPAFLSGEQKKAIVDLLFKTNRKVTVKQLKEDYFKKIECFDSVEISGVEDRFNASLGTYHDLLKIIKDKDFLDNEENEDILEDIVLTLTLFEDREMIEERLKTYAHLFDDKVMKQLKRRRYTGWGRLSRKLINGIRDKQSGKTILDFLKSDGFANRNFMQLIHDDSLTFKEDIQKAQVSGQGDSLHEHIANLAGSPAIKKGILQTVKVVDELVKVMGRHKPENIVIEMARENQTTQKGQKNSRERMKRIEEGIKELGSQILKEHPVENTQLQNEKLYLYYLQNGRDMYVDQELDINRLSDYDVDHIVPQSFLKDDSIDNKVLTRSDKARGKSDNVPSEEVVKKMKNYWRQLLNAKLITQRKFDNLTKAERGGLSELDKAGFIKRQLVETRQITKHVAQILDSRMNTKYDENDKLIREVKVITLKSKLVSDFRKDFQFYKVREINNYHHAHDAYLNAVVGTALIKKYPKLESEFVYGDYKVYDVRKMIAKSEQEIGKATAKYFFYSNIMNFFKTEITLANGEIRKRPLIETNGETGEIVWDKGRDFATVRKVLSMPQVNIVKKTEVQTGGFSKESILPKRNSDKLIARKKDWDPKKYGGFDSPTVAYSVLVVAKVEKGKSKKLKSVKELLGITIMERSSFEKNPIDFLEAKGYKEVKKDLIIKLPKYSLFELENGRKRMLASAGELQKGNELALPSKYVNFLYLASHYEKLKGSPEDNEQKQLFVEQHKHYLDEIIEQISEFSKRVILADANLDKVLSAYNKHRDKPIREQAENIIHLFTLTNLGAPAAFKYFDTTIDRKRYTSTKEVLDATLIHQSITGLYETRIDLSQLGGDGGPAPGGGGSSGGIPWLMKKPLQLTTLVPLQEYEERLLKQTMLTGSYKEKLQSLFLKYDALWQHWENQVGHRRIKPHHIATGTVNPRPQKQYPINPKAKASIQTVINDLLKQGVLIQQNSIMNTPVYPVPKPDGKWRMVLDYREVNKTIPLIAAQNQHSAGILSSIFRGKYKTTLDLSNGFWAHSITPESYWLTAFTWLGQQYCWTRLPQGFLNSPALFTADVVDLLKEVPNVQVYVDDIYISHDDPREHLEQLEKVFSLLLNAGYVVSLKKSEIAQHEVEFLGFNITKEGRGLTETFKQKLLNITPPRDLKQLQSILGLLNFARNFIPNFSELVKPLYNIIATANGKYITWTTDNSQQLQNIISMLNSAENLEERNPEVRLIMKVNTSPSAGYIRFYNEFAKRPIMYLNYVYTKAEVKFTNTEKLLTTIHKGLIKALDLGMGQEILVYSPIVSMTKIQKTPLPERKALPIRWITWMSYLEDPRIQFHYDKTLPELQQVPTVTDDIIAKIKHPSEFSMVFYTDGSAIKHPNVNKSHNAGMGIAQVQFKPEFTVINTWSIPLGDHTAQLAEVAAVEFACKKALKIDGPVLIVTDSFYVAESVNKELPYWQSNGFFNNKKKPLKHVSKWKSIADCIQLKPDIIIIHEKGHQPTASTFHTEGNNLADKLATQGSYVVNAGKRTADGSEFEKRTADGSEFESPKKKAKVE

SEQ ID NO: 7432 - protein, 2085 aa, synthetic construct
MPAAKRVKLDGGDKKYSIGLDIGTNSVGWAVITDEYKVPSKKFKVLGNTDRHSIKKNLIGALLFDSGETAEATRLKRTARRRYTRRKNRICYLQEIFSNEMAKVDDSFFHRLEESFLVEEDKKHERHPIFGNIVDEVAYHEKYPTIYHLRKKLVDSTDKADLRLIYLALAHMIKFRGHFLIEGDLNPDNSDVDKLFIQLVQTYNQLFEENPINASGVDAKAILSARLSKSRRLENLIAQLPGEKKNGLFGNLIALSLGLTPNFKSNFDLAEDAKLQLSKDTYDDDLDNLLAQIGDQYADLFLAAKNLSDAILLSDILRVNTEITKAPLSASMIKRYDEHHQDLTLLKALVRQQLPEKYKEIFFDQSKNGYAGYIDGGASQEEFYKFIKPILEKMDGTEELLVKLNREDLLRKQRTFDNGSIPHQIHLGELHAILRRQEDFYPFLKDNREKIEKILTFRIPYYVGPLARGNSRFAWMTRKSEETITPWNFEEVVDKGASAQSFIERMTNFDKNLPNEKVLPKHSLLYEYFTVYNELTKVKYVTEGMRKPAFLSGEQKKAIVDLLFKTNRKVTVKQLKEDYFKKIECFDSVEISGVEDRFNASLGTYHDLLKIIKDKDFLDNEENEDILEDIVLTLTLFEDREMIEERLKTYAHLFDDKVMKQLKRRRYTGWGRLSRKLINGIRDKQSGKTILDFLKSDGFANRNFMQLIHDDSLTFKEDIQKAQVSGQGDSLHEHIANLAGSPAIKKGILQTVKVVDELVKVMGRHKPENIVIEMARENQTTQKGQKNSRERMKRIEEGIKELGSQILKEHPVENTQLQNEKLYLYYLQNGRDMYVDQELDINRLSDYDVDHIVPQSFLKDDSIDNKVLTRSDKARGKSDNVPSEEVVKKMKNYWRQLLNAKLITQRKFDNLTKAERGGLSELDKAGFIKRQLVETRQITKHVAQILDSRMNTKYDENDKLIREVKVITLKSKLVSDFRKDFQFYKVREINNYHHAHDAYLNAVVGTALIKKYPKLESEFVYGDYKVYDVRKMIAKSEQEIGKATAKYFFYSNIMNFFKTEITLANGEIRKRPLIETNGETGEIVWDKGRDFATVRKVLSMPQVNIVKKTEVQTGGFSKESILPKRNSDKLIARKKDWDPKKYGGFDSPTVAYSVLVVAKVEKGKSKKLKSVKELLGITIMERSSFEKNPIDFLEAKGYKEVKKDLIIKLPKYSLFELENGRKRMLASAGELQKGNELALPSKYVNFLYLASHYEKLKGSPEDNEQKQLFVEQHKHYLDEIIEQISEFSKRVILADANLDKVLSAYNKHRDKPIREQAENIIHLFTLTNLGAPAAFKYFDTTIDRKRYTSTKEVLDATLIHQSITGLYETRIDLSQLGGDGGPAPGGGGSSGGIPWLMKKPLQLTTLVPLQEYEERLLKQTMLTGSYKEKLQSLFLKYDALWQHWENQVGHRRIKPHHIATGTVNPRPQKQYPINPKAKASIQTVINDLLKQGVLIQQNSIMNTPVYPVPKPDGKWRMVLDYREVNKTIPLIAAQNQHSAGILSSIFRGKYKTTLDLSNGFWAHSITPESYWLTAFTWLGQQYCWTRLPQGFLNSPALFNADVVDLLKEVPNVQVYVDDIYISHDDPREHLEQLEKVFSLLLNAGYVVSLKKSEIAQHEVEFLGFNITKEGRGLTETFKQKLLNITPPRDLKQLQSILGLLNFARNFIPNFSELVKPLYNIIATAPGKYITWTTDNSQQLQNIISMLNSAENLEERNPEVRLIMKVNTSPSAGYIRFYNEFAKRPIMYLNYVYTKAEVKFTNTEKLLTTIHKGLIKALDLGMGQEILVYSPIVSMTKIQKTPLPERKALPIRWITWMSYLEDPRIQFHYDKTLPELQQVPTVTDDIIAKIKHPSEFSMVFYTDGSAIKHPNVNKSHNAGMGIAQVQFKPEFTVINTWSIPLGDHTAQLAEVAAVEFACKKALKIDGPVLIVTDSFYVAESVNKELPYWQSNGFFNNKKKPLKHVSKWKSIADCIQLKPDIIIIHEKGHQPTASTFHTEGNNLADKLATQGSYVVNAGKRTADGSEFEKRTADGSEFESPKKKAKVE

SEQ ID NO: 7433 - protein, 2085 aa, synthetic construct
MPAAKRVKLDGGDKKYSIGLDIGTNSVGWAVITDEYKVPSKKFKVLGNTDRHSIKKNLIGALLFDSGETAEATRLKRTARRRYTRRKNRICYLQEIFSNEMAKVDDSFFHRLEESFLVEEDKKHERHPIFGNIVDEVAYHEKYPTIYHLRKKLVDSTDKADLRLIYLALAHMIKFRGHFLIEGDLNPDNSDVDKLFIQLVQTYNQLFEENPINASGVDAKAILSARLSKSRRLENLIAQLPGEKKNGLFGNLIALSLGLTPNFKSNFDLAEDAKLQLSKDTYDDDLDNLLAQIGDQYADLFLAAKNLSDAILLSDILRVNTEITKAPLSASMIKRYDEHHQDLTLLKALVRQQLPEKYKEIFFDQSKNGYAGYIDGGASQEEFYKFIKPILEKMDGTEELLVKLNREDLLRKQRTFDNGSIPHQIHLGELHAILRRQEDFYPFLKDNREKIEKILTFRIPYYVGPLARGNSRFAWMTRKSEETITPWNFEEVVDKGASAQSFIERMTNFDKNLPNEKVLPKHSLLYEYFTVYNELTKVKYVTEGMRKPAFLSGEQKKAIVDLLFKTNRKVTVKQLKEDYFKKIECFDSVEISGVEDRFNASLGTYHDLLKIIKDKDFLDNEENEDILEDIVLTLTLFEDREMIEERLKTYAHLFDDKVMKQLKRRRYTGWGRLSRKLINGIRDKQSGKTILDFLKSDGFANRNFMQLIHDDSLTFKEDIQKAQVSGQGDSLHEHIANLAGSPAIKKGILQTVKVVDELVKVMGRHKPENIVIEMARENQTTQKGQKNSRERMKRIEEGIKELGSQILKEHPVENTQLQNEKLYLYYLQNGRDMYVDQELDINRLSDYDVDHIVPQSFLKDDSIDNKVLTRSDKARGKSDNVPSEEVVKKMKNYWRQLLNAKLITQRKFDNLTKAERGGLSELDKAGFIKRQLVETRQITKHVAQILDSRMNTKYDENDKLIREVKVITLKSKLVSDFRKDFQFYKVREINNYHHAHDAYLNAVVGTALIKKYPKLESEFVYGDYKVYDVRKMIAKSEQEIGKATAKYFFYSNIMNFFKTEITLANGEIRKRPLIETNGETGEIVWDKGRDFATVRKVLSMPQVNIVKKTEVQTGGFSKESILPKRNSDKLIARKKDWDPKKYGGFDSPTVAYSVLVVAKVEKGKSKKLKSVKELLGITIMERSSFEKNPIDFLEAKGYKEVKKDLIIKLPKYSLFELENGRKRMLASAGELQKGNELALPSKYVNFLYLASHYEKLKGSPEDNEQKQLFVEQHKHYLDEIIEQISEFSKRVILADANLDKVLSAYNKHRDKPIREQAENIIHLFTLTNLGAPAAFKYFDTTIDRKRYTSTKEVLDATLIHQSITGLYETRIDLSQLGGDGGPAPGGGGSSGGIPWLMKKPLQLTTLVPLQEYEERLLKQTMLTGSYKEKLQSLFLKYDALWQHWENQVGHRRIKPHHIATGTVNPRPQKQYPINPKAKASIQTVINDLLKQGVLIQQNSIMNTPVYPVPKPDGKWRMVLDYREVNKTIPLIAAQNQHSAGILSSIFRGKYKTTLDLSNGFWAHSITPESYWLTAFTWLGQQYCWTRLPQGFLNSPALFNADVVDLLKEVPNVQVYVDDIYISHDDPREHLEQLEKVFSLLLNAGYVVSLKKSEIAQHEVEFLGFNITKEGRGLTETFKQKLLNITPPRDLKQLQSILGKLNFARNFIPNFSELVKPLYNIIATAPGKYITWTTDNSQQLQNIISMLNSAENLEERNPEVRLIMKVNTSPSAGYIRFYNEFAKRPIMYLNYVYTKAEVKFTNTEKLLTTIHKGLIKALDLGMGQEILVYSPIVSMTKIQKTPLPERKALPIRWITWMSYLEDPRIQFHYDKTLPELQQVPTVTDDIIAKIKHPSEFSMVFYTDGSAIKHPNVNKSHNAGMGIAQVQFKPEFTVINTWSIPLGDHTAQLAEVAAVEFACKKALKIDGPVLIVTDSFYVAESVNKELPYWQSNGFFNNKKKPLKHVSKWKSIADCIQLKPDIIIIHEKGHQPTASTFHTEGNNLADKLATQGSYVVNAGKRTADGSEFEKRTADGSEFESPKKKAKVE

SEQ ID NO: 7434 - protein, 2174 aa, synthetic construct
MPAAKRVKLDGGDKKYSIGLDIGTNSVGWAVITDEYKVPSKKFKVLGNTDRHSIKKNLIGALLFDSGETAEATRLKRTARRRYTRRKNRICYLQEIFSNEMAKVDDSFFHRLEESFLVEEDKKHERHPIFGNIVDEVAYHEKYPTIYHLRKKLVDSTDKADLRLIYLALAHMIKFRGHFLIEGDLNPDNSDVDKLFIQLVQTYNQLFEENPINASGVDAKAILSARLSKSRRLENLIAQLPGEKKNGLFGNLIALSLGLTPNFKSNFDLAEDAKLQLSKDTYDDDLDNLLAQIGDQYADLFLAAKNLSDAILLSDILRVNTEITKAPLSASMIKRYDEHHQDLTLLKALVRQQLPEKYKEIFFDQSKNGYAGYIDGGASQEEFYKFIKPILEKMDGTEELLVKLNREDLLRKQRTFDNGSIPHQIHLGELHAILRRQEDFYPFLKDNREKIEKILTFRIPYYVGPLARGNSRFAWMTRKSEETITPWNFEEVVDKGASAQSFIERMTNFDKNLPNEKVLPKHSLLYEYFTVYNELTKVKYVTEGMRKPAFLSGEQKKAIVDLLFKTNRKVTVKQLKEDYFKKIECFDSVEISGVEDRFNASLGTYHDLLKIIKDKDFLDNEENEDILEDIVLTLTLFEDREMIEERLKTYAHLFDDKVMKQLKRRRYTGWGRLSRKLINGIRDKQSGKTILDFLKSDGFANRNFMQLIHDDSLTFKEDIQKAQVSGQGDSLHEHIANLAGSPAIKKGILQTVKVVDELVKVMGRHKPENIVIEMARENQTTQKGQKNSRERMKRIEEGIKELGSQILKEHPVENTQLQNEKLYLYYLQNGRDMYVDQELDINRLSDYDVDHIVPQSFLKDDSIDNKVLTRSDKARGKSDNVPSEEVVKKMKNYWRQLLNAKLITQRKFDNLTKAERGGLSELDKAGFIKRQLVETRQITKHVAQILDSRMNTKYDENDKLIREVKVITLKSKLVSDFRKDFQFYKVREINNYHHAHDAYLNAVVGTALIKKYPKLESEFVYGDYKVYDVRKMIAKSEQEIGKATAKYFFYSNIMNFFKTEITLANGEIRKRPLIETNGETGEIVWDKGRDFATVRKVLSMPQVNIVKKTEVQTGGFSKESILPKRNSDKLIARKKDWDPKKYGGFDSPTVAYSVLVVAKVEKGKSKKLKSVKELLGITIMERSSFEKNPIDFLEAKGYKEVKKDLIIKLPKYSLFELENGRKRMLASAGELQKGNELALPSKYVNFLYLASHYEKLKGSPEDNEQKQLFVEQHKHYLDEIIEQISEFSKRVILADANLDKVLSAYNKHRDKPIREQAENIIHLFTLTNLGAPAAFKYFDTTIDRKRYTSTKEVLDATLIHQSITGLYETRIDLSQLGGDGGPAPGGGGSSGGMDPLQLLQPLEAEIKGTKLKAHWNSGATITCVPQAFLEEEVPIKNIWIKTIHGEKEQPVYYLTFKIQGRKVEAEVISSPYDYILVSPSDIPWLMKKPLQLTTLVPLQEYEERLLKQTMLTGSYKEKLQSLFLKYDALWQHWENQVGHRRIKPHHIATGTVNPRPQKQYPINPKAKASIQTVINDLLKQGVLIQQNSIMNTPVYPVPKPDGKWRMVLDYREVNKTIPLIAAQNQHSAGILSSIFRGKYKTTLDLSNGFWAHSITPESYWLTAFTWLGQQYCWTRLPQGFLNSPALFNADVVDLLKEVPNVQVYVDDIYISHDDPREHLEQLEKVFSLLLNAGYVVSLKKSEIAQHEVEFLGFNITKEGRGLTETFKQKLLNITPPRDLKQLQSILGKLNFARNFIPNFSELVKPLYNIIATAPGKYITWTTDNSQQLQNIISMLNSAENLEERNPEVRLIMKVNTSPSAGYIRFYNEFAKRPIMYLNYVYTKAEVKFTNTEKLLTTIHKGLIKALDLGMGQEILVYSPIVSMTKIQKTPLPERKALPIRWITWMSYLEDPRIQFHYDKTLPELQQVPTVTDDIIAKIKHPSEFSMVFYTDGSAIKHPNVNKSHNAGMGIAQVQFKPEFTVINTWSIPLGDHTAQLAEVAAVEFACKKALKIDGPVLIVTDSFYVAESVNKELPYWQSNGFFNNKKKPLKHVSKWKSIADCIQLKPDIIIIHEKGHQPTASTFHTEGNNLADKLATQGSYVVNAGKRTADGSEFEKRTADGSEFESPKKKAKVE

SEQ ID NO: 7435 - protein, 2092 aa, synthetic construct
MPAAKRVKLDGGDKKYSIGLDIGTNSVGWAVITDEYKVPSKKFKVLGNTDRHSIKKNLIGALLFDSGETAEATRLKRTARRRYTRRKNRICYLQEIFSNEMAKVDDSFFHRLEESFLVEEDKKHERHPIFGNIVDEVAYHEKYPTIYHLRKKLVDSTDKADLRLIYLALAHMIKFRGHFLIEGDLNPDNSDVDKLFIQLVQTYNQLFEENPINASGVDAKAILSARLSKSRRLENLIAQLPGEKKNGLFGNLIALSLGLTPNFKSNFDLAEDAKLQLSKDTYDDDLDNLLAQIGDQYADLFLAAKNLSDAILLSDILRVNTEITKAPLSASMIKRYDEHHQDLTLLKALVRQQLPEKYKEIFFDQSKNGYAGYIDGGASQEEFYKFIKPILEKMDGTEELLVKLNREDLLRKQRTFDNGSIPHQIHLGELHAILRRQEDFYPFLKDNREKIEKILTFRIPYYVGPLARGNSRFAWMTRKSEETITPWNFEEVVDKGASAQSFIERMTNFDKNLPNEKVLPKHSLLYEYFTVYNELTKVKYVTEGMRKPAFLSGEQKKAIVDLLFKTNRKVTVKQLKEDYFKKIECFDSVEISGVEDRFNASLGTYHDLLKIIKDKDFLDNEENEDILEDIVLTLTLFEDREMIEERLKTYAHLFDDKVMKQLKRRRYTGWGRLSRKLINGIRDKQSGKTILDFLKSDGFANRNFMQLIHDDSLTFKEDIQKAQVSGQGDSLHEHIANLAGSPAIKKGILQTVKVVDELVKVMGRHKPENIVIEMARENQTTQKGQKNSRERMKRIEEGIKELGSQILKEHPVENTQLQNEKLYLYYLQNGRDMYVDQELDINRLSDYDVDHIVPQSFLKDDSIDNKVLTRSDKARGKSDNVPSEEVVKKMKNYWRQLLNAKLITQRKFDNLTKAERGGLSELDKAGFIKRQLVETRQITKHVAQILDSRMNTKYDENDKLIREVKVITLKSKLVSDFRKDFQFYKVREINNYHHAHDAYLNAVVGTALIKKYPKLESEFVYGDYKVYDVRKMIAKSEQEIGKATAKYFFYSNIMNFFKTEITLANGEIRKRPLIETNGETGEIVWDKGRDFATVRKVLSMPQVNIVKKTEVQTGGFSKESILPKRNSDKLIARKKDWDPKKYGGFDSPTVAYSVLVVAKVEKGKSKKLKSVKELLGITIMERSSFEKNPIDFLEAKGYKEVKKDLIIKLPKYSLFELENGRKRMLASAGELQKGNELALPSKYVNFLYLASHYEKLKGSPEDNEQKQLFVEQHKHYLDEIIEQISEFSKRVILADANLDKVLSAYNKHRDKPIREQAENIIHLFTLTNLGAPAAFKYFDTTIDRKRYTSTKEVLDATLIHQSITGLYETRIDLSQLGGDGGPAPGGGGSSGGVLNLEEEYRLHEKPVPSSIDPSWLQLFPTVWAERAGMGLANQVPPVVVELRSGASPVAVRQYPMSKEAREGIRPHIQRFLDLGVLVPCQSPWNTPLLPVKKPGTNDYRPVQDLREINKRVQDIHPTVPNPYNLLSSLPPSHTWYSVLDLKDAFFCLKLHPNSQPLFAFEWRDPEKGNTGQLTWTRLPQGFKNSPTLFNEALHRDLAPFRALNPQVVLLQYVDDLLVAAPTYRDCKEGTQKLLQELSKLGYRVSAKKAQLCQKEVTYLGYLLKEGKRWLTPARKATVMKIPPPTTPRQVREFLGTAGFCRLWIPGFASLAAPLYPLTKPSIPFIWTEEHQKAFDRIKEALLSAPALALPDLTKPFTLYVDERAGVARGVLTQTLGPWRRPVAYLSKKLDPVASGWPTCLKAVAAVALLLKDADKLTLGQNVTVIASHSLESIVRQPPDRWMTNARMTHYQSLLLNERVSFAPPAVLNPATLLPVESEATPVHRCSEILAEETGTRRDLKDQPLPGVPAWYTDGSSFIAEGKRRAGAAIVDGKRTVWASSLPEGTSAQKAELVALTQALRLAEGKDINIYTDSRYAFATAHIHGAIYKQRGWLTSAGKDIKNKEEILALLEAIHLPKRVAIIHCPGHQKGNDPVATGNRRADEAAKQAALSTRVLAETTKPAGKRTADGSEFEKRTADGSEFESPKKKAKVE

SEQ ID NO: 7436 - protein, 2094 aa, synthetic construct
MPAAKRVKLDGGDKKYSIGLDIGTNSVGWAVITDEYKVPSKKFKVLGNTDRHSIKKNLIGALLFDSGETAEATRLKRTARRRYTRRKNRICYLQEIFSNEMAKVDDSFFHRLEESFLVEEDKKHERHPIFGNIVDEVAYHEKYPTIYHLRKKLVDSTDKADLRLIYLALAHMIKFRGHFLIEGDLNPDNSDVDKLFIQLVQTYNQLFEENPINASGVDAKAILSARLSKSRRLENLIAQLPGEKKNGLFGNLIALSLGLTPNFKSNFDLAEDAKLQLSKDTYDDDLDNLLAQIGDQYADLFLAAKNLSDAILLSDILRVNTEITKAPLSASMIKRYDEHHQDLTLLKALVRQQLPEKYKEIFFDQSKNGYAGYIDGGASQEEFYKFIKPILEKMDGTEELLVKLNREDLLRKQRTFDNGSIPHQIHLGELHAILRRQEDFYPFLKDNREKIEKILTFRIPYYVGPLARGNSRFAWMTRKSEETITPWNFEEVVDKGASAQSFIERMTNFDKNLPNEKVLPKHSLLYEYFTVYNELTKVKYVTEGMRKPAFLSGEQKKAIVDLLFKTNRKVTVKQLKEDYFKKIECFDSVEISGVEDRFNASLGTYHDLLKIIKDKDFLDNEENEDILEDIVLTLTLFEDREMIEERLKTYAHLFDDKVMKQLKRRRYTGWGRLSRKLINGIRDKQSGKTILDFLKSDGFANRNFMQLIHDDSLTFKEDIQKAQVSGQGDSLHEHIANLAGSPAIKKGILQTVKVVDELVKVMGRHKPENIVIEMARENQTTQKGQKNSRERMKRIEEGIKELGSQILKEHPVENTQLQNEKLYLYYLQNGRDMYVDQELDINRLSDYDVDHIVPQSFLKDDSIDNKVLTRSDKARGKSDNVPSEEVVKKMKNYWRQLLNAKLITQRKFDNLTKAERGGLSELDKAGFIKRQLVETRQITKHVAQILDSRMNTKYDENDKLIREVKVITLKSKLVSDFRKDFQFYKVREINNYHHAHDAYLNAVVGTALIKKYPKLESEFVYGDYKVYDVRKMIAKSEQEIGKATAKYFFYSNIMNFFKTEITLANGEIRKRPLIETNGETGEIVWDKGRDFATVRKVLSMPQVNIVKKTEVQTGGFSKESILPKRNSDKLIARKKDWDPKKYGGFDSPTVAYSVLVVAKVEKGKSKKLKSVKELLGITIMERSSFEKNPIDFLEAKGYKEVKKDLIIKLPKYSLFELENGRKRMLASAGELQKGNELALPSKYVNFLYLASHYEKLKGSPEDNEQKQLFVEQHKHYLDEIIEQISEFSKRVILADANLDKVLSAYNKHRDKPIREQAENIIHLFTLTNLGAPAAFKYFDTTIDRKRYTSTKEVLDATLIHQSITGLYETRIDLSQLGGDGGPAPGGGGSSGGTLNIEDEYRLHETSKEPDVPLGSTWLSDFPQAWAETGGMGLAVRQAPLIIPLKATSTPVSIKQYPMSQEARLGIKPHIQRLLDQGILVPCQSPWNTPLLPVKKPGTNDYRPVQDLREVNKRVEDIHPTVPNPYNLLSGLPPSHQWYTVLDLKDAFFCLRLHPTSQPLFAFEWRDPEMGISGQLTWTRLPQGFKNSPTLFNEALHRDLADFRIQHPDLILLQYVDDLLLAATSEQDCQRGTRALLQTLGNLGYRASAKKAQICQKQVKYLGYLLKEGQRWLTEARKETVMGQPTPKTPRQLREFLGTAGFCRLWIPGFAEMAAPLYPLTKPGTLFNWGPDQQKAYQEIKQALLTAPALGLPDLTKPFELFVDEKQGYAKGVLTQKLGPWRRPVAYLSKKLDPVAAGWPPCLRMVAAIAVLTKDAGKLTMGQPLVILAPHAVEALVKQPPDRWLSNARMTHYQAMLLDTDRVQFGPVVALNPATLLPLPEKEAPHDCLEILAETHGTRPDLTDQPIPDADYTWYTDGSSFLQEGQRRAGAAVTTETEVIWARALPAGTSAQRAELIALTQALKMAEGKKLNVYTDSRYAFATAHVHGEIYRRRGWLTSEGREIKNKNEILALLKALFLPKRLSIIHCPGHQKGNSAEARGNRMADQAAREAAMKAVLETSTLLAGKRTADGSEFEKRTADGSEFESPKKKAKVE

SEQ ID NO: 7437 - protein, 2094 aa, synthetic construct
MPAAKRVKLDGGDKKYSIGLDIGTNSVGWAVITDEYKVPSKKFKVLGNTDRHSIKKNLIGALLFDSGETAEATRLKRTARRRYTRRKNRICYLQEIFSNEMAKVDDSFFHRLEESFLVEEDKKHERHPIFGNIVDEVAYHEKYPTIYHLRKKLVDSTDKADLRLIYLALAHMIKFRGHFLIEGDLNPDNSDVDKLFIQLVQTYNQLFEENPINASGVDAKAILSARLSKSRRLENLIAQLPGEKKNGLFGNLIALSLGLTPNFKSNFDLAEDAKLQLSKDTYDDDLDNLLAQIGDQYADLFLAAKNLSDAILLSDILRVNTEITKAPLSASMIKRYDEHHQDLTLLKALVRQQLPEKYKEIFFDQSKNGYAGYIDGGASQEEFYKFIKPILEKMDGTEELLVKLNREDLLRKQRTFDNGSIPHQIHLGELHAILRRQEDFYPFLKDNREKIEKILTFRIPYYVGPLARGNSRFAWMTRKSEETITPWNFEEVVDKGASAQSFIERMTNFDKNLPNEKVLPKHSLLYEYFTVYNELTKVKYVTEGMRKPAFLSGEQKKAIVDLLFKTNRKVTVKQLKEDYFKKIECFDSVEISGVEDRFNASLGTYHDLLKIIKDKDFLDNEENEDILEDIVLTLTLFEDREMIEERLKTYAHLFDDKVMKQLKRRRYTGWGRLSRKLINGIRDKQSGKTILDFLKSDGFANRNFMQLIHDDSLTFKEDIQKAQVSGQGDSLHEHIANLAGSPAIKKGILQTVKVVDELVKVMGRHKPENIVIEMARENQTTQKGQKNSRERMKRIEEGIKELGSQILKEHPVENTQLQNEKLYLYYLQNGRDMYVDQELDINRLSDYDVDHIVPQSFLKDDSIDNKVLTRSDKARGKSDNVPSEEVVKKMKNYWRQLLNAKLITQRKFDNLTKAERGGLSELDKAGFIKRQLVETRQITKHVAQILDSRMNTKYDENDKLIREVKVITLKSKLVSDFRKDFQFYKVREINNYHHAHDAYLNAVVGTALIKKYPKLESEFVYGDYKVYDVRKMIAKSEQEIGKATAKYFFYSNIMNFFKTEITLANGEIRKRPLIETNGETGEIVWDKGRDFATVRKVLSMPQVNIVKKTEVQTGGFSKESILPKRNSDKLIARKKDWDPKKYGGFDSPTVAYSVLVVAKVEKGKSKKLKSVKELLGITIMERSSFEKNPIDFLEAKGYKEVKKDLIIKLPKYSLFELENGRKRMLASAGELQKGNELALPSKYVNFLYLASHYEKLKGSPEDNEQKQLFVEQHKHYLDEIIEQISEFSKRVILADANLDKVLSAYNKHRDKPIREQAENIIHLFTLTNLGAPAAFKYFDTTIDRKRYTSTKEVLDATLIHQSITGLYETRIDLSQLGGDGGPAPGGGGSSGGTLNIEDEYRLHETSKEPDVPLGSTWLSDFPQAWAETGGMGLAVRQAPLIIPLKATSTPVSIKQYPMSQEARLGIKPHIQRLLDQGILVPCQSPWNTPLLPVKKPGTNDYRPVQDLREVNKRVEDIHPTVPNPYNLLSGLPPSHQWYTVLDLKDAFFCLRLHPTSQPLFAFEWRDPEMGISGQLTWTRLPQGFKNSPTLFNEALHRDLADFRIQHPDLILLQYVDDLLLAATSEQDCQRGTRALLQTLGNLGYRASAKKAQICQKQVKYLGYLLKEGQRWLTEARKETVMGQPTPKTPRQLREFLGKAGFCRLFIPGFAEMAAPLYPLTKPGTLFNWGPDQQKAYQEIKQALLTAPALGLPDLTKPFELFVDEKQGYAKGVLTQKLGPWRRPVAYLSKKLDPVAAGWPPCLRMVAAIAVLTKDAGKLTMGQPLVILAPHAVEALVKQPPDRWLSNARMTHYQAMLLDTDRVQFGPVVALNPATLLPLPEKEAPHDCLEILAETHGTRPDLTDQPIPDADYTWYTDGSSFLQEGQRRAGAAVTTETEVIWARALPAGTSAQRAELIALTQALKMAEGKKLNVYTDSRYAFATAHVHGEIYRRRGWLTSEGREIKNKNEILALLKALFLPKRLSIIHCPGHQKGNSAEARGNRMADQAAREAAMKAVLETSTLLAGKRTADGSEFEKRTADGSEFESPKKKAKVE

SEQ ID NO: 7438 - protein, 2096 aa, synthetic construct
MPAAKRVKLDGGDKKYSIGLDIGTNSVGWAVITDEYKVPSKKFKVLGNTDRHSIKKNLIGALLFDSGETAEATRLKRTARRRYTRRKNRICYLQEIFSNEMAKVDDSFFHRLEESFLVEEDKKHERHPIFGNIVDEVAYHEKYPTIYHLRKKLVDSTDKADLRLIYLALAHMIKFRGHFLIEGDLNPDNSDVDKLFIQLVQTYNQLFEENPINASGVDAKAILSARLSKSRRLENLIAQLPGEKKNGLFGNLIALSLGLTPNFKSNFDLAEDAKLQLSKDTYDDDLDNLLAQIGDQYADLFLAAKNLSDAILLSDILRVNTEITKAPLSASMIKRYDEHHQDLTLLKALVRQQLPEKYKEIFFDQSKNGYAGYIDGGASQEEFYKFIKPILEKMDGTEELLVKLNREDLLRKQRTFDNGSIPHQIHLGELHAILRRQEDFYPFLKDNREKIEKILTFRIPYYVGPLARGNSRFAWMTRKSEETITPWNFEEVVDKGASAQSFIERMTNFDKNLPNEKVLPKHSLLYEYFTVYNELTKVKYVTEGMRKPAFLSGEQKKAIVDLLFKTNRKVTVKQLKEDYFKKIECFDSVEISGVEDRFNASLGTYHDLLKIIKDKDFLDNEENEDILEDIVLTLTLFEDREMIEERLKTYAHLFDDKVMKQLKRRRYTGWGRLSRKLINGIRDKQSGKTILDFLKSDGFANRNFMQLIHDDSLTFKEDIQKAQVSGQGDSLHEHIANLAGSPAIKKGILQTVKVVDELVKVMGRHKPENIVIEMARENQTTQKGQKNSRERMKRIEEGIKELGSQILKEHPVENTQLQNEKLYLYYLQNGRDMYVDQELDINRLSDYDVDHIVPQSFLKDDSIDNKVLTRSDKARGKSDNVPSEEVVKKMKNYWRQLLNAKLITQRKFDNLTKAERGGLSELDKAGFIKRQLVETRQITKHVAQILDSRMNTKYDENDKLIREVKVITLKSKLVSDFRKDFQFYKVREINNYHHAHDAYLNAVVGTALIKKYPKLESEFVYGDYKVYDVRKMIAKSEQEIGKATAKYFFYSNIMNFFKTEITLANGEIRKRPLIETNGETGEIVWDKGRDFATVRKVLSMPQVNIVKKTEVQTGGFSKESILPKRNSDKLIARKKDWDPKKYGGFDSPTVAYSVLVVAKVEKGKSKKLKSVKELLGITIMERSSFEKNPIDFLEAKGYKEVKKDLIIKLPKYSLFELENGRKRMLASAGELQKGNELALPSKYVNFLYLASHYEKLKGSPEDNEQKQLFVEQHKHYLDEIIEQISEFSKRVILADANLDKVLSAYNKHRDKPIREQAENIIHLFTLTNLGAPAAFKYFDTTIDRKRYTSTKEVLDATLIHQSITGLYETRIDLSQLGGDGGPAPGSSGGGGGTAPLEEEYRLFLEAPIQNVTLLEQWKREIPKVWAEINPPGLASTQAPIHVQLLSTALPVRVRQYPITLEAKRSLRETIRKFRAAGILRPVHSPWNTPLLPVRKSGTSEYRMVQDLREVNKRVETIHPTVPNPYTLLSLLPPDRIWYSVLDLKDAFFCIPLAPESQLIFAFEWADAEEGESGQLTWTRLPQGFKNSPTLFNEALNRDLQGFRLDHPSVSLLQYVDDLLIAADTQAACLSATRDLLMTLAELGYRVSGKKAQLCQEEVTYLGFKIHKGSRSLSNSRTQAILQIPVPKTKRQVREFLGKIGYCRLFIPGFAELAQPLYAATRPGNDPLVWGEKEEEAFQSLKLALTQPPALALPSLDKPFQLFVEETSGAAKGVLTQALGPWKRPVAYLSKRLDPVAAGWPRCLRAIAAAALLTREASKLTFGQDIEITSSHNLESLLRSPPDKWLTNARITQYQVLLLDPPRVRFKQTAALNPATLLPETDDTLPIHHCLDTLDSLTSTRPDLTDQPLAQAEATLFTDGSSYIRDGKRYAGAAVVTLDSVIWAEPLPIGTSAQKAELIALTKALEWSKDKSVNIYTDSRYAFATLHVHGMIYRERGWLTAGGKAIKNAPEILALLTAVWLPKRVAVMHCKGHQKDDAPTSTGNRRADEVAREVAIRPLSTQATISAGKRTADGSEFEKRTADGSEFESPKKKAKVE

SEQ ID NO: 7439 - protein, 2171 aa, synthetic construct
MPAAKRVKLDGGDKKYSIGLDIGTNSVGWAVITDEYKVPSKKFKVLGNTDRHSIKKNLIGALLFDSGETAEATRLKRTARRRYTRRKNRICYLQEIFSNEMAKVDDSFFHRLEESFLVEEDKKHERHPIFGNIVDEVAYHEKYPTIYHLRKKLVDSTDKADLRLIYLALAHMIKFRGHFLIEGDLNPDNSDVDKLFIQLVQTYNQLFEENPINASGVDAKAILSARLSKSRRLENLIAQLPGEKKNGLFGNLIALSLGLTPNFKSNFDLAEDAKLQLSKDTYDDDLDNLLAQIGDQYADLFLAAKNLSDAILLSDILRVNTEITKAPLSASMIKRYDEHHQDLTLLKALVRQQLPEKYKEIFFDQSKNGYAGYIDGGASQEEFYKFIKPILEKMDGTEELLVKLNREDLLRKQRTFDNGSIPHQIHLGELHAILRRQEDFYPFLKDNREKIEKILTFRIPYYVGPLARGNSRFAWMTRKSEETITPWNFEEVVDKGASAQSFIERMTNFDKNLPNEKVLPKHSLLYEYFTVYNELTKVKYVTEGMRKPAFLSGEQKKAIVDLLFKTNRKVTVKQLKEDYFKKIECFDSVEISGVEDRFNASLGTYHDLLKIIKDKDFLDNEENEDILEDIVLTLTLFEDREMIEERLKTYAHLFDDKVMKQLKRRRYTGWGRLSRKLINGIRDKQSGKTILDFLKSDGFANRNFMQLIHDDSLTFKEDIQKAQVSGQGDSLHEHIANLAGSPAIKKGILQTVKVVDELVKVMGRHKPENIVIEMARENQTTQKGQKNSRERMKRIEEGIKELGSQILKEHPVENTQLQNEKLYLYYLQNGRDMYVDQELDINRLSDYDVDHIVPQSFLKDDSIDNKVLTRSDKARGKSDNVPSEEVVKKMKNYWRQLLNAKLITQRKFDNLTKAERGGLSELDKAGFIKRQLVETRQITKHVAQILDSRMNTKYDENDKLIREVKVITLKSKLVSDFRKDFQFYKVREINNYHHAHDAYLNAVVGTALIKKYPKLESEFVYGDYKVYDVRKMIAKSEQEIGKATAKYFFYSNIMNFFKTEITLANGEIRKRPLIETNGETGEIVWDKGRDFATVRKVLSMPQVNIVKKTEVQTGGFSKESILPKRNSDKLIARKKDWDPKKYGGFDSPTVAYSVLVVAKVEKGKSKKLKSVKELLGITIMERSSFEKNPIDFLEAKGYKEVKKDLIIKLPKYSLFELENGRKRMLASAGELQKGNELALPSKYVNFLYLASHYEKLKGSPEDNEQKQLFVEQHKHYLDEIIEQISEFSKRVILADANLDKVLSAYNKHRDKPIREQAENIIHLFTLTNLGAPAAFKYFDTTIDRKRYTSTKEVLDATLIHQSITGLYETRIDLSQLGGDGGPAPGSSGGGGGMDLLKPLTVERKGVKIKGYWNSQADITCVPKDLLQGEEPVRQQNVTTIHGTQEGDVYYVNLKIDGRRINTEVIGTTLDYAIITPGDVPWILKKPLELTIKLDLEEQQGTLLNNSILSKKGKEELKQLFEKYSALWQSWENQVGHRRIRPHKIATGTVKPTPQKQYHINPKAKPDIQIVINDLLKQGVLIQKESTMNTPVYPVPKPNGRWRMVLDYRAVNKVTPLIAVQNQHSYGILGSLFKGRYKTTIDLSNGFWAHPIVPEDYWITAFTWQGKQYCWTVLPQGFLNSPGLFTGDVVDLLQGIPNVEVYVDDVYISHDSEKEHLEYLDILFNRLKEAGYIISLKKSNIANSIVDFLGFQITNEGRGLTDTFKEKLENITAPTTLKQLQSILGLLNFARNFIPDFTELIAPLYALIPKSTKNYVPWQIEHSTTLETLITKLNGAEYLQGRKGDKTLIMKVNASYTTGYIRYYNEGEKKPISYVSIVFSKTELKFTELEKLLTTVHKGLLKALDLSMGQNIHVYSPIVSMQNIQKTPQTAKKALASRWLSWLSYLEDPRIRFFYDPQMPALKDLPAVDTGKDNKKHPSNFQHIFYTDGSAITSPTKEGHLNAGMGIVYFINKDGNLQKQQEWSISLGNHTAQFAEIAAFEFALKKCLPLGGNILVVTDSNYVAKAYNEELDVWASNGFVNNRKKPLKHISKWKSVADLKRLRPDVVVTHEPGHQKLDSSPHAYGNNLADQLATQASFKVHAGKRTADGSEFEKRTADGSEFESPKKKAKVE

SEQ ID NO: 7440 - protein, 2174 aa, synthetic construct
MPAAKRVKLDGGDKKYSIGLDIGTNSVGWAVITDEYKVPSKKFKVLGNTDRHSIKKNLIGALLFDSGETAEATRLKRTARRRYTRRKNRICYLQEIFSNEMAKVDDSFFHRLEESFLVEEDKKHERHPIFGNIVDEVAYHEKYPTIYHLRKKLVDSTDKADLRLIYLALAHMIKFRGHFLIEGDLNPDNSDVDKLFIQLVQTYNQLFEENPINASGVDAKAILSARLSKSRRLENLIAQLPGEKKNGLFGNLIALSLGLTPNFKSNFDLAEDAKLQLSKDTYDDDLDNLLAQIGDQYADLFLAAKNLSDAILLSDILRVNTEITKAPLSASMIKRYDEHHQDLTLLKALVRQQLPEKYKEIFFDQSKNGYAGYIDGGASQEEFYKFIKPILEKMDGTEELLVKLNREDLLRKQRTFDNGSIPHQIHLGELHAILRRQEDFYPFLKDNREKIEKILTFRIPYYVGPLARGNSRFAWMTRKSEETITPWNFEEVVDKGASAQSFIERMTNFDKNLPNEKVLPKHSLLYEYFTVYNELTKVKYVTEGMRKPAFLSGEQKKAIVDLLFKTNRKVTVKQLKEDYFKKIECFDSVEISGVEDRFNASLGTYHDLLKIIKDKDFLDNEENEDILEDIVLTLTLFEDREMIEERLKTYAHLFDDKVMKQLKRRRYTGWGRLSRKLINGIRDKQSGKTILDFLKSDGFANRNFMQLIHDDSLTFKEDIQKAQVSGQGDSLHEHIANLAGSPAIKKGILQTVKVVDELVKVMGRHKPENIVIEMARENQTTQKGQKNSRERMKRIEEGIKELGSQILKEHPVENTQLQNEKLYLYYLQNGRDMYVDQELDINRLSDYDVDHIVPQSFLKDDSIDNKVLTRSDKARGKSDNVPSEEVVKKMKNYWRQLLNAKLITQRKFDNLTKAERGGLSELDKAGFIKRQLVETRQITKHVAQILDSRMNTKYDENDKLIREVKVITLKSKLVSDFRKDFQFYKVREINNYHHAHDAYLNAVVGTALIKKYPKLESEFVYGDYKVYDVRKMIAKSEQEIGKATAKYFFYSNIMNFFKTEITLANGEIRKRPLIETNGETGEIVWDKGRDFATVRKVLSMPQVNIVKKTEVQTGGFSKESILPKRNSDKLIARKKDWDPKKYGGFDSPTVAYSVLVVAKVEKGKSKKLKSVKELLGITIMERSSFEKNPIDFLEAKGYKEVKKDLIIKLPKYSLFELENGRKRMLASAGELQKGNELALPSKYVNFLYLASHYEKLKGSPEDNEQKQLFVEQHKHYLDEIIEQISEFSKRVILADANLDKVLSAYNKHRDKPIREQAENIIHLFTLTNLGAPAAFKYFDTTIDRKRYTSTKEVLDATLIHQSITGLYETRIDLSQLGGDGGPAPGSSGGGGGMNPLQLLQPLPAEIKGTKLLAHWNSGATITCIPESFLEDEQPIKKTLIKTIHGEKQQNVYYVTFKVKGRKVEAEVIASPYEYILLSPTDVPWLTQQPLQLTILVPLQEYQEKILSKTALPEDQKQQLKTLFVKYDNLWQHWENQVGHRKIRPHNIATGDYPPRPQKQYPINPKAKPSIQIVIDDLLKQGVLTPQNSTMNTPVYPVPKPDGRWRMVLDYREVNKTIPLTAAQNQHSAGILATIVRQKYKTTLDLANGFWAHPITPESYWLTAFTWQGKQYCWTRLPQGFLNSPALFNADVVDLLKEIPNVQVYVDDIYLSHDDPKEHVQQLEKVFQILLQAGYVVSLKKSEIGQKTVEFLGFNITKEGRGLTDTFKTKLLNITPPKDLKQLQSILGKLNFARNFIPNFAELVQPLYNLIAPAKGKYIEWSEENTKQLNMVIEALNTASNLEERLPEQRLVIKVNTSPSAGYVRYYNETGKKPIMYLNYVFSKAELKFSMLEKLLTTMHKALIKAMDLAMGQEILVYSPIVSMTKIQKTPLPERKALPIRWITWMTYLEDPRIQFHYDKTLPELKHIPDVYTSSQSPVKHPSQYEGVFYTDGSAIKSPDPTKSNNAGMGIVHATYKPEYQVLNQWSIPLGNHTAQMAEIAAVEFACKKALKIPGPVLVITDSFYVAESANKELPYWKSNGFVNNKKKPLKHISKWKSIAECLSMKPDITIQHEKGISLQIPVFILKGNALADKLATQGSYVVNAGKRTADGSEFEKRTADGSEFESPKKKAKVE

SEQ ID NO: 7441 - protein, 2125 aa, synthetic construct
MPAAKRVKLDGGDKKYSIGLDIGTNSVGWAVITDEYKVPSKKFKVLGNTDRHSIKKNLIGALLFDSGETAEATRLKRTARRRYTRRKNRICYLQEIFSNEMAKVDDSFFHRLEESFLVEEDKKHERHPIFGNIVDEVAYHEKYPTIYHLRKKLVDSTDKADLRLIYLALAHMIKFRGHFLIEGDLNPDNSDVDKLFIQLVQTYNQLFEENPINASGVDAKAILSARLSKSRRLENLIAQLPGEKKNGLFGNLIALSLGLTPNFKSNFDLAEDAKLQLSKDTYDDDLDNLLAQIGDQYADLFLAAKNLSDAILLSDILRVNTEITKAPLSASMIKRYDEHHQDLTLLKALVRQQLPEKYKEIFFDQSKNGYAGYIDGGASQEEFYKFIKPILEKMDGTEELLVKLNREDLLRKQRTFDNGSIPHQIHLGELHAILRRQEDFYPFLKDNREKIEKILTFRIPYYVGPLARGNSRFAWMTRKSEETITPWNFEEVVDKGASAQSFIERMTNFDKNLPNEKVLPKHSLLYEYFTVYNELTKVKYVTEGMRKPAFLSGEQKKAIVDLLFKTNRKVTVKQLKEDYFKKIECFDSVEISGVEDRFNASLGTYHDLLKIIKDKDFLDNEENEDILEDIVLTLTLFEDREMIEERLKTYAHLFDDKVMKQLKRRRYTGWGRLSRKLINGIRDKQSGKTILDFLKSDGFANRNFMQLIHDDSLTFKEDIQKAQVSGQGDSLHEHIANLAGSPAIKKGILQTVKVVDELVKVMGRHKPENIVIEMARENQTTQKGQKNSRERMKRIEEGIKELGSQILKEHPVENTQLQNEKLYLYYLQNGRDMYVDQELDINRLSDYDVDHIVPQSFLKDDSIDNKVLTRSDKARGKSDNVPSEEVVKKMKNYWRQLLNAKLITQRKFDNLTKAERGGLSELDKAGFIKRQLVETRQITKHVAQILDSRMNTKYDENDKLIREVKVITLKSKLVSDFRKDFQFYKVREINNYHHAHDAYLNAVVGTALIKKYPKLESEFVYGDYKVYDVRKMIAKSEQEIGKATAKYFFYSNIMNFFKTEITLANGEIRKRPLIETNGETGEIVWDKGRDFATVRKVLSMPQVNIVKKTEVQTGGFSKESILPKRNSDKLIARKKDWDPKKYGGFDSPTVAYSVLVVAKVEKGKSKKLKSVKELLGITIMERSSFEKNPIDFLEAKGYKEVKKDLIIKLPKYSLFELENGRKRMLASAGELQKGNELALPSKYVNFLYLASHYEKLKGSPEDNEQKQLFVEQHKHYLDEIIEQISEFSKRVILADANLDKVLSAYNKHRDKPIREQAENIIHLFTLTNLGAPAAFKYFDTTIDRKRYTSTKEVLDATLIHQSITGLYETRIDLSQLGGDGGPAPGSSGGGGGLLGRDLLTKLKAQIQFSTEGPQVTWEDRPAMCLVLNLEEEYRLHEKPVPPSIDPSWLQLFPMVWAEKAGMGLANQVPPVVVELKSDASPVAVRQYPMSKEAREGIRPHIQRFLDLGILVPCQSPWNTPLLPVKKPGTNDYRPVQDLREVNKRVQDIHPTVPNPYNLLSSLPPSHTWYSVLDLKDAFFCLKLHPNSQPLFAFEWRDPEKGNTGQLTWTRLPQGFKNSPTLFNEALHRDLASFRALNPQVVMLQYVDDLLVAAPTYRDCKEGTRRLLQELSKLGYRVSAKKAQLCREEVTYLGYLLKGGKRWLTPARKATVMKIPTPTTPRQVREFLGTAGFCRLWIPGFASLAAPLYPLTRPKVPFTWTEAHQEAFGRIKEALLSAPALALPDLTKPFALYVDEKEGVARGVLTQTLGPWRRPVAYLSKKLDPVASGWPTCLKAIAAVALLLKDADKLTLGQNVLVIAPHNLESIVRQPPDRWMTNARMTHYQSLLLNERVSFAPPAILNPATLLPVESDDTPIHICSEILAEETGTRPDLRDQPLPGVPAWYTDGSSFIMDGRRQAGAAIVDNKRTVWASNLPEGTSAQKAELIALTQALRLAEGKSINIYTDSRYAFATAHVHGAIYKQRGWLTSAGKDIKNKEEILALLEAIHLPKRVAIIHCPGHQRGTDPVATGNRKADEAAKQAAQSTRILTETTKNAGKRTADGSEFEKRTADGSEFESPKKKAKVE

SEQ ID NO: 7442 - protein, 2094 aa, synthetic construct
MPAAKRVKLDGGDKKYSIGLDIGTNSVGWAVITDEYKVPSKKFKVLGNTDRHSIKKNLIGALLFDSGETAEATRLKRTARRRYTRRKNRICYLQEIFSNEMAKVDDSFFHRLEESFLVEEDKKHERHPIFGNIVDEVAYHEKYPTIYHLRKKLVDSTDKADLRLIYLALAHMIKFRGHFLIEGDLNPDNSDVDKLFIQLVQTYNQLFEENPINASGVDAKAILSARLSKSRRLENLIAQLPGEKKNGLFGNLIALSLGLTPNFKSNFDLAEDAKLQLSKDTYDDDLDNLLAQIGDQYADLFLAAKNLSDAILLSDILRVNTEITKAPLSASMIKRYDEHHQDLTLLKALVRQQLPEKYKEIFFDQSKNGYAGYIDGGASQEEFYKFIKPILEKMDGTEELLVKLNREDLLRKQRTFDNGSIPHQIHLGELHAILRRQEDFYPFLKDNREKIEKILTFRIPYYVGPLARGNSRFAWMTRKSEETITPWNFEEVVDKGASAQSFIERMTNFDKNLPNEKVLPKHSLLYEYFTVYNELTKVKYVTEGMRKPAFLSGEQKKAIVDLLFKTNRKVTVKQLKEDYFKKIECFDSVEISGVEDRFNASLGTYHDLLKIIKDKDFLDNEENEDILEDIVLTLTLFEDREMIEERLKTYAHLFDDKVMKQLKRRRYTGWGRLSRKLINGIRDKQSGKTILDFLKSDGFANRNFMQLIHDDSLTFKEDIQKAQVSGQGDSLHEHIANLAGSPAIKKGILQTVKVVDELVKVMGRHKPENIVIEMARENQTTQKGQKNSRERMKRIEEGIKELGSQILKEHPVENTQLQNEKLYLYYLQNGRDMYVDQELDINRLSDYDVDHIVPQSFLKDDSIDNKVLTRSDKARGKSDNVPSEEVVKKMKNYWRQLLNAKLITQRKFDNLTKAERGGLSELDKAGFIKRQLVETRQITKHVAQILDSRMNTKYDENDKLIREVKVITLKSKLVSDFRKDFQFYKVREINNYHHAHDAYLNAVVGTALIKKYPKLESEFVYGDYKVYDVRKMIAKSEQEIGKATAKYFFYSNIMNFFKTEITLANGEIRKRPLIETNGETGEIVWDKGRDFATVRKVLSMPQVNIVKKTEVQTGGFSKESILPKRNSDKLIARKKDWDPKKYGGFDSPTVAYSVLVVAKVEKGKSKKLKSVKELLGITIMERSSFEKNPIDFLEAKGYKEVKKDLIIKLPKYSLFELENGRKRMLASAGELQKGNELALPSKYVNFLYLASHYEKLKGSPEDNEQKQLFVEQHKHYLDEIIEQISEFSKRVILADANLDKVLSAYNKHRDKPIREQAENIIHLFTLTNLGAPAAFKYFDTTIDRKRYTSTKEVLDATLIHQSITGLYETRIDLSQLGGDGGPAPGSSGGGGGTLNLEDEYRLYETSAEPEVSPGSTWLSDFPQAWAETGGMGLAVRQAPLIIPLKATSTPVSIKQYPMSQEAKLGIKPHIQRLLDQGILVPCQSPWNTPLLPVKKPGTNDYRPVQDLREVNKRVEDIHPTVPNPYNLLSGLPPSHRWYTVLDLKDAFFCLRLHPTSQPLFAFEWRDPGMGISGQLTWTRLPQGFKNSPTLFNEALHRDLADFRIQHPDLILLQYVDDILLAATSELDCQQGTRALLLTLGNLGYRASAKKAQLCQKQVKYLGYLLKEGQRWLTEARKETVMGQPTPKTPRQLREFLGTAGFCRLWIPGFAEMAAPLYPLTKPGTLFNWGPDQQKAYQEIKQALLTAPALGLPDLTKPFELFVDEKQGYAKGVLTQKLGPWRRPVAYLSKKLDPVAAGWPPCLRMVAAIAVLRKDAGKLTMGQPLVILAPHAVEALVKQPPDRWLSNARMTHYQAMLLDTDRVQFGPVVALNPATLLPLPEEGAPHDCLEILAETHGTRPDLTDQPIPDADHTWYTDGSSFLQEGQRKAGAAVTTETEVIWARALPAGTSAQRAELIALTQALKMAEGKRLNVYTDSRYAFATAHIHGEIYRRRGWLTSEGREIKNKSEILALLKALFLPKRLSIIHCLGHQKGDSAEARGNRLADQAAREAAIKTPPDTSTLLAGKRTADGSEFEKRTADGSEFESPKKKAKVE

SEQ ID NO: 7443 - protein, 2094 aa, synthetic construct; identical to SEQ ID NO: 4533

SEQ ID NO: 7444 - protein, 2094 aa, synthetic construct
MPAAKRVKLDGGDKKYSIGLDIGTNSVGWAVITDEYKVPSKKFKVLGNTDRHSIKKNLIGALLFDSGETAEATRLKRTARRRYTRRKNRICYLQEIFSNEMAKVDDSFFHRLEESFLVEEDKKHERHPIFGNIVDEVAYHEKYPTIYHLRKKLVDSTDKADLRLIYLALAHMIKFRGHFLIEGDLNPDNSDVDKLFIQLVQTYNQLFEENPINASGVDAKAILSARLSKSRRLENLIAQLPGEKKNGLFGNLIALSLGLTPNFKSNFDLAEDAKLQLSKDTYDDDLDNLLAQIGDQYADLFLAAKNLSDAILLSDILRVNTEITKAPLSASMIKRYDEHHQDLTLLKALVRQQLPEKYKEIFFDQSKNGYAGYIDGGASQEEFYKFIKPILEKMDGTEELLVKLNREDLLRKQRTFDNGSIPHQIHLGELHAILRRQEDFYPFLKDNREKIEKILTFRIPYYVGPLARGNSRFAWMTRKSEETITPWNFEEVVDKGASAQSFIERMTNFDKNLPNEKVLPKHSLLYEYFTVYNELTKVKYVTEGMRKPAFLSGEQKKAIVDLLFKTNRKVTVKQLKEDYFKKIECFDSVEISGVEDRFNASLGTYHDLLKIIKDKDFLDNEENEDILEDIVLTLTLFEDREMIEERLKTYAHLFDDKVMKQLKRRRYTGWGRLSRKLINGIRDKQSGKTILDFLKSDGFANRNFMQLIHDDSLTFKEDIQKAQVSGQGDSLHEHIANLAGSPAIKKGILQTVKVVDELVKVMGRHKPENIVIEMARENQTTQKGQKNSRERMKRIEEGIKELGSQILKEHPVENTQLQNEKLYLYYLQNGRDMYVDQELDINRLSDYDVDHIVPQSFLKDDSIDNKVLTRSDKARGKSDNVPSEEVVKKMKNYWRQLLNAKLITQRKFDNLTKAERGGLSELDKAGFIKRQLVETRQITKHVAQILDSRMNTKYDENDKLIREVKVITLKSKLVSDFRKDFQFYKVREINNYHHAHDAYLNAVVGTALIKKYPKLESEFVYGDYKVYDVRKMIAKSEQEIGKATAKYFFYSNIMNFFKTEITLANGEIRKRPLIETNGETGEIVWDKGRDFATVRKVLSMPQVNIVKKTEVQTGGFSKESILPKRNSDKLIARKKDWDPKKYGGFDSPTVAYSVLVVAKVEKGKSKKLKSVKELLGITIMERSSFEKNPIDFLEAKGYKEVKKDLIIKLPKYSLFELENGRKRMLASAGELQKGNELALPSKYVNFLYLASHYEKLKGSPEDNEQKQLFVEQHKHYLDEIIEQISEFSKRVILADANLDKVLSAYNKHRDKPIREQAENIIHLFTLTNLGAPAAFKYFDTTIDRKRYTSTKEVLDATLIHQSITGLYETRIDLSQLGGDGGPAPGSSGGGGGTLNIEDEHRLHETSKEPDVSLGSTWLSDFPQAWAETGGMGLAVRQAPLIIPLKATSTPVSIKQYPMSQEARLGIKPHIQRLLDQGILVPCQSPWNTPLLPVKKPGTNDYRPVQDLREVNKRVEDIHPTVPNPYNLLSGLPPSHQWYTVLDLKDAFFCLRLHPTSQPLFAFEWRDPEMGISGQLTWTRLPQGFKNSPTLFNEALHRDLADFRIQHPDLILLQYVDDLLLAATSELDCQQGTRALLQTLGNLGYRASAKKAQICQKQVKYLGYLLKEGQRWLTEARKETVMGQPTPKTPRQLREFLGTAGFCRLWIPGFAEMAAPLYPLTKPGTLFNWGPDQQKAYQEIKQALLTAPALGLPDLTKPFELFVDEKQGYAKGVLTQKLGPWRRPVAYLSKKLDPVAAGWPPCLRMVAAIAVLTKDAGKLTMGQPLVILAPHAVEALVKQPPDRWLSNARMTHYQALLLDTDRVQFGPVVALNPATLLPLPEEGLQHNCLDILAEAHGTRPDLTDQPLPDADHTWYTDGSSLLQEGQRKAGAAVTTETEVIWAKALPAGTSAQRAELIALTQALKMAEGKKLNVYTDSRYAFATAHIHGEIYRRRGWLTSEGKEIKNKDEILALLKALFLPKRLSIIHCPGHQKGHSAEARGNRMADQAARKAAITETPDTSTLLAGKRTADGSEFEKRTADGSEFESPKKKAKVE

SEQ ID NO: 7445 - protein, 2094 aa, synthetic construct; identical to SEQ ID NO: 7444

SEQ ID NO: 7446 - protein, 2174 aa, synthetic construct
MPAAKRVKLDGGDKKYSIGLDIGTNSVGWAVITDEYKVPSKKFKVLGNTDRHSIKKNLIGALLFDSGETAEATRLKRTARRRYTRRKNRICYLQEIFSNEMAKVDDSFFHRLEESFLVEEDKKHERHPIFGNIVDEVAYHEKYPTIYHLRKKLVDSTDKADLRLIYLALAHMIKFRGHFLIEGDLNPDNSDVDKLFIQLVQTYNQLFEENPINASGVDAKAILSARLSKSRRLENLIAQLPGEKKNGLFGNLIALSLGLTPNFKSNFDLAEDAKLQLSKDTYDDDLDNLLAQIGDQYADLFLAAKNLSDAILLSDILRVNTEITKAPLSASMIKRYDEHHQDLTLLKALVRQQLPEKYKEIFFDQSKNGYAGYIDGGASQEEFYKFIKPILEKMDGTEELLVKLNREDLLRKQRTFDNGSIPHQIHLGELHAILRRQEDFYPFLKDNREKIEKILTFRIPYYVGPLARGNSRFAWMTRKSEETITPWNFEEVVDKGASAQSFIERMTNFDKNLPNEKVLPKHSLLYEYFTVYNELTKVKYVTEGMRKPAFLSGEQKKAIVDLLFKTNRKVTVKQLKEDYFKKIECFDSVEISGVEDRFNASLGTYHDLLKIIKDKDFLDNEENEDILEDIVLTLTLFEDREMIEERLKTYAHLFDDKVMKQLKRRRYTGWGRLSRKLINGIRDKQSGKTILDFLKSDGFANRNFMQLIHDDSLTFKEDIQKAQVSGQGDSLHEHIANLAGSPAIKKGILQTVKVVDELVKVMGRHKPENIVIEMARENQTTQKGQKNSRERMKRIEEGIKELGSQILKEHPVENTQLQNEKLYLYYLQNGRDMYVDQELDINRLSDYDVDHIVPQSFLKDDSIDNKVLTRSDKARGKSDNVPSEEVVKKMKNYWRQLLNAKLITQRKFDNLTKAERGGLSELDKAGFIKRQLVETRQITKHVAQILDSRMNTKYDENDKLIREVKVITLKSKLVSDFRKDFQFYKVREINNYHHAHDAYLNAVVGTALIKKYPKLESEFVYGDYKVYDVRKMIAKSEQEIGKATAKYFFYSNIMNFFKTEITLANGEIRKRPLIETNGETGEIVWDKGRDFATVRKVLSMPQVNIVKKTEVQTGGFSKESILPKRNSDKLIARKKDWDPKKYGGFDSPTVAYSVLVVAKVEKGKSKKLKSVKELLGITIMERSSFEKNPIDFLEAKGYKEVKKDLIIKLPKYSLFELENGRKRMLASAGELQKGNELALPSKYVNFLYLASHYEKLKGSPEDNEQKQLFVEQHKHYLDEIIEQISEFSKRVILADANLDKVLSAYNKHRDKPIREQAENIIHLFTLTNLGAPAAFKYFDTTIDRKRYTSTKEVLDATLIHQSITGLYETRIDLSQLGGDGGPAPGSSGGGGGMDPLQLLQPLEAEIKGTKLKAHWNSGATITCVPQAFLEEEVPIKNIWIKTIHGEKEQPVYYLTFKIQGRKVEAEVISSPYDYILVSPSDIPWLMKKPLQLTTLVPLQEYEERLLKQTMLTGSYKEKLQSLFLKYDALWQHWENQVGHRRIKPHHIATGTVNPRPQKQYPINPKAKASIQTVINDLLKQGVLIQQNSIMNTPVYPVPKPDGKWRMVLDYREVNKTIPLIAAQNQHSAGILSSIFRGKYKTTLDLSNGFWAHSITPESYWLTAFTWLGQQYCWTRLPQGFLNSPALFNADVVDLLKEVPNVQVYVDDIYISHDDPREHLEQLEKVFSLLLNAGYVVSLKKSEIAQHEVEFLGFNITKEGRGLTETFKQKLLNITPPRDLKQLQSILGKLNFARNFIPNFSELVKPLYNIIATAPGKYITWTTDNSQQLQNIISMLNSAENLEERNPEVRLIMKVNTSPSAGYIRFYNEFAKRPIMYLNYVYTKAEVKFTNTEKLLTTIHKGLIKALDLGMGQEILVYSPIVSMTKIQKTPLPERKALPIRWITWMSYLEDPRIQFHYDKTLPELQQVPTVTDDIIAKIKHPSEFSMVFYTDGSAIKHPNVNKSHNAGMGIAQVQFKPEFTVINTWSIPLGDHTAQLAEVAAVEFACKKALKIDGPVLIVTDSFYVAESVNKELPYWQSNGFFNNKKKPLKHVSKWKSIADCIQLKPDIIIIHEKGHQPTASTFHTEGNNLADKLATQGSYVVNAGKRTADGSEFEKRTADGSEFESPKKKAKVE

SEQ ID NO: 7447 - protein, 2094 aa, synthetic construct
MPAAKRVKLDGGDKKYSIGLDIGTNSVGWAVITDEYKVPSKKFKVLGNTDRHSIKKNLIGALLFDSGETAEATRLKRTARRRYTRRKNRICYLQEIFSNEMAKVDDSFFHRLEESFLVEEDKKHERHPIFGNIVDEVAYHEKYPTIYHLRKKLVDSTDKADLRLIYLALAHMIKFRGHFLIEGDLNPDNSDVDKLFIQLVQTYNQLFEENPINASGVDAKAILSARLSKSRRLENLIAQLPGEKKNGLFGNLIALSLGLTPNFKSNFDLAEDAKLQLSKDTYDDDLDNLLAQIGDQYADLFLAAKNLSDAILLSDILRVNTEITKAPLSASMIKRYDEHHQDLTLLKALVRQQLPEKYKEIFFDQSKNGYAGYIDGGASQEEFYKFIKPILEKMDGTEELLVKLNREDLLRKQRTFDNGSIPHQIHLGELHAILRRQEDFYPFLKDNREKIEKILTFRIPYYVGPLARGNSRFAWMTRKSEETITPWNFEEVVDKGASAQSFIERMTNFDKNLPNEKVLPKHSLLYEYFTVYNELTKVKYVTEGMRKPAFLSGEQKKAIVDLLFKTNRKVTVKQLKEDYFKKIECFDSVEISGVEDRFNASLGTYHDLLKIIKDKDFLDNEENEDILEDIVLTLTLFEDREMIEERLKTYAHLFDDKVMKQLKRRRYTGWGRLSRKLINGIRDKQSGKTILDFLKSDGFANRNFMQLIHDDSLTFKEDIQKAQVSGQGDSLHEHIANLAGSPAIKKGILQTVKVVDELVKVMGRHKPENIVIEMARENQTTQKGQKNSRERMKRIEEGIKELGSQILKEHPVENTQLQNEKLYLYYLQNGRDMYVDQELDINRLSDYDVDHIVPQSFLKDDSIDNKVLTRSDKARGKSDNVPSEEVVKKMKNYWRQLLNAKLITQRKFDNLTKAERGGLSELDKAGFIKRQLVETRQITKHVAQILDSRMNTKYDENDKLIREVKVITLKSKLVSDFRKDFQFYKVREINNYHHAHDAYLNAVVGTALIKKYPKLESEFVYGDYKVYDVRKMIAKSEQEIGKATAKYFFYSNIMNFFKTEITLANGEIRKRPLIETNGETGEIVWDKGRDFATVRKVLSMPQVNIVKKTEVQTGGFSKESILPKRNSDKLIARKKDWDPKKYGGFDSPTVAYSVLVVAKVEKGKSKKLKSVKELLGITIMERSSFEKNPIDFLEAKGYKEVKKDLIIKLPKYSLFELENGRKRMLASAGELQKGNELALPSKYVNFLYLASHYEKLKGSPEDNEQKQLFVEQHKHYLDEIIEQISEFSKRVILADANLDKVLSAYNKHRDKPIREQAENIIHLFTLTNLGAPAAFKYFDTTIDRKRYTSTKEVLDATLIHQSITGLYETRIDLSQLGGDGGPAPGSSGGGGGTLNIEDEYRLHETSKEPDVPLGSTWLSDFPQAWAETGGMGLAVRQAPLIIPLKATSTPVSIKQYPMSQEARLGIKPHIQRLLDQGILVPCQSPWNTPLLPVKKPGTNDYRPVQDLREVNKRVEDIHPTVPNPYNLLSGLPPSHQWYTVLDLKDAFFCLRLHPTSQPLFAFEWRDPEMGISGQLTWTRLPQGFKNSPTLFNEALHRDLADFRIQHPDLILLQYVDDLLLAATSEQDCQRGTRALLQTLGNLGYRASAKKAQICQKQVKYLGYLLKEGQRWLTEARKETVMGQPTPKTPRQLREFLGTAGFCRLWIPGFAEMAAPLYPLTKPGTLFNWGPDQQKAYQEIKQALLTAPALGLPDLTKPFELFVDEKQGYAKGVLTQKLGPWRRPVAYLSKKLDPVAAGWPPCLRMVAAIAVLTKDAGKLTMGQPLVILAPHAVEALVKQPPDRWLSNARMTHYQAMLLDTDRVQFGPVVALNPATLLPLPEKEAPHDCLEILAETHGTRPDLTDQPIPDADYTWYTDGSSFLQEGQRRAGAAVTTETEVIWARALPAGTSAQRAELIALTQALKMAEGKKLNVYTDSRYAFATAHVHGEIYRRRGWLTSEGREIKNKNEILALLKALFLPKRLSIIHCPGHQKGNSAEARGNRMADQAAREAAMKAVLETSTLLAGKRTADGSEFEKRTADGSEFESPKKKAKVE

SEQ ID NO: 7448 - protein, 2087 aa, synthetic construct
MPAAKRVKLDGGDKKYSIGLDIGTNSVGWAVITDEYKVPSKKFKVLGNTDRHSIKKNLIGALLFDSGETAEATRLKRTARRRYTRRKNRICYLQEIFSNEMAKVDDSFFHRLEESFLVEEDKKHERHPIFGNIVDEVAYHEKYPTIYHLRKKLVDSTDKADLRLIYLALAHMIKFRGHFLIEGDLNPDNSDVDKLFIQLVQTYNQLFEENPINASGVDAKAILSARLSKSRRLENLIAQLPGEKKNGLFGNLIALSLGLTPNFKSNFDLAEDAKLQLSKDTYDDDLDNLLAQIGDQYADLFLAAKNLSDAILLSDILRVNTEITKAPLSASMIKRYDEHHQDLTLLKALVRQQLPEKYKEIFFDQSKNGYAGYIDGGASQEEFYKFIKPILEKMDGTEELLVKLNREDLLRKQRTFDNGSIPHQIHLGELHAILRRQEDFYPFLKDNREKIEKILTFRIPYYVGPLARGNSRFAWMTRKSEETITPWNFEEVVDKGASAQSFIERMTNFDKNLPNEKVLPKHSLLYEYFTVYNELTKVKYVTEGMRKPAFLSGEQKKAIVDLLFKTNRKVTVKQLKEDYFKKIECFDSVEISGVEDRFNASLGTYHDLLKIIKDKDFLDNEENEDILEDIVLTLTLFEDREMIEERLKTYAHLFDDKVMKQLKRRRYTGWGRLSRKLINGIRDKQSGKTILDFLKSDGFANRNFMQLIHDDSLTFKEDIQKAQVSGQGDSLHEHIANLAGSPAIKKGILQTVKVVDELVKVMGRHKPENIVIEMARENQTTQKGQKNSRERMKRIEEGIKELGSQILKEHPVENTQLQNEKLYLYYLQNGRDMYVDQELDINRLSDYDVDHIVPQSFLKDDSIDNKVLTRSDKARGKSDNVPSEEVVKKMKNYWRQLLNAKLITQRKFDNLTKAERGGLSELDKAGFIKRQLVETRQITKHVAQILDSRMNTKYDENDKLIREVKVITLKSKLVSDFRKDFQFYKVREINNYHHAHDAYLNAVVGTALIKKYPKLESEFVYGDYKVYDVRKMIAKSEQEIGKATAKYFFYSNIMNFFKTEITLANGEIRKRPLIETNGETGEIVWDKGRDFATVRKVLSMPQVNIVKKTEVQTGGFSKESILPKRNSDKLIARKKDWDPKKYGGFDSPTVAYSVLVVAKVEKGKSKKLKSVKELLGITIMERSSFEKNPIDFLEAKGYKEVKKDLIIKLPKYSLFELENGRKRMLASAGELQKGNELALPSKYVNFLYLASHYEKLKGSPEDNEQKQLFVEQHKHYLDEIIEQISEFSKRVILADANLDKVLSAYNKHRDKPIREQAENIIHLFTLTNLGAPAAFKYFDTTIDRKRYTSTKEVLDATLIHQSITGLYETRIDLSQLGGDGGGGGEAAAKPAPGGVPWILKKPLELTIKLDLEEQQGTLLNNSILSKKGKEELKQLFEKYSALWQSWENQVGHRRIRPHKIATGTVKPTPQKQYHINPKAKPDIQIVINDLLKQGVLIQKESTMNTPVYPVPKPNGRWRMVLDYRAVNKVTPLIAVQNQHSYGILGSLFKGRYKTTIDLSNGFWAHPIVPEDYWITAFTWQGKQYCWTVLPQGFLNSPGLFTGDVVDLLQGIPNVEVYVDDVYISHDSEKEHLEYLDILFNRLKEAGYIISLKKSNIANSIVDFLGFQITNEGRGLTDTFKEKLENITAPTTLKQLQSILGLLNFARNFIPDFTELIAPLYALIPKSTKNYVPWQIEHSTTLETLITKLNGAEYLQGRKGDKTLIMKVNASYTTGYIRYYNEGEKKPISYVSIVFSKTELKFTELEKLLTTVHKGLLKALDLSMGQNIHVYSPIVSMQNIQKTPQTAKKALASRWLSWLSYLEDPRIRFFYDPQMPALKDLPAVDTGKDNKKHPSNFQHIFYTDGSAITSPTKEGHLNAGMGIVYFINKDGNLQKQQEWSISLGNHTAQFAEIAAFEFALKKCLPLGGNILVVTDSNYVAKAYNEELDVWASNGFVNNRKKPLKHISKWKSVADLKRLRPDVVVTHEPGHQKLDSSPHAYGNNLADQLATQASFKVHAGKRTADGSEFEKRTADGSEFESPKKKAKVE

SEQ ID NO: 7449 - protein, 2087 aa, synthetic construct
MPAAKRVKLDGGDKKYSIGLDIGTNSVGWAVITDEYKVPSKKFKVLGNTDRHSIKKNLIGALLFDSGETAEATRLKRTARRRYTRRKNRICYLQEIFSNEMAKVDDSFFHRLEESFLVEEDKKHERHPIFGNIVDEVAYHEKYPTIYHLRKKLVDSTDKADLRLIYLALAHMIKFRGHFLIEGDLNPDNSDVDKLFIQLVQTYNQLFEENPINASGVDAKAILSARLSKSRRLENLIAQLPGEKKNGLFGNLIALSLGLTPNFKSNFDLAEDAKLQLSKDTYDDDLDNLLAQIGDQYADLFLAAKNLSDAILLSDILRVNTEITKAPLSASMIKRYDEHHQDLTLLKALVRQQLPEKYKEIFFDQSKNGYAGYIDGGASQEEFYKFIKPILEKMDGTEELLVKLNREDLLRKQRTFDNGSIPHQIHLGELHAILRRQEDFYPFLKDNREKIEKILTFRIPYYVGPLARGNSRFAWMTRKSEETITPWNFEEVVDKGASAQSFIERMTNFDKNLPNEKVLPKHSLLYEYFTVYNELTKVKYVTEGMRKPAFLSGEQKKAIVDLLFKTNRKVTVKQLKEDYFKKIECFDSVEISGVEDRFNASLGTYHDLLKIIKDKDFLDNEENEDILEDIVLTLTLFEDREMIEERLKTYAHLFDDKVMKQLKRRRYTGWGRLSRKLINGIRDKQSGKTILDFLKSDGFANRNFMQLIHDDSLTFKEDIQKAQVSGQGDSLHEHIANLAGSPAIKKGILQTVKVVDELVKVMGRHKPENIVIEMARENQTTQKGQKNSRERMKRIEEGIKELGSQILKEHPVENTQLQNEKLYLYYLQNGRDMYVDQELDINRLSDYDVDHIVPQSFLKDDSIDNKVLTRSDKARGKSDNVPSEEVVKKMKNYWRQLLNAKLITQRKFDNLTKAERGGLSELDKAGFIKRQLVETRQITKHVAQILDSRMNTKYDENDKLIREVKVITLKSKLVSDFRKDFQFYKVREINNYHHAHDAYLNAVVGTALIKKYPKLESEFVYGDYKVYDVRKMIAKSEQEIGKATAKYFFYSNIMNFFKTEITLANGEIRKRPLIETNGETGEIVWDKGRDFATVRKVLSMPQVNIVKKTEVQTGGFSKESILPKRNSDKLIARKKDWDPKKYGGFDSPTVAYSVLVVAKVEKGKSKKLKSVKELLGITIMERSSFEKNPIDFLEAKGYKEVKKDLIIKLPKYSLFELENGRKRMLASAGELQKGNELALPSKYVNFLYLASHYEKLKGSPEDNEQKQLFVEQHKHYLDEIIEQISEFSKRVILADANLDKVLSAYNKHRDKPIREQAENIIHLFTLTNLGAPAAFKYFDTTIDRKRYTSTKEVLDATLIHQSITGLYETRIDLSQLGGDGGGGGEAAAKPAPGGVPWILKKPLELTIKLDLEEQQGTLLNNSILSKKGKEELKQLFEKYSALWQSWENQVGHRRIRPHKIATGTVKPTPQKQYHINPKAKPDIQIVINDLLKQGVLIQKESTMNTPVYPVPKPNGRWRMVLDYRAVNKVTPLIAVQNQHSYGILGSLFKGRYKTTIDLSNGFWAHPIVPEDYWITAFTWQGKQYCWTVLPQGFLNSPGLFNGDVVDLLQGIPNVEVYVDDVYISHDSEKEHLEYLDILFNRLKEAGYIISLKKSNIANSIVDFLGFQITNEGRGLTDTFKEKLENITAPTTLKQLQSILGLLNFARNFIPDFTELIAPLYALIPKSPKNYVPWQIEHSTTLETLITKLNGAEYLQGRKGDKTLIMKVNASYTTGYIRYYNEGEKKPISYVSIVFSKTELKFTELEKLLTTVHKGLLKALDLSMGQNIHVYSPIVSMQNIQKTPQTAKKALASRWLSWLSYLEDPRIRFFYDPQMPALKDLPAVDTGKDNKKHPSNFQHIFYTDGSAITSPTKEGHLNAGMGIVYFINKDGNLQKQQEWSISLGNHTAQFAEIAAFEFALKKCLPLGGNILVVTDSNYVAKAYNEELDVWASNGFVNNRKKPLKHISKWKSVADLKRLRPDVVVTHEPGHQKLDSSPHAYGNNLADQLATQASFKVHAGKRTADGSEFEKRTADGSEFESPKKKAKVE

SEQ ID NO: 7450 - protein, 2176 aa, synthetic construct
MPAAKRVKLDGGDKKYSIGLDIGTNSVGWAVITDEYKVPSKKFKVLGNTDRHSIKKNLIGALLFDSGETAEATRLKRTARRRYTRRKNRICYLQEIFSNEMAKVDDSFFHRLEESFLVEEDKKHERHPIFGNIVDEVAYHEKYPTIYHLRKKLVDSTDKADLRLIYLALAHMIKFRGHFLIEGDLNPDNSDVDKLFIQLVQTYNQLFEENPINASGVDAKAILSARLSKSRRLENLIAQLPGEKKNGLFGNLIALSLGLTPNFKSNFDLAEDAKLQLSKDTYDDDLDNLLAQIGDQYADLFLAAKNLSDAILLSDILRVNTEITKAPLSASMIKRYDEHHQDLTLLKALVRQQLPEKYKEIFFDQSKNGYAGYIDGGASQEEFYKFIKPILEKMDGTEELLVKLNREDLLRKQRTFDNGSIPHQIHLGELHAILRRQEDFYPFLKDNREKIEKILTFRIPYYVGPLARGNSRFAWMTRKSEETITPWNFEEVVDKGASAQSFIERMTNFDKNLPNEKVLPKHSLLYEYFTVYNELTKVKYVTEGMRKPAFLSGEQKKAIVDLLFKTNRKVTVKQLKEDYFKKIECFDSVEISGVEDRFNASLGTYHDLLKIIKDKDFLDNEENEDILEDIVLTLTLFEDREMIEERLKTYAHLFDDKVMKQLKRRRYTGWGRLSRKLINGIRDKQSGKTILDFLKSDGFANRNFMQLIHDDSLTFKEDIQKAQVSGQGDSLHEHIANLAGSPAIKKGILQTVKVVDELVKVMGRHKPENIVIEMARENQTTQKGQKNSRERMKRIEEGIKELGSQILKEHPVENTQLQNEKLYLYYLQNGRDMYVDQELDINRLSDYDVDHIVPQSFLKDDSIDNKVLTRSDKARGKSDNVPSEEVVKKMKNYWRQLLNAKLITQRKFDNLTKAERGGLSELDKAGFIKRQLVETRQITKHVAQILDSRMNTKYDENDKLIREVKVITLKSKLVSDFRKDFQFYKVREINNYHHAHDAYLNAVVGTALIKKYPKLESEFVYGDYKVYDVRKMIAKSEQEIGKATAKYFFYSNIMNFFKTEITLANGEIRKRPLIETNGETGEIVWDKGRDFATVRKVLSMPQVNIVKKTEVQTGGFSKESILPKRNSDKLIARKKDWDPKKYGGFDSPTVAYSVLVVAKVEKGKSKKLKSVKELLGITIMERSSFEKNPIDFLEAKGYKEVKKDLIIKLPKYSLFELENGRKRMLASAGELQKGNELALPSKYVNFLYLASHYEKLKGSPEDNEQKQLFVEQHKHYLDEIIEQISEFSKRVILADANLDKVLSAYNKHRDKPIREQAENIIHLFTLTNLGAPAAFKYFDTTIDRKRYTSTKEVLDATLIHQSITGLYETRIDLSQLGGDGGGGGEAAAKPAPGGMNPLQLLQPLPAEIKGTKLLAHWNSGATITCIPESFLEDEQPIKKTLIKTIHGEKQQNVYYVTFKVKGRKVEAEVIASPYEYILLSPTDVPWLTQQPLQLTILVPLQEYQEKILSKTALPEDQKQQLKTLFVKYDNLWQHWENQVGHRKIRPHNIATGDYPPRPQKQYPINPKAKPSIQIVIDDLLKQGVLTPQNSTMNTPVYPVPKPDGRWRMVLDYREVNKTIPLTAAQNQHSAGILATIVRQKYKTTLDLANGFWAHPITPESYWLTAFTWQGKQYCWTRLPQGFLNSPALFNADVVDLLKEIPNVQVYVDDIYLSHDDPKEHVQQLEKVFQILLQAGYVVSLKKSEIGQKTVEFLGFNITKEGRGLTDTFKTKLLNITPPKDLKQLQSILGKLNFARNFIPNFAELVQPLYNLIAPAKGKYIEWSEENTKQLNMVIEALNTASNLEERLPEQRLVIKVNTSPSAGYVRYYNETGKKPIMYLNYVFSKAELKFSMLEKLLTTMHKALIKAMDLAMGQEILVYSPIVSMTKIQKTPLPERKALPIRWITWMTYLEDPRIQFHYDKTLPELKHIPDVYTSSQSPVKHPSQYEGVFYTDGSAIKSPDPTKSNNAGMGIVHATYKPEYQVLNQWSIPLGNHTAQMAEIAAVEFACKKALKIPGPVLVITDSFYVAESANKELPYWKSNGFVNNKKKPLKHISKWKSIAECLSMKPDITIQHEKGISLQIPVFILKGNALADKLATQGSYVVNAGKRTADGSEFEKRTADGSEFESPKKKAKVE

SEQ ID NO: 7451 - protein, 2127 aa, synthetic construct
MPAAKRVKLDGGDKKYSIGLDIGTNSVGWAVITDEYKVPSKKFKVLGNTDRHSIKKNLIGALLFDSGETAEATRLKRTARRRYTRRKNRICYLQEIFSNEMAKVDDSFFHRLEESFLVEEDKKHERHPIFGNIVDEVAYHEKYPTIYHLRKKLVDSTDKADLRLIYLALAHMIKFRGHFLIEGDLNPDNSDVDKLFIQLVQTYNQLFEENPINASGVDAKAILSARLSKSRRLENLIAQLPGEKKNGLFGNLIALSLGLTPNFKSNFDLAEDAKLQLSKDTYDDDLDNLLAQIGDQYADLFLAAKNLSDAILLSDILRVNTEITKAPLSASMIKRYDEHHQDLTLLKALVRQQLPEKYKEIFFDQSKNGYAGYIDGGASQEEFYKFIKPILEKMDGTEELLVKLNREDLLRKQRTFDNGSIPHQIHLGELHAILRRQEDFYPFLKDNREKIEKILTFRIPYYVGPLARGNSRFAWMTRKSEETITPWNFEEVVDKGASAQSFIERMTNFDKNLPNEKVLPKHSLLYEYFTVYNELTKVKYVTEGMRKPAFLSGEQKKAIVDLLFKTNRKVTVKQLKEDYFKKIECFDSVEISGVEDRFNASLGTYHDLLKIIKDKDFLDNEENEDILEDIVLTLTLFEDREMIEERLKTYAHLFDDKVMKQLKRRRYTGWGRLSRKLINGIRDKQSGKTILDFLKSDGFANRNFMQLIHDDSLTFKEDIQKAQVSGQGDSLHEHIANLAGSPAIKKGILQTVKVVDELVKVMGRHKPENIVIEMARENQTTQKGQKNSRERMKRIEEGIKELGSQILKEHPVENTQLQNEKLYLYYLQNGRDMYVDQELDINRLSDYDVDHIVPQSFLKDDSIDNKVLTRSDKARGKSDNVPSEEVVKKMKNYWRQLLNAKLITQRKFDNLTKAERGGLSELDKAGFIKRQLVETRQITKHVAQILDSRMNTKYDENDKLIREVKVITLKSKLVSDFRKDFQFYKVREINNYHHAHDAYLNAVVGTALIKKYPKLESEFVYGDYKVYDVRKMIAKSEQEIGKATAKYFFYSNIMNFFKTEITLANGEIRKRPLIETNGETGEIVWDKGRDFATVRKVLSMPQVNIVKKTEVQTGGFSKESILPKRNSDKLIARKKDWDPKKYGGFDSPTVAYSVLVVAKVEKGKSKKLKSVKELLGITIMERSSFEKNPIDFLEAKGYKEVKKDLIIKLPKYSLFELENGRKRMLASAGELQKGNELALPSKYVNFLYLASHYEKLKGSPEDNEQKQLFVEQHKHYLDEIIEQISEFSKRVILADANLDKVLSAYNKHRDKPIREQAENIIHLFTLTNLGAPAAFKYFDTTIDRKRYTSTKEVLDATLIHQSITGLYETRIDLSQLGGDGGGGGEAAAKPAPGGLLGRDLLTKLKAQIQFSTEGPQVTWEDRPAMCLVLNLEEEYRLHEKPVPPSIDPSWLQLFPMVWAEKAGMGLANQVPPVVVELKSDASPVAVRQYPMSKEAREGIRPHIQRFLDLGILVPCQSPWNTPLLPVKKPGTNDYRPVQDLREVNKRVQDIHPTVPNPYNLLSSLPPSHTWYSVLDLKDAFFCLKLHPNSQPLFAFEWRDPEKGNTGQLTWTRLPQGFKNSPTLFNEALHRDLASFRALNPQVVMLQYVDDLLVAAPTYRDCKEGTRRLLQELSKLGYRVSAKKAQLCREEVTYLGYLLKGGKRWLTPARKATVMKIPTPTTPRQVREFLGTAGFCRLWIPGFASLAAPLYPLTRPKVPFTWTEAHQEAFGRIKEALLSAPALALPDLTKPFALYVDEKEGVARGVLTQTLGPWRRPVAYLSKKLDPVASGWPTCLKAIAAVALLLKDADKLTLGQNVLVIAPHNLESIVRQPPDRWMTNARMTHYQSLLLNERVSFAPPAILNPATLLPVESDDTPIHICSEILAEETGTRPDLRDQPLPGVPAWYTDGSSFIMDGRRQAGAAIVDNKRTVWASNLPEGTSAQKAELIALTQALRLAEGKSINIYTDSRYAFATAHVHGAIYKQRGWLTSAGKDIKNKEEILALLEAIHLPKRVAIIHCPGHQRGTDPVATGNRKADEAAKQAAQSTRILTETTKNAGKRTADGSEFEKRTADGSEFESPKKKAKVE

SEQ ID NO: 7452 - protein, 2096 aa, synthetic construct
MPAAKRVKLDGGDKKYSIGLDIGTNSVGWAVITDEYKVPSKKFKVLGNTDRHSIKKNLIGALLFDSGETAEATRLKRTARRRYTRRKNRICYLQEIFSNEMAKVDDSFFHRLEESFLVEEDKKHERHPIFGNIVDEVAYHEKYPTIYHLRKKLVDSTDKADLRLIYLALAHMIKFRGHFLIEGDLNPDNSDVDKLFIQLVQTYNQLFEENPINASGVDAKAILSARLSKSRRLENLIAQLPGEKKNGLFGNLIALSLGLTPNFKSNFDLAEDAKLQLSKDTYDDDLDNLLAQIGDQYADLFLAAKNLSDAILLSDILRVNTEITKAPLSASMIKRYDEHHQDLTLLKALVRQQLPEKYKEIFFDQSKNGYAGYIDGGASQEEFYKFIKPILEKMDGTEELLVKLNREDLLRKQRTFDNGSIPHQIHLGELHAILRRQEDFYPFLKDNREKIEKILTFRIPYYVGPLARGNSRFAWMTRKSEETITPWNFEEVVDKGASAQSFIERMTNFDKNLPNEKVLPKHSLLYEYFTVYNELTKVKYVTEGMRKPAFLSGEQKKAIVDLLFKTNRKVTVKQLKEDYFKKIECFDSVEISGVEDRFNASLGTYHDLLKIIKDKDFLDNEENEDILEDIVLTLTLFEDREMIEERLKTYAHLFDDKVMKQLKRRRYTGWGRLSRKLINGIRDKQSGKTILDFLKSDGFANRNFMQLIHDDSLTFKEDIQKAQVSGQGDSLHEHIANLAGSPAIKKGILQTVKVVDELVKVMGRHKPENIVIEMARENQTTQKGQKNSRERMKRIEEGIKELGSQILKEHPVENTQLQNEKLYLYYLQNGRDMYVDQELDINRLSDYDVDHIVPQSFLKDDSIDNKVLTRSDKARGKSDNVPSEEVVKKMKNYWRQLLNAKLITQRKFDNLTKAERGGLSELDKAGFIKRQLVETRQITKHVAQILDSRMNTKYDENDKLIREVKVITLKSKLVSDFRKDFQFYKVREINNYHHAHDAYLNAVVGTALIKKYPKLESEFVYGDYKVYDVRKMIAKSEQEIGKATAKYFFYSNIMNFFKTEITLANGEIRKRPLIETNGETGEIVWDKGRDFATVRKVLSMPQVNIVKKTEVQTGGFSKESILPKRNSDKLIARKKDWDPKKYGGFDSPTVAYSVLVVAKVEKGKSKKLKSVKELLGITIMERSSFEKNPIDFLEAKGYKEVKKDLIIKLPKYSLFELENGRKRMLASAGELQKGNELALPSKYVNFLYLASHYEKLKGSPEDNEQKQLFVEQHKHYLDEIIEQISEFSKRVILADANLDKVLSAYNKHRDKPIREQAENIIHLFTLTNLGAPAAFKYFDTTIDRKRYTSTKEVLDATLIHQSITGLYETRIDLSQLGGDGGGGGEAAAKPAPGGTLGIEDEYRLHETSTEPDVSLGSTWLSDFPQAWAETGGMGLAVRQAPLIIPLKATSTPVSIQQYPMSHEARLGIKPHIQRLLDQGILVPCQSPWNTPLLPVKKPGTNDYRPVQDLREVNKRVEDIHPTVPNPYNLLSGLPPSHQWYTVLDLKDAFFCLRLHPTSQPLFAFEWRDPGMGISGQLTWTRLPQGFKNSPTLFDEALHRDLADFRIQHPDLILLQYVDDILLAATSELDCQQGTRALLQTLGDLGYRASAKKAQICQKQVKYLGYLLREGQRWLTEARKETVMGQPVPKTPRQLREFLGTAGFCRLWIPGFAEMAAPLYPLTKTGTLFSWGPDQQKAYQEIKQALLTAPALGLPDLTKPFELFVDEKQGYAKGVLTQKLGPWRRPVAYLSKKLDPVAAGWPPCLRMVAAIAVLTKDAGKLTMGQPLVILAPHAVEALVKQPPDRWLSNARMTHYQAMLLDTDRVQFGPVVALNPATLLPLPEEGAPHDCLEILAETHGTRPDLTDQPIPDADHTWYTDGSSFLQEGQRKAGAAVTTETEVIWAGALPAGTSAQRAELIALTQALKMAEGKRLNVYTDSRYAFATAHIHGEIYRRRGLLTSEGREIKNKSEILALLKALFLPKRLSIIHCLGHQKGDSAEARGNRLADQAAREAAIKTPPDTSTLLAGKRTADGSEFEKRTADGSEFESPKKKAKVE

SEQ ID NO: 7453 - protein, 2096 aa, synthetic construct
MPAAKRVKLDGGDKKYSIGLDIGTNSVGWAVITDEYKVPSKKFKVLGNTDRHSIKKNLIGALLFDSGETAEATRLKRTARRRYTRRKNRICYLQEIFSNEMAKVDDSFFHRLEESFLVEEDKKHERHPIFGNIVDEVAYHEKYPTIYHLRKKLVDSTDKADLRLIYLALAHMIKFRGHFLIEGDLNPDNSDVDKLFIQLVQTYNQLFEENPINASGVDAKAILSARLSKSRRLENLIAQLPGEKKNGLFGNLIALSLGLTPNFKSNFDLAEDAKLQLSKDTYDDDLDNLLAQIGDQYADLFLAAKNLSDAILLSDILRVNTEITKAPLSASMIKRYDEHHQDLTLLKALVRQQLPEKYKEIFFDQSKNGYAGYIDGGASQEEFYKFIKPILEKMDGTEELLVKLNREDLLRKQRTFDNGSIPHQIHLGELHAILRRQEDFYPFLKDNREKIEKILTFRIPYYVGPLARGNSRFAWMTRKSEETITPWNFEEVVDKGASAQSFIERMTNFDKNLPNEKVLPKHSLLYEYFTVYNELTKVKYVTEGMRKPAFLSGEQKKAIVDLLFKTNRKVTVKQLKEDYFKKIECFDSVEISGVEDRFNASLGTYHDLLKIIKDKDFLDNEENEDILEDIVLTLTLFEDREMIEERLKTYAHLFDDKVMKQLKRRRYTGWGRLSRKLINGIRDKQSGKTILDFLKSDGFANRNFMQLIHDDSLTFKEDIQKAQVSGQGDSLHEHIANLAGSPAIKKGILQTVKVVDELVKVMGRHKPENIVIEMARENQTTQKGQKNSRERMKRIEEGIKELGSQILKEHPVENTQLQNEKLYLYYLQNGRDMYVDQELDINRLSDYDVDHIVPQSFLKDDSIDNKVLTRSDKARGKSDNVPSEEVVKKMKNYWRQLLNAKLITQRKFDNLTKAERGGLSELDKAGFIKRQLVETRQITKHVAQILDSRMNTKYDENDKLIREVKVITLKSKLVSDFRKDFQFYKVREINNYHHAHDAYLNAVVGTALIKKYPKLESEFVYGDYKVYDVRKMIAKSEQEIGKATAKYFFYSNIMNFFKTEITLANGEIRKRPLIETNGETGEIVWDKGRDFATVRKVLSMPQVNIVKKTEVQTGGFSKESILPKRNSDKLIARKKDWDPKKYGGFDSPTVAYSVLVVAKVEKGKSKKLKSVKELLGITIMERSSFEKNPIDFLEAKGYKEVKKDLIIKLPKYSLFELENGRKRMLASAGELQKGNELALPSKYVNFLYLASHYEKLKGSPEDNEQKQLFVEQHKHYLDEIIEQISEFSKRVILADANLDKVLSAYNKHRDKPIREQAENIIHLFTLTNLGAPAAFKYFDTTIDRKRYTSTKEVLDATLIHQSITGLYETRIDLSQLGGDGGGGGEAAAKPAPGGTLGIEDEYRLHETSTEPDVSLGSTWLSDFPQAWAETGGMGLAVRQAPLIIPLKATSTPVSIQQYPMSHEARLGIKPHIQRLLDQGILVPCQSPWNTPLLPVKKPGTNDYRPVQDLREVNKRVEDIHPTVPNPYNLLSGLPPSHQWYTVLDLKDAFFCLRLHPTSQPLFAFEWRDPGMGISGQLTWTRLPQGFKNSPTLFNEALHRDLADFRIQHPDLILLQYVDDILLAATSELDCQQGTRALLQTLGDLGYRASAKKAQICQKQVKYLGYLLREGQRWLTEARKETVMGQPVPKTPRQLREFLGTAGFCRLWIPGFAEMAAPLYPLTKPGTLFSWGPDQQKAYQEIKQALLTAPALGLPDLTKPFELFVDEKQGYAKGVLTQKLGPWRRPVAYLSKKLDPVAAGWPPCLRMVAAIAVLTKDAGKLTMGQPLVILAPHAVEALVKQPPDRWLSNARMTHYQAMLLDTDRVQFGPVVALNPATLLPLPEEGAPHDCLEILAETHGTRPDLTDQPIPDADHTWYTDGSSFLQEGQRKAGAAVTTETEVIWAGALPAGTSAQRAELIALTQALKMAEGKRLNVYTDSRYAFATAHIHGEIYRRRGWLTSEGREIKNKSEILALLKALFLPKRLSIIHCLGHQKGDSAEARGNRLADQAAREAAIKTPPDTSTLLAGKRTADGSEFEKRTADGSEFESPKKKAKVE

SEQ ID NO: 7454 - protein, 2096 aa, synthetic construct
MPAAKRVKLDGGDKKYSIGLDIGTNSVGWAVITDEYKVPSKKFKVLGNTDRHSIKKNLIGALLFDSGETAEATRLKRTARRRYTRRKNRICYLQEIFSNEMAKVDDSFFHRLEESFLVEEDKKHERHPIFGNIVDEVAYHEKYPTIYHLRKKLVDSTDKADLRLIYLALAHMIKFRGHFLIEGDLNPDNSDVDKLFIQLVQTYNQLFEENPINASGVDAKAILSARLSKSRRLENLIAQLPGEKKNGLFGNLIALSLGLTPNFKSNFDLAEDAKLQLSKDTYDDDLDNLLAQIGDQYADLFLAAKNLSDAILLSDILRVNTEITKAPLSASMIKRYDEHHQDLTLLKALVRQQLPEKYKEIFFDQSKNGYAGYIDGGASQEEFYKFIKPILEKMDGTEELLVKLNREDLLRKQRTFDNGSIPHQIHLGELHAILRRQEDFYPFLKDNREKIEKILTFRIPYYVGPLARGNSRFAWMTRKSEETITPWNFEEVVDKGASAQSFIERMTNFDKNLPNEKVLPKHSLLYEYFTVYNELTKVKYVTEGMRKPAFLSGEQKKAIVDLLFKTNRKVTVKQLKEDYFKKIECFDSVEISGVEDRFNASLGTYHDLLKIIKDKDFLDNEENEDILEDIVLTLTLFEDREMIEERLKTYAHLFDDKVMKQLKRRRYTGWGRLSRKLINGIRDKQSGKTILDFLKSDGFANRNFMQLIHDDSLTFKEDIQKAQVSGQGDSLHEHIANLAGSPAIKKGILQTVKVVDELVKVMGRHKPENIVIEMARENQTTQKGQKNSRERMKRIEEGIKELGSQILKEHPVENTQLQNEKLYLYYLQNGRDMYVDQELDINRLSDYDVDHIVPQSFLKDDSIDNKVLTRSDKARGKSDNVPSEEVVKKMKNYWRQLLNAKLITQRKFDNLTKAERGGLSELDKAGFIKRQLVETRQITKHVAQILDSRMNTKYDENDKLIREVKVITLKSKLVSDFRKDFQFYKVREINNYHHAHDAYLNAVVGTALIKKYPKLESEFVYGDYKVYDVRKMIAKSEQEIGKATAKYFFYSNIMNFFKTEITLANGEIRKRPLIETNGETGEIVWDKGRDFATVRKVLSMPQVNIVKKTEVQTGGFSKESILPKRNSDKLIARKKDWDPKKYGGFDSPTVAYSVLVVAKVEKGKSKKLKSVKELLGITIMERSSFEKNPIDFLEAKGYKEVKKDLIIKLPKYSLFELENGRKRMLASAGELQKGNELALPSKYVNFLYLASHYEKLKGSPEDNEQKQLFVEQHKHYLDEIIEQISEFSKRVILADANLDKVLSAYNKHRDKPIREQAENIIHLFTLTNLGAPAAFKYFDTTIDRKRYTSTKEVLDATLIHQSITGLYETRIDLSQLGGDGGGGGEAAAKPAPGGTLNIEDEYRLHETSKGPDVPLGSTWLSDFPQAWAETGGMGLAVRQAPLIIPLKATSTPVSIKQYPMSQEARLGIKPHIQRLLDQGILVPCQSPWNTPLLPVKKPGTNDYRPVQDLREVNKRVEDIHPTVPNPYNLLSGLPPSHQWYTVLDLKDAFFCLRLHPTSQSLFAFEWRDPEMGISGQLTWTRLPQGFKNSPTLFNEALHRDLADFRIQHPDLILLQYVDDLLLAATSELDCQQGTRALLQTLGDLGYRASAKKAQICQKQVKYLGYLLKEGQRWLTEARKETVMGQPTPKTPRQLREFLGTAGFCRLWIPGFAEMAAPLYPLTKPGTLFEWGPDQQKAYQEIKQALLTAPALGLPDLTKPFELFVDEKQGYAKGVLTQKLGPWRRPVAYLSKKLDPVAAGWPPCLRMVAAIAVLTKDAGKLTMGQPLVILAPHAVEALVKQPPDRWLSNARMTHYQALLLDTDRVQFGPIVALNPATLLPLPEEGLQHDCLDILAEAHGTRPDLTDQPLPDADHTWYTDGSSFLQEGQRKAGAAVTTETEVVWAKALPAGTSAQRAELIALTQALKMAEGKKLNVYTDSRYAFATAHIHGEIYRRRGWLTSEGKEIKNKDEILALLKALFLPKRLSIIHCPGHQKGNRAEARGNRMADQAAREVATRETPETSTLLAGKRTADGSEFEKRTADGSEFESPKKKAKVE

SEQ ID NO: 7455 - protein, 2096 aa, synthetic construct
MPAAKRVKLDGGDKKYSIGLDIGTNSVGWAVITDEYKVPSKKFKVLGNTDRHSIKKNLIGALLFDSGETAEATRLKRTARRRYTRRKNRICYLQEIFSNEMAKVDDSFFHRLEESFLVEEDKKHERHPIFGNIVDEVAYHEKYPTIYHLRKKLVDSTDKADLRLIYLALAHMIKFRGHFLIEGDLNPDNSDVDKLFIQLVQTYNQLFEENPINASGVDAKAILSARLSKSRRLENLIAQLPGEKKNGLFGNLIALSLGLTPNFKSNFDLAEDAKLQLSKDTYDDDLDNLLAQIGDQYADLFLAAKNLSDAILLSDILRVNTEITKAPLSASMIKRYDEHHQDLTLLKALVRQQLPEKYKEIFFDQSKNGYAGYIDGGASQEEFYKFIKPILEKMDGTEELLVKLNREDLLRKQRTFDNGSIPHQIHLGELHAILRRQEDFYPFLKDNREKIEKILTFRIPYYVGPLARGNSRFAWMTRKSEETITPWNFEEVVDKGASAQSFIERMTNFDKNLPNEKVLPKHSLLYEYFTVYNELTKVKYVTEGMRKPAFLSGEQKKAIVDLLFKTNRKVTVKQLKEDYFKKIECFDSVEISGVEDRFNASLGTYHDLLKIIKDKDFLDNEENEDILEDIVLTLTLFEDREMIEERLKTYAHLFDDKVMKQLKRRRYTGWGRLSRKLINGIRDKQSGKTILDFLKSDGFANRNFMQLIHDDSLTFKEDIQKAQVSGQGDSLHEHIANLAGSPAIKKGILQTVKVVDELVKVMGRHKPENIVIEMARENQTTQKGQKNSRERMKRIEEGIKELGSQILKEHPVENTQLQNEKLYLYYLQNGRDMYVDQELDINRLSDYDVDHIVPQSFLKDDSIDNKVLTRSDKARGKSDNVPSEEVVKKMKNYWRQLLNAKLITQRKFDNLTKAERGGLSELDKAGFIKRQLVETRQITKHVAQILDSRMNTKYDENDKLIREVKVITLKSKLVSDFRKDFQFYKVREINNYHHAHDAYLNAVVGTALIKKYPKLESEFVYGDYKVYDVRKMIAKSEQEIGKATAKYFFYSNIMNFFKTEITLANGEIRKRPLIETNGETGEIVWDKGRDFATVRKVLSMPQVNIVKKTEVQTGGFSKESILPKRNSDKLIARKKDWDPKKYGGFDSPTVAYSVLVVAKVEKGKSKKLKSVKELLGITIMERSSFEKNPIDFLEAKGYKEVKKDLIIKLPKYSLFELENGRKRMLASAGELQKGNELALPSKYVNFLYLASHYEKLKGSPEDNEQKQLFVEQHKHYLDEIIEQISEFSKRVILADANLDKVLSAYNKHRDKPIREQAENIIHLFTLTNLGAPAAFKYFDTTIDRKRYTSTKEVLDATLIHQSITGLYETRIDLSQLGGDGGGGGEAAAKPAPGGTLNIEDEHRLHETSKEPDVSLGSTWLSDFPQAWAETGGMGLAVRQAPLIIPLKATSTPVSIKQYPMSQEARLGIKPHIQRLLDQGILVPCQSPWNTPLLPVKKPGTNDYRPVQDLREVNKRVEDIHPTVPNPYNLLSGLPPSHQWYTVLDLKDAFFCLRLHPTSQPLFAFEWRDPEMGISGQLTWTRLPQGFKNSPTLFDEALHRDLADFRIQHPDLILLQYVDDLLLAATSELDCQQGTRALLQTLGNLGYRASAKKAQICQKQVKYLGYLLKEGQRWLTEARKETVMGQPTPKTPRQLREFLGTAGFCRLWIPGFAEMAAPLYPLTKTGTLFNWGPDQQKAYQEIKQALLTAPALGLPDLTKPFELFVDEKQGYAKGVLTQKLGPWRRPVAYLSKKLDPVAAGWPPCLRMVAAIAVLTKDAGKLTMGQPLVILAPHAVEALVKQPPDRWLSNARMTHYQALLLDTDRVQFGPVVALNPATLLPLPEEGLQHNCLDILAEAHGTRPDLTDQPLPDADHTWYTDGSSLLQEGQRKAGAAVTTETEVIWAKALPAGTSAQRAELIALTQALKMAEGKKLNVYTDSRYAFATAHIHGEIYRRRGLLTSEGKEIKNKDEILALLKALFLPKRLSIIHCPGHQKGHSAEARGNRMADQAARKAAITETPDTSTLLAGKRTADGSEFEKRTADGSEFESPKKKAKVE

SEQ ID NO: 7456 - protein, 2087 aa, synthetic construct
MPAAKRVKLDGGDKKYSIGLDIGTNSVGWAVITDEYKVPSKKFKVLGNTDRHSIKKNLIGALLFDSGETAEATRLKRTARRRYTRRKNRICYLQEIFSNEMAKVDDSFFHRLEESFLVEEDKKHERHPIFGNIVDEVAYHEKYPTIYHLRKKLVDSTDKADLRLIYLALAHMIKFRGHFLIEGDLNPDNSDVDKLFIQLVQTYNQLFEENPINASGVDAKAILSARLSKSRRLENLIAQLPGEKKNGLFGNLIALSLGLTPNFKSNFDLAEDAKLQLSKDTYDDDLDNLLAQIGDQYADLFLAAKNLSDAILLSDILRVNTEITKAPLSASMIKRYDEHHQDLTLLKALVRQQLPEKYKEIFFDQSKNGYAGYIDGGASQEEFYKFIKPILEKMDGTEELLVKLNREDLLRKQRTFDNGSIPHQIHLGELHAILRRQEDFYPFLKDNREKIEKILTFRIPYYVGPLARGNSRFAWMTRKSEETITPWNFEEVVDKGASAQSFIERMTNFDKNLPNEKVLPKHSLLYEYFTVYNELTKVKYVTEGMRKPAFLSGEQKKAIVDLLFKTNRKVTVKQLKEDYFKKIECFDSVEISGVEDRFNASLGTYHDLLKIIKDKDFLDNEENEDILEDIVLTLTLFEDREMIEERLKTYAHLFDDKVMKQLKRRRYTGWGRLSRKLINGIRDKQSGKTILDFLKSDGFANRNFMQLIHDDSLTFKEDIQKAQVSGQGDSLHEHIANLAGSPAIKKGILQTVKVVDELVKVMGRHKPENIVIEMARENQTTQKGQKNSRERMKRIEEGIKELGSQILKEHPVENTQLQNEKLYLYYLQNGRDMYVDQELDINRLSDYDVDHIVPQSFLKDDSIDNKVLTRSDKARGKSDNVPSEEVVKKMKNYWRQLLNAKLITQRKFDNLTKAERGGLSELDKAGFIKRQLVETRQITKHVAQILDSRMNTKYDENDKLIREVKVITLKSKLVSDFRKDFQFYKVREINNYHHAHDAYLNAVVGTALIKKYPKLESEFVYGDYKVYDVRKMIAKSEQEIGKATAKYFFYSNIMNFFKTEITLANGEIRKRPLIETNGETGEIVWDKGRDFATVRKVLSMPQVNIVKKTEVQTGGFSKESILPKRNSDKLIARKKDWDPKKYGGFDSPTVAYSVLVVAKVEKGKSKKLKSVKELLGITIMERSSFEKNPIDFLEAKGYKEVKKDLIIKLPKYSLFELENGRKRMLASAGELQKGNELALPSKYVNFLYLASHYEKLKGSPEDNEQKQLFVEQHKHYLDEIIEQISEFSKRVILADANLDKVLSAYNKHRDKPIREQAENIIHLFTLTNLGAPAAFKYFDTTIDRKRYTSTKEVLDATLIHQSITGLYETRIDLSQLGGDGGGGGEAAAKPAPGGVPWLMKKPLQLTVLVPLHEYQERLLQQTALPKEQKELLQKLFLKYDALWQHWENQVGHRRIKPHNIATGTLAPRPQKQYPINPKAKPSIQIVIDDLLKQGVLIQQNSTMNTPVYPVPKPDGKWRMVLDYREVNKTIPLIAAQNQHSAGILSSIYRGKYKTTLDLTNGFWAHPITPESYWLTAFTWQGKQYCWTRLPQGFLNSPALFNADVVDLLKEIPNVQAYVDDIYISHDDPQEHLEQLEKIFSILLNAGYVVSLKKSEIAQREVEFLGFNITKEGRGLTDTFKQKLLNITPPKDLKQLQSILGKLNFARNFIPNYSELVKPLYTIVAPANGKFISWTEDNSNQLQHIISVLNQADNLEERNPETRLIIKVNSSPSAGYIRYYNEGSKRPIMYVNYIFSKAEAKFTQTEKLLTTMHKGLIKAMDLAMGQEILVYSPIVSMTKIQRTPLPERKALPVRWITWMTYLEDPRIQFHYDKSLPELQQIPNVTEDVIAKTKHPSEFAMVFYTDGSAIKHPDVNKSHSAGMGIAQVQFIPEYKIVHQWSIPLGDHTAQLAEIAAVEFACKKALKISGPVLIVTDSFYVAESANKELPYWKSNGFLNNKKKPLRHVSKWKSIAECLQLKPDIIIMHEKGHQQPMTTLHTEGNNLADKLATQGSYVVHAGKRTADGSEFEKRTADGSEFESPKKKAKVE

SEQ ID NO: 7457 - protein, 2087 aa, synthetic construct
MPAAKRVKLDGGDKKYSIGLDIGTNSVGWAVITDEYKVPSKKFKVLGNTDRHSIKKNLIGALLFDSGETAEATRLKRTARRRYTRRKNRICYLQEIFSNEMAKVDDSFFHRLEESFLVEEDKKHERHPIFGNIVDEVAYHEKYPTIYHLRKKLVDSTDKADLRLIYLALAHMIKFRGHFLIEGDLNPDNSDVDKLFIQLVQTYNQLFEENPINASGVDAKAILSARLSKSRRLENLIAQLPGEKKNGLFGNLIALSLGLTPNFKSNFDLAEDAKLQLSKDTYDDDLDNLLAQIGDQYADLFLAAKNLSDAILLSDILRVNTEITKAPLSASMIKRYDEHHQDLTLLKALVRQQLPEKYKEIFFDQSKNGYAGYIDGGASQEEFYKFIKPILEKMDGTEELLVKLNREDLLRKQRTFDNGSIPHQIHLGELHAILRRQEDFYPFLKDNREKIEKILTFRIPYYVGPLARGNSRFAWMTRKSEETITPWNFEEVVDKGASAQSFIERMTNFDKNLPNEKVLPKHSLLYEYFTVYNELTKVKYVTEGMRKPAFLSGEQKKAIVDLLFKTNRKVTVKQLKEDYFKKIECFDSVEISGVEDRFNASLGTYHDLLKIIKDKDFLDNEENEDILEDIVLTLTLFEDREMIEERLKTYAHLFDDKVMKQLKRRRYTGWGRLSRKLINGIRDKQSGKTILDFLKSDGFANRNFMQLIHDDSLTFKEDIQKAQVSGQGDSLHEHIANLAGSPAIKKGILQTVKVVDELVKVMGRHKPENIVIEMARENQTTQKGQKNSRERMKRIEEGIKELGSQILKEHPVENTQLQNEKLYLYYLQNGRDMYVDQELDINRLSDYDVDHIVPQSFLKDDSIDNKVLTRSDKARGKSDNVPSEEVVKKMKNYWRQLLNAKLITQRKFDNLTKAERGGLSELDKAGFIKRQLVETRQITKHVAQILDSRMNTKYDENDKLIREVKVITLKSKLVSDFRKDFQFYKVREINNYHHAHDAYLNAVVGTALIKKYPKLESEFVYGDYKVYDVRKMIAKSEQEIGKATAKYFFYSNIMNFFKTEITLANGEIRKRPLIETNGETGEIVWDKGRDFATVRKVLSMPQVNIVKKTEVQTGGFSKESILPKRNSDKLIARKKDWDPKKYGGFDSPTVAYSVLVVAKVEKGKSKKLKSVKELLGITIMERSSFEKNPIDFLEAKGYKEVKKDLIIKLPKYSLFELENGRKRMLASAGELQKGNELALPSKYVNFLYLASHYEKLKGSPEDNEQKQLFVEQHKHYLDEIIEQISEFSKRVILADANLDKVLSAYNKHRDKPIREQAENIIHLFTLTNLGAPAAFKYFDTTIDRKRYTSTKEVLDATLIHQSITGLYETRIDLSQLGGDGGGGGEAAAKPAPGGIPWLMKKPLQLTTLVPLQEYEERLLKQTMLTGSYKEKLQSLFLKYDALWQHWENQVGHRRIKPHHIATGTVNPRPQKQYPINPKAKASIQTVINDLLKQGVLIQQNSIMNTPVYPVPKPDGKWRMVLDYREVNKTIPLIAAQNQHSAGILSSIFRGKYKTTLDLSNGFWAHSITPESYWLTAFTWLGQQYCWTRLPQGFLNSPALFNADVVDLLKEVPNVQVYVDDIYISHDDPREHLEQLEKVFSLLLNAGYVVSLKKSEIAQHEVEFLGFNITKEGRGLTETFKQKLLNITPPRDLKQLQSILGLLNFARNFIPNFSELVKPLYNIIATAPGKYITWTTDNSQQLQNIISMLNSAENLEERNPEVRLIMKVNTSPSAGYIRFYNEFAKRPIMYLNYVYTKAEVKFTNTEKLLTTIHKGLIKALDLGMGQEILVYSPIVSMTKIQKTPLPERKALPIRWITWMSYLEDPRIQFHYDKTLPELQQVPTVTDDIIAKIKHPSEFSMVFYTDGSAIKHPNVNKSHNAGMGIAQVQFKPEFTVINTWSIPLGDHTAQLAEVAAVEFACKKALKIDGPVLIVTDSFYVAESVNKELPYWQSNGFFNNKKKPLKHVSKWKSIADCIQLKPDIIIIHEKGHQPTASTFHTEGNNLADKLATQGSYVVNAGKRTADGSEFEKRTADGSEFESPKKKAKVE

SEQ ID NO: 7458 - protein, 2176 aa, synthetic construct
MPAAKRVKLDGGDKKYSIGLDIGTNSVGWAVITDEYKVPSKKFKVLGNTDRHSIKKNLIGALLFDSGETAEATRLKRTARRRYTRRKNRICYLQEIFSNEMAKVDDSFFHRLEESFLVEEDKKHERHPIFGNIVDEVAYHEKYPTIYHLRKKLVDSTDKADLRLIYLALAHMIKFRGHFLIEGDLNPDNSDVDKLFIQLVQTYNQLFEENPINASGVDAKAILSARLSKSRRLENLIAQLPGEKKNGLFGNLIALSLGLTPNFKSNFDLAEDAKLQLSKDTYDDDLDNLLAQIGDQYADLFLAAKNLSDAILLSDILRVNTEITKAPLSASMIKRYDEHHQDLTLLKALVRQQLPEKYKEIFFDQSKNGYAGYIDGGASQEEFYKFIKPILEKMDGTEELLVKLNREDLLRKQRTFDNGSIPHQIHLGELHAILRRQEDFYPFLKDNREKIEKILTFRIPYYVGPLARGNSRFAWMTRKSEETITPWNFEEVVDKGASAQSFIERMTNFDKNLPNEKVLPKHSLLYEYFTVYNELTKVKYVTEGMRKPAFLSGEQKKAIVDLLFKTNRKVTVKQLKEDYFKKIECFDSVEISGVEDRFNASLGTYHDLLKIIKDKDFLDNEENEDILEDIVLTLTLFEDREMIEERLKTYAHLFDDKVMKQLKRRRYTGWGRLSRKLINGIRDKQSGKTILDFLKSDGFANRNFMQLIHDDSLTFKEDIQKAQVSGQGDSLHEHIANLAGSPAIKKGILQTVKVVDELVKVMGRHKPENIVIEMARENQTTQKGQKNSRERMKRIEEGIKELGSQILKEHPVENTQLQNEKLYLYYLQNGRDMYVDQELDINRLSDYDVDHIVPQSFLKDDSIDNKVLTRSDKARGKSDNVPSEEVVKKMKNYWRQLLNAKLITQRKFDNLTKAERGGLSELDKAGFIKRQLVETRQITKHVAQILDSRMNTKYDENDKLIREVKVITLKSKLVSDFRKDFQFYKVREINNYHHAHDAYLNAVVGTALIKKYPKLESEFVYGDYKVYDVRKMIAKSEQEIGKATAKYFFYSNIMNFFKTEITLANGEIRKRPLIETNGETGEIVWDKGRDFATVRKVLSMPQVNIVKKTEVQTGGFSKESILPKRNSDKLIARKKDWDPKKYGGFDSPTVAYSVLVVAKVEKGKSKKLKSVKELLGITIMERSSFEKNPIDFLEAKGYKEVKKDLIIKLPKYSLFELENGRKRMLASAGELQKGNELALPSKYVNFLYLASHYEKLKGSPEDNEQKQLFVEQHKHYLDEIIEQISEFSKRVILADANLDKVLSAYNKHRDKPIREQAENIIHLFTLTNLGAPAAFKYFDTTIDRKRYTSTKEVLDATLIHQSITGLYETRIDLSQLGGDGGGGGEAAAKPAPGGMDPLQLLQPLEAEIKGTKLKAHWNSGATITCVPQAFLEEEVPIKNIWIKTIHGEKEQPVYYLTFKIQGRKVEAEVISSPYDYILVSPSDIPWLMKKPLQLTTLVPLQEYEERLLKQTMLTGSYKEKLQSLFLKYDALWQHWENQVGHRRIKPHHIATGTVNPRPQKQYPINPKAKASIQTVINDLLKQGVLIQQNSIMNTPVYPVPKPDGKWRMVLDYREVNKTIPLIAAQNQHSAGILSSIFRGKYKTTLDLSNGFWAHSITPESYWLTAFTWLGQQYCWTRLPQGFLNSPALFNADVVDLLKEVPNVQVYVDDIYISHDDPREHLEQLEKVFSLLLNAGYVVSLKKSEIAQHEVEFLGFNITKEGRGLTETFKQKLLNITPPRDLKQLQSILGKLNFARNFIPNFSELVKPLYNIIATAPGKYITWTTDNSQQLQNIISMLNSAENLEERNPEVRLIMKVNTSPSAGYIRFYNEFAKRPIMYLNYVYTKAEVKFTNTEKLLTTIHKGLIKALDLGMGQEILVYSPIVSMTKIQKTPLPERKALPIRWITWMSYLEDPRIQFHYDKTLPELQQVPTVTDDIIAKIKHPSEFSMVFYTDGSAIKHPNVNKSHNAGMGIAQVQFKPEFTVINTWSIPLGDHTAQLAEVAAVEFACKKALKIDGPVLIVTDSFYVAESVNKELPYWQSNGFFNNKKKPLKHVSKWKSIADCIQLKPDIIIIHEKGHQPTASTFHTEGNNLADKLATQGSYVVNAGKRTADGSEFEKRTADGSEFESPKKKAKVE

SEQ ID NO: 7459 - protein, 2094 aa, synthetic construct
MPAAKRVKLDGGDKKYSIGLDIGTNSVGWAVITDEYKVPSKKFKVLGNTDRHSIKKNLIGALLFDSGETAEATRLKRTARRRYTRRKNRICYLQEIFSNEMAKVDDSFFHRLEESFLVEEDKKHERHPIFGNIVDEVAYHEKYPTIYHLRKKLVDSTDKADLRLIYLALAHMIKFRGHFLIEGDLNPDNSDVDKLFIQLVQTYNQLFEENPINASGVDAKAILSARLSKSRRLENLIAQLPGEKKNGLFGNLIALSLGLTPNFKSNFDLAEDAKLQLSKDTYDDDLDNLLAQIGDQYADLFLAAKNLSDAILLSDILRVNTEITKAPLSASMIKRYDEHHQDLTLLKALVRQQLPEKYKEIFFDQSKNGYAGYIDGGASQEEFYKFIKPILEKMDGTEELLVKLNREDLLRKQRTFDNGSIPHQIHLGELHAILRRQEDFYPFLKDNREKIEKILTFRIPYYVGPLARGNSRFAWMTRKSEETITPWNFEEVVDKGASAQSFIERMTNFDKNLPNEKVLPKHSLLYEYFTVYNELTKVKYVTEGMRKPAFLSGEQKKAIVDLLFKTNRKVTVKQLKEDYFKKIECFDSVEISGVEDRFNASLGTYHDLLKIIKDKDFLDNEENEDILEDIVLTLTLFEDREMIEERLKTYAHLFDDKVMKQLKRRRYTGWGRLSRKLINGIRDKQSGKTILDFLKSDGFANRNFMQLIHDDSLTFKEDIQKAQVSGQGDSLHEHIANLAGSPAIKKGILQTVKVVDELVKVMGRHKPENIVIEMARENQTTQKGQKNSRERMKRIEEGIKELGSQILKEHPVENTQLQNEKLYLYYLQNGRDMYVDQELDINRLSDYDVDHIVPQSFLKDDSIDNKVLTRSDKARGKSDNVPSEEVVKKMKNYWRQLLNAKLITQRKFDNLTKAERGGLSELDKAGFIKRQLVETRQITKHVAQILDSRMNTKYDENDKLIREVKVITLKSKLVSDFRKDFQFYKVREINNYHHAHDAYLNAVVGTALIKKYPKLESEFVYGDYKVYDVRKMIAKSEQEIGKATAKYFFYSNIMNFFKTEITLANGEIRKRPLIETNGETGEIVWDKGRDFATVRKVLSMPQVNIVKKTEVQTGGFSKESILPKRNSDKLIARKKDWDPKKYGGFDSPTVAYSVLVVAKVEKGKSKKLKSVKELLGITIMERSSFEKNPIDFLEAKGYKEVKKDLIIKLPKYSLFELENGRKRMLASAGELQKGNELALPSKYVNFLYLASHYEKLKGSPEDNEQKQLFVEQHKHYLDEIIEQISEFSKRVILADANLDKVLSAYNKHRDKPIREQAENIIHLFTLTNLGAPAAFKYFDTTIDRKRYTSTKEVLDATLIHQSITGLYETRIDLSQLGGDGGGGGEAAAKPAPGGVLNLEEEYRLHEKPVPSSIDPSWLQLFPTVWAERAGMGLANQVPPVVVELRSGASPVAVRQYPMSKEAREGIRPHIQRFLDLGVLVPCQSPWNTPLLPVKKPGTNDYRPVQDLREINKRVQDIHPTVPNPYNLLSSLPPSHTWYSVLDLKDAFFCLKLHPNSQPLFAFEWRDPEKGNTGQLTWTRLPQGFKNSPTLFNEALHRDLAPFRALNPQVVLLQYVDDLLVAAPTYRDCKEGTQKLLQELSKLGYRVSAKKAQLCQKEVTYLGYLLKEGKRWLTPARKATVMKIPPPTTPRQVREFLGTAGFCRLWIPGFASLAAPLYPLTKPSIPFIWTEEHQKAFDRIKEALLSAPALALPDLTKPFTLYVDERAGVARGVLTQTLGPWRRPVAYLSKKLDPVASGWPTCLKAVAAVALLLKDADKLTLGQNVTVIASHSLESIVRQPPDRWMTNARMTHYQSLLLNERVSFAPPAVLNPATLLPVESEATPVHRCSEILAEETGTRRDLKDQPLPGVPAWYTDGSSFIAEGKRRAGAAIVDGKRTVWASSLPEGTSAQKAELVALTQALRLAEGKDINIYTDSRYAFATAHIHGAIYKQRGWLTSAGKDIKNKEEILALLEAIHLPKRVAIIHCPGHQKGNDPVATGNRRADEAAKQAALSTRVLAETTKPAGKRTADGSEFEKRTADGSEFESPKKKAKVE

SEQ ID NO: 7460 - protein, 2096 aa, synthetic construct
MPAAKRVKLDGGDKKYSIGLDIGTNSVGWAVITDEYKVPSKKFKVLGNTDRHSIKKNLIGALLFDSGETAEATRLKRTARRRYTRRKNRICYLQEIFSNEMAKVDDSFFHRLEESFLVEEDKKHERHPIFGNIVDEVAYHEKYPTIYHLRKKLVDSTDKADLRLIYLALAHMIKFRGHFLIEGDLNPDNSDVDKLFIQLVQTYNQLFEENPINASGVDAKAILSARLSKSRRLENLIAQLPGEKKNGLFGNLIALSLGLTPNFKSNFDLAEDAKLQLSKDTYDDDLDNLLAQIGDQYADLFLAAKNLSDAILLSDILRVNTEITKAPLSASMIKRYDEHHQDLTLLKALVRQQLPEKYKEIFFDQSKNGYAGYIDGGASQEEFYKFIKPILEKMDGTEELLVKLNREDLLRKQRTFDNGSIPHQIHLGELHAILRRQEDFYPFLKDNREKIEKILTFRIPYYVGPLARGNSRFAWMTRKSEETITPWNFEEVVDKGASAQSFIERMTNFDKNLPNEKVLPKHSLLYEYFTVYNELTKVKYVTEGMRKPAFLSGEQKKAIVDLLFKTNRKVTVKQLKEDYFKKIECFDSVEISGVEDRFNASLGTYHDLLKIIKDKDFLDNEENEDILEDIVLTLTLFEDREMIEERLKTYAHLFDDKVMKQLKRRRYTGWGRLSRKLINGIRDKQSGKTILDFLKSDGFANRNFMQLIHDDSLTFKEDIQKAQVSGQGDSLHEHIANLAGSPAIKKGILQTVKVVDELVKVMGRHKPENIVIEMARENQTTQKGQKNSRERMKRIEEGIKELGSQILKEHPVENTQLQNEKLYLYYLQNGRDMYVDQELDINRLSDYDVDHIVPQSFLKDDSIDNKVLTRSDKARGKSDNVPSEEVVKKMKNYWRQLLNAKLITQRKFDNLTKAERGGLSELDKAGFIKRQLVETRQITKHVAQILDSRMNTKYDENDKLIREVKVITLKSKLVSDFRKDFQFYKVREINNYHHAHDAYLNAVVGTALIKKYPKLESEFVYGDYKVYDVRKMIAKSEQEIGKATAKYFFYSNIMNFFKTEITLANGEIRKRPLIETNGETGEIVWDKGRDFATVRKVLSMPQVNIVKKTEVQTGGFSKESILPKRNSDKLIARKKDWDPKKYGGFDSPTVAYSVLVVAKVEKGKSKKLKSVKELLGITIMERSSFEKNPIDFLEAKGYKEVKKDLIIKLPKYSLFELENGRKRMLASAGELQKGNELALPSKYVNFLYLASHYEKLKGSPEDNEQKQLFVEQHKHYLDEIIEQISEFSKRVILADANLDKVLSAYNKHRDKPIREQAENIIHLFTLTNLGAPAAFKYFDTTIDRKRYTSTKEVLDATLIHQSITGLYETRIDLSQLGGDGGGGGEAAAKPAPGGTLNIEDEYRLHETSKEPDVPLGSTWLSDFPQAWAETGGMGLAVRQAPLIIPLKATSTPVSIKQYPMSQEARLGIKPHIQRLLDQGILVPCQSPWNTPLLPVKKPGTNDYRPVQDLREVNKRVEDIHPTVPNPYNLLSGLPPSHQWYTVLDLKDAFFCLRLHPTSQPLFAFEWRDPEMGISGQLTWTRLPQGFKNSPTLFDEALHRDLADFRIQHPDLILLQYVDDLLLAATSEQDCQRGTRALLQTLGNLGYRASAKKAQICQKQVKYLGYLLKEGQRWLTEARKETVMGQPTPKTPRQLREFLGTAGFCRLWIPGFAEMAAPLYPLTKTGTLFNWGPDQQKAYQEIKQALLTAPALGLPDLTKPFELFVDEKQGYAKGVLTQKLGPWRRPVAYLSKKLDPVAAGWPPCLRMVAAIAVLTKDAGKLTMGQPLVILAPHAVEALVKQPPDRWLSNARMTHYQAMLLDTDRVQFGPVVALNPATLLPLPEKEAPHDCLEILAETHGTRPDLTDQPIPDADYTWYTDGSSFLQEGQRRAGAAVTTETEVIWARALPAGTSAQRAELIALTQALKMAEGKKLNVYTDSRYAFATAHVHGEIYRRRGLLTSEGREIKNKNEILALLKALFLPKRLSIIHCPGHQKGNSAEARGNRMADQAAREAAMKAVLETSTLLAGKRTADGSEFEKRTADGSEFESPKKKAKVE

SEQ ID NO: 7461 - protein, 2096 aa, synthetic construct
MPAAKRVKLDGGDKKYSIGLDIGTNSVGWAVITDEYKVPSKKFKVLGNTDRHSIKKNLIGALLFDSGETAEATRLKRTARRRYTRRKNRICYLQEIFSNEMAKVDDSFFHRLEESFLVEEDKKHERHPIFGNIVDEVAYHEKYPTIYHLRKKLVDSTDKADLRLIYLALAHMIKFRGHFLIEGDLNPDNSDVDKLFIQLVQTYNQLFEENPINASGVDAKAILSARLSKSRRLENLIAQLPGEKKNGLFGNLIALSLGLTPNFKSNFDLAEDAKLQLSKDTYDDDLDNLLAQIGDQYADLFLAAKNLSDAILLSDILRVNTEITKAPLSASMIKRYDEHHQDLTLLKALVRQQLPEKYKEIFFDQSKNGYAGYIDGGASQEEFYKFIKPILEKMDGTEELLVKLNREDLLRKQRTFDNGSIPHQIHLGELHAILRRQEDFYPFLKDNREKIEKILTFRIPYYVGPLARGNSRFAWMTRKSEETITPWNFEEVVDKGASAQSFIERMTNFDKNLPNEKVLPKHSLLYEYFTVYNELTKVKYVTEGMRKPAFLSGEQKKAIVDLLFKTNRKVTVKQLKEDYFKKIECFDSVEISGVEDRFNASLGTYHDLLKIIKDKDFLDNEENEDILEDIVLTLTLFEDREMIEERLKTYAHLFDDKVMKQLKRRRYTGWGRLSRKLINGIRDKQSGKTILDFLKSDGFANRNFMQLIHDDSLTFKEDIQKAQVSGQGDSLHEHIANLAGSPAIKKGILQTVKVVDELVKVMGRHKPENIVIEMARENQTTQKGQKNSRERMKRIEEGIKELGSQILKEHPVENTQLQNEKLYLYYLQNGRDMYVDQELDINRLSDYDVDHIVPQSFLKDDSIDNKVLTRSDKARGKSDNVPSEEVVKKMKNYWRQLLNAKLITQRKFDNLTKAERGGLSELDKAGFIKRQLVETRQITKHVAQILDSRMNTKYDENDKLIREVKVITLKSKLVSDFRKDFQFYKVREINNYHHAHDAYLNAVVGTALIKKYPKLESEFVYGDYKVYDVRKMIAKSEQEIGKATAKYFFYSNIMNFFKTEITLANGEIRKRPLIETNGETGEIVWDKGRDFATVRKVLSMPQVNIVKKTEVQTGGFSKESILPKRNSDKLIARKKDWDPKKYGGFDSPTVAYSVLVVAKVEKGKSKKLKSVKELLGITIMERSSFEKNPIDFLEAKGYKEVKKDLIIKLPKYSLFELENGRKRMLASAGELQKGNELALPSKYVNFLYLASHYEKLKGSPEDNEQKQLFVEQHKHYLDEIIEQISEFSKRVILADANLDKVLSAYNKHRDKPIREQAENIIHLFTLTNLGAPAAFKYFDTTIDRKRYTSTKEVLDATLIHQSITGLYETRIDLSQLGGDGGGGGEAAAKPAPGGTLNIEDEYRLHETSKEPDVPLGSTWLSDFPQAWAETGGMGLAVRQAPLIIPLKATSTPVSIKQYPMSQEARLGIKPHIQRLLDQGILVPCQSPWNTPLLPVKKPGTNDYRPVQDLREVNKRVEDIHPTVPNPYNLLSGLPPSHQWYTVLDLKDAFFCLRLHPTSQPLFAFEWRDPEMGISGQLTWTRLPQGFKNSPTLFNEALHRDLADFRIQHPDLILLQYVDDLLLAATSEQDCQRGTRALLQTLGNLGYRASAKKAQICQKQVKYLGYLLKEGQRWLTEARKETVMGQPTPKTPRQLREFLGKAGFCRLFIPGFAEMAAPLYPLTKPGTLFNWGPDQQKAYQEIKQALLTAPALGLPDLTKPFELFVDEKQGYAKGVLTQKLGPWRRPVAYLSKKLDPVAAGWPPCLRMVAAIAVLTKDAGKLTMGQPLVILAPHAVEALVKQPPDRWLSNARMTHYQAMLLDTDRVQFGPVVALNPATLLPLPEKEAPHDCLEILAETHGTRPDLTDQPIPDADYTWYTDGSSFLQEGQRRAGAAVTTETEVIWARALPAGTSAQRAELIALTQALKMAEGKKLNVYTDSRYAFATAHVHGEIYRRRGWLTSEGREIKNKNEILALLKALFLPKRLSIIHCPGHQKGNSAEARGNRMADQAAREAAMKAVLETSTLLAGKRTADGSEFEKRTADGSEFESPKKKAKVE

SEQ ID NO: 7462 - protein, 2098 aa, synthetic construct
MPAAKRVKLDGGDKKYSIGLDIGTNSVGWAVITDEYKVPSKKFKVLGNTDRHSIKKNLIGALLFDSGETAEATRLKRTARRRYTRRKNRICYLQEIFSNEMAKVDDSFFHRLEESFLVEEDKKHERHPIFGNIVDEVAYHEKYPTIYHLRKKLVDSTDKADLRLIYLALAHMIKFRGHFLIEGDLNPDNSDVDKLFIQLVQTYNQLFEENPINASGVDAKAILSARLSKSRRLENLIAQLPGEKKNGLFGNLIALSLGLTPNFKSNFDLAEDAKLQLSKDTYDDDLDNLLAQIGDQYADLFLAAKNLSDAILLSDILRVNTEITKAPLSASMIKRYDEHHQDLTLLKALVRQQLPEKYKEIFFDQSKNGYAGYIDGGASQEEFYKFIKPILEKMDGTEELLVKLNREDLLRKQRTFDNGSIPHQIHLGELHAILRRQEDFYPFLKDNREKIEKILTFRIPYYVGPLARGNSRFAWMTRKSEETITPWNFEEVVDKGASAQSFIERMTNFDKNLPNEKVLPKHSLLYEYFTVYNELTKVKYVTEGMRKPAFLSGEQKKAIVDLLFKTNRKVTVKQLKEDYFKKIECFDSVEISGVEDRFNASLGTYHDLLKIIKDKDFLDNEENEDILEDIVLTLTLFEDREMIEERLKTYAHLFDDKVMKQLKRRRYTGWGRLSRKLINGIRDKQSGKTILDFLKSDGFANRNFMQLIHDDSLTFKEDIQKAQVSGQGDSLHEHIANLAGSPAIKKGILQTVKVVDELVKVMGRHKPENIVIEMARENQTTQKGQKNSRERMKRIEEGIKELGSQILKEHPVENTQLQNEKLYLYYLQNGRDMYVDQELDINRLSDYDVDHIVPQSFLKDDSIDNKVLTRSDKARGKSDNVPSEEVVKKMKNYWRQLLNAKLITQRKFDNLTKAERGGLSELDKAGFIKRQLVETRQITKHVAQILDSRMNTKYDENDKLIREVKVITLKSKLVSDFRKDFQFYKVREINNYHHAHDAYLNAVVGTALIKKYPKLESEFVYGDYKVYDVRKMIAKSEQEIGKATAKYFFYSNIMNFFKTEITLANGEIRKRPLIETNGETGEIVWDKGRDFATVRKVLSMPQVNIVKKTEVQTGGFSKESILPKRNSDKLIARKKDWDPKKYGGFDSPTVAYSVLVVAKVEKGKSKKLKSVKELLGITIMERSSFEKNPIDFLEAKGYKEVKKDLIIKLPKYSLFELENGRKRMLASAGELQKGNELALPSKYVNFLYLASHYEKLKGSPEDNEQKQLFVEQHKHYLDEIIEQISEFSKRVILADANLDKVLSAYNKHRDKPIREQAENIIHLFTLTNLGAPAAFKYFDTTIDRKRYTSTKEVLDATLIHQSITGLYETRIDLSQLGGDGGGGGPAPEAAAKGGTAPLEEEYRLFLEAPIQNVTLLEQWKREIPKVWAEINPPGLASTQAPIHVQLLSTALPVRVRQYPITLEAKRSLRETIRKFRAAGILRPVHSPWNTPLLPVRKSGTSEYRMVQDLREVNKRVETIHPTVPNPYTLLSLLPPDRIWYSVLDLKDAFFCIPLAPESQLIFAFEWADAEEGESGQLTWTRLPQGFKNSPTLFNEALNRDLQGFRLDHPSVSLLQYVDDLLIAADTQAACLSATRDLLMTLAELGYRVSGKKAQLCQEEVTYLGFKIHKGSRSLSNSRTQAILQIPVPKTKRQVREFLGTIGYCRLWIPGFAELAQPLYAATRPGNDPLVWGEKEEEAFQSLKLALTQPPALALPSLDKPFQLFVEETSGAAKGVLTQALGPWKRPVAYLSKRLDPVAAGWPRCLRAIAAAALLTREASKLTFGQDIEITSSHNLESLLRSPPDKWLTNARITQYQVLLLDPPRVRFKQTAALNPATLLPETDDTLPIHHCLDTLDSLTSTRPDLTDQPLAQAEATLFTDGSSYIRDGKRYAGAAVVTLDSVIWAEPLPIGTSAQKAELIALTKALEWSKDKSVNIYTDSRYAFATLHVHGMIYRERGWLTAGGKAIKNAPEILALLTAVWLPKRVAVMHCKGHQKDDAPTSTGNRRADEVAREVAIRPLSTQATISAGKRTADGSEFEKRTADGSEFESPKKKAKVE

SEQ ID NO: 7463 - protein, 2102 aa, synthetic construct
MPAAKRVKLDGGDKKYSIGLDIGTNSVGWAVITDEYKVPSKKFKVLGNTDRHSIKKNLIGALLFDSGETAEATRLKRTARRRYTRRKNRICYLQEIFSNEMAKVDDSFFHRLEESFLVEEDKKHERHPIFGNIVDEVAYHEKYPTIYHLRKKLVDSTDKADLRLIYLALAHMIKFRGHFLIEGDLNPDNSDVDKLFIQLVQTYNQLFEENPINASGVDAKAILSARLSKSRRLENLIAQLPGEKKNGLFGNLIALSLGLTPNFKSNFDLAEDAKLQLSKDTYDDDLDNLLAQIGDQYADLFLAAKNLSDAILLSDILRVNTEITKAPLSASMIKRYDEHHQDLTLLKALVRQQLPEKYKEIFFDQSKNGYAGYIDGGASQEEFYKFIKPILEKMDGTEELLVKLNREDLLRKQRTFDNGSIPHQIHLGELHAILRRQEDFYPFLKDNREKIEKILTFRIPYYVGPLARGNSRFAWMTRKSEETITPWNFEEVVDKGASAQSFIERMTNFDKNLPNEKVLPKHSLLYEYFTVYNELTKVKYVTEGMRKPAFLSGEQKKAIVDLLFKTNRKVTVKQLKEDYFKKIECFDSVEISGVEDRFNASLGTYHDLLKIIKDKDFLDNEENEDILEDIVLTLTLFEDREMIEERLKTYAHLFDDKVMKQLKRRRYTGWGRLSRKLINGIRDKQSGKTILDFLKSDGFANRNFMQLIHDDSLTFKEDIQKAQVSGQGDSLHEHIANLAGSPAIKKGILQTVKVVDELVKVMGRHKPENIVIEMARENQTTQKGQKNSRERMKRIEEGIKELGSQILKEHPVENTQLQNEKLYLYYLQNGRDMYVDQELDINRLSDYDVDHIVPQSFLKDDSIDNKVLTRSDKARGKSDNVPSEEVVKKMKNYWRQLLNAKLITQRKFDNLTKAERGGLSELDKAGFIKRQLVETRQITKHVAQILDSRMNTKYDENDKLIREVKVITLKSKLVSDFRKDFQFYKVREINNYHHAHDAYLNAVVGTALIKKYPKLESEFVYGDYKVYDVRKMIAKSEQEIGKATAKYFFYSNIMNFFKTEITLANGEIRKRPLIETNGETGEIVWDKGRDFATVRKVLSMPQVNIVKKTEVQTGGFSKESILPKRNSDKLIARKKDWDPKKYGGFDSPTVAYSVLVVAKVEKGKSKKLKSVKELLGITIMERSSFEKNPIDFLEAKGYKEVKKDLIIKLPKYSLFELENGRKRMLASAGELQKGNELALPSKYVNFLYLASHYEKLKGSPEDNEQKQLFVEQHKHYLDEIIEQISEFSKRVILADANLDKVLSAYNKHRDKPIREQAENIIHLFTLTNLGAPAAFKYFDTTIDRKRYTSTKEVLDATLIHQSITGLYETRIDLSQLGGDGGGGGPAPEAAAKGGTVSLQDEHRLFDIPVTTSLPDVWLQDFPQAWAETGGLGRAKCQAPIIIDLKPTAVPVSIKQYPMSLEAHMGIRQHIIKFLELGVLRPCRSPWNTPLLPVKKPGTQDYRPVQDLREINKRTVDIHPTVPNPYNLLSTLKPDYSWYTVLDLKDAFFCLPLAPQSQELFAFEWKDPERGISGQLTWTRLPQGFKNSPTLFNEALHRDLTDFRTQHPEVTLLQYVDDLLLAAPTKKACTQGTRHLLQELGEKGYRASAKKAQICQTKVTYLGYILSEGKRWLTPGRIETVARIPPPRNPREVREFLGTAGFCRLWIPGFAELAAPLYALTKPSTPFTWQTEHQLAFEALKKALLSAPALGLPDTSKPFTLFLDERQGIAKGVLTQKLGPWKRPVAYLSKKLDPVAAGWPPCLRIMAATAMLVKDSAKLTLGQPLTVITPHTLEAIVRQPPDRWITNARLTHYQALLLDTDRVQFGPPVTLNPATLLPVPENQPSPHDCRQVLAETHGTREDLKDQELPDADHTWYTDGSSYLDSGTRRAGAAVVDGHNTIWAQSLPPGTSAQKAELIALTKALELSKGKKANIYTDSRYAFATAHTHGSIYERRGWLTSEGKEIKNKAEIIALLKALFLPQEVAIIHCPGHQKGQDPVAVGNRQADRVARQAAMAEVLTLATEPDNTSHITAGKRTADGSEFEKRTADGSEFESPKKKAKVE

SEQ ID NO: 7464 - protein, 2173 aa, synthetic construct
MPAAKRVKLDGGDKKYSIGLDIGTNSVGWAVITDEYKVPSKKFKVLGNTDRHSIKKNLIGALLFDSGETAEATRLKRTARRRYTRRKNRICYLQEIFSNEMAKVDDSFFHRLEESFLVEEDKKHERHPIFGNIVDEVAYHEKYPTIYHLRKKLVDSTDKADLRLIYLALAHMIKFRGHFLIEGDLNPDNSDVDKLFIQLVQTYNQLFEENPINASGVDAKAILSARLSKSRRLENLIAQLPGEKKNGLFGNLIALSLGLTPNFKSNFDLAEDAKLQLSKDTYDDDLDNLLAQIGDQYADLFLAAKNLSDAILLSDILRVNTEITKAPLSASMIKRYDEHHQDLTLLKALVRQQLPEKYKEIFFDQSKNGYAGYIDGGASQEEFYKFIKPILEKMDGTEELLVKLNREDLLRKQRTFDNGSIPHQIHLGELHAILRRQEDFYPFLKDNREKIEKILTFRIPYYVGPLARGNSRFAWMTRKSEETITPWNFEEVVDKGASAQSFIERMTNFDKNLPNEKVLPKHSLLYEYFTVYNELTKVKYVTEGMRKPAFLSGEQKKAIVDLLFKTNRKVTVKQLKEDYFKKIECFDSVEISGVEDRFNASLGTYHDLLKIIKDKDFLDNEENEDILEDIVLTLTLFEDREMIEERLKTYAHLFDDKVMKQLKRRRYTGWGRLSRKLINGIRDKQSGKTILDFLKSDGFANRNFMQLIHDDSLTFKEDIQKAQVSGQGDSLHEHIANLAGSPAIKKGILQTVKVVDELVKVMGRHKPENIVIEMARENQTTQKGQKNSRERMKRIEEGIKELGSQILKEHPVENTQLQNEKLYLYYLQNGRDMYVDQELDINRLSDYDVDHIVPQSFLKDDSIDNKVLTRSDKARGKSDNVPSEEVVKKMKNYWRQLLNAKLITQRKFDNLTKAERGGLSELDKAGFIKRQLVETRQITKHVAQILDSRMNTKYDENDKLIREVKVITLKSKLVSDFRKDFQFYKVREINNYHHAHDAYLNAVVGTALIKKYPKLESEFVYGDYKVYDVRKMIAKSEQEIGKATAKYFFYSNIMNFFKTEITLANGEIRKRPLIETNGETGEIVWDKGRDFATVRKVLSMPQVNIVKKTEVQTGGFSKESILPKRNSDKLIARKKDWDPKKYGGFDSPTVAYSVLVVAKVEKGKSKKLKSVKELLGITIMERSSFEKNPIDFLEAKGYKEVKKDLIIKLPKYSLFELENGRKRMLASAGELQKGNELALPSKYVNFLYLASHYEKLKGSPEDNEQKQLFVEQHKHYLDEIIEQISEFSKRVILADANLDKVLSAYNKHRDKPIREQAENIIHLFTLTNLGAPAAFKYFDTTIDRKRYTSTKEVLDATLIHQSITGLYETRIDLSQLGGDGGGGGPAPEAAAKGGMDLLKPLTVERKGVKIKGYWNSQADITCVPKDLLQGEEPVRQQNVTTIHGTQEGDVYYVNLKIDGRRINTEVIGTTLDYAIITPGDVPWILKKPLELTIKLDLEEQQGTLLNNSILSKKGKEELKQLFEKYSALWQSWENQVGHRRIRPHKIATGTVKPTPQKQYHINPKAKPDIQIVINDLLKQGVLIQKESTMNTPVYPVPKPNGRWRMVLDYRAVNKVTPLIAVQNQHSYGILGSLFKGRYKTTIDLSNGFWAHPIVPEDYWITAFTWQGKQYCWTVLPQGFLNSPGLFTGDVVDLLQGIPNVEVYVDDVYISHDSEKEHLEYLDILFNRLKEAGYIISLKKSNIANSIVDFLGFQITNEGRGLTDTFKEKLENITAPTTLKQLQSILGLLNFARNFIPDFTELIAPLYALIPKSTKNYVPWQIEHSTTLETLITKLNGAEYLQGRKGDKTLIMKVNASYTTGYIRYYNEGEKKPISYVSIVFSKTELKFTELEKLLTTVHKGLLKALDLSMGQNIHVYSPIVSMQNIQKTPQTAKKALASRWLSWLSYLEDPRIRFFYDPQMPALKDLPAVDTGKDNKKHPSNFQHIFYTDGSAITSPTKEGHLNAGMGIVYFINKDGNLQKQQEWSISLGNHTAQFAEIAAFEFALKKCLPLGGNILVVTDSNYVAKAYNEELDVWASNGFVNNRKKPLKHISKWKSVADLKRLRPDVVVTHEPGHQKLDSSPHAYGNNLADQLATQASFKVHAGKRTADGSEFEKRTADGSEFESPKKKAKVE

SEQ ID NO: 7465 - protein, 2087 aa, synthetic construct
MPAAKRVKLDGGDKKYSIGLDIGTNSVGWAVITDEYKVPSKKFKVLGNTDRHSIKKNLIGALLFDSGETAEATRLKRTARRRYTRRKNRICYLQEIFSNEMAKVDDSFFHRLEESFLVEEDKKHERHPIFGNIVDEVAYHEKYPTIYHLRKKLVDSTDKADLRLIYLALAHMIKFRGHFLIEGDLNPDNSDVDKLFIQLVQTYNQLFEENPINASGVDAKAILSARLSKSRRLENLIAQLPGEKKNGLFGNLIALSLGLTPNFKSNFDLAEDAKLQLSKDTYDDDLDNLLAQIGDQYADLFLAAKNLSDAILLSDILRVNTEITKAPLSASMIKRYDEHHQDLTLLKALVRQQLPEKYKEIFFDQSKNGYAGYIDGGASQEEFYKFIKPILEKMDGTEELLVKLNREDLLRKQRTFDNGSIPHQIHLGELHAILRRQEDFYPFLKDNREKIEKILTFRIPYYVGPLARGNSRFAWMTRKSEETITPWNFEEVVDKGASAQSFIERMTNFDKNLPNEKVLPKHSLLYEYFTVYNELTKVKYVTEGMRKPAFLSGEQKKAIVDLLFKTNRKVTVKQLKEDYFKKIECFDSVEISGVEDRFNASLGTYHDLLKIIKDKDFLDNEENEDILEDIVLTLTLFEDREMIEERLKTYAHLFDDKVMKQLKRRRYTGWGRLSRKLINGIRDKQSGKTILDFLKSDGFANRNFMQLIHDDSLTFKEDIQKAQVSGQGDSLHEHIANLAGSPAIKKGILQTVKVVDELVKVMGRHKPENIVIEMARENQTTQKGQKNSRERMKRIEEGIKELGSQILKEHPVENTQLQNEKLYLYYLQNGRDMYVDQELDINRLSDYDVDHIVPQSFLKDDSIDNKVLTRSDKARGKSDNVPSEEVVKKMKNYWRQLLNAKLITQRKFDNLTKAERGGLSELDKAGFIKRQLVETRQITKHVAQILDSRMNTKYDENDKLIREVKVITLKSKLVSDFRKDFQFYKVREINNYHHAHDAYLNAVVGTALIKKYPKLESEFVYGDYKVYDVRKMIAKSEQEIGKATAKYFFYSNIMNFFKTEITLANGEIRKRPLIETNGETGEIVWDKGRDFATVRKVLSMPQVNIVKKTEVQTGGFSKESILPKRNSDKLIARKKDWDPKKYGGFDSPTVAYSVLVVAKVEKGKSKKLKSVKELLGITIMERSSFEKNPIDFLEAKGYKEVKKDLIIKLPKYSLFELENGRKRMLASAGELQKGNELALPSKYVNFLYLASHYEKLKGSPEDNEQKQLFVEQHKHYLDEIIEQISEFSKRVILADANLDKVLSAYNKHRDKPIREQAENIIHLFTLTNLGAPAAFKYFDTTIDRKRYTSTKEVLDATLIHQSITGLYETRIDLSQLGGDGGGGGPAPEAAAKGGVPWILKKPLELTIKLDLEEQQGTLLNNSILSKKGKEELKQLFEKYSALWQSWENQVGHRRIRPHKIATGTVKPTPQKQYHINPKAKPDIQIVINDLLKQGVLIQKESTMNTPVYPVPKPNGRWRMVLDYRAVNKVTPLIAVQNQHSYGILGSLFKGRYKTTIDLSNGFWAHPIVPEDYWITAFTWQGKQYCWTVLPQGFLNSPGLFNGDVVDLLQGIPNVEVYVDDVYISHDSEKEHLEYLDILFNRLKEAGYIISLKKSNIANSIVDFLGFQITNEGRGLTDTFKEKLENITAPTTLKQLQSILGLLNFARNFIPDFTELIAPLYALIPKSPKNYVPWQIEHSTTLETLITKLNGAEYLQGRKGDKTLIMKVNASYTTGYIRYYNEGEKKPISYVSIVFSKTELKFTELEKLLTTVHKGLLKALDLSMGQNIHVYSPIVSMQNIQKTPQTAKKALASRWLSWLSYLEDPRIRFFYDPQMPALKDLPAVDTGKDNKKHPSNFQHIFYTDGSAITSPTKEGHLNAGMGIVYFINKDGNLQKQQEWSISLGNHTAQFAEIAAFEFALKKCLPLGGNILVVTDSNYVAKAYNEELDVWASNGFVNNRKKPLKHISKWKSVADLKRLRPDVVVTHEPGHQKLDSSPHAYGNNLADQLATQASFKVHAGKRTADGSEFEKRTADGSEFESPKKKAKVE

SEQ ID NO: 7466 - protein, 2173 aa, synthetic construct
MPAAKRVKLDGGDKKYSIGLDIGTNSVGWAVITDEYKVPSKKFKVLGNTDRHSIKKNLIGALLFDSGETAEATRLKRTARRRYTRRKNRICYLQEIFSNEMAKVDDSFFHRLEESFLVEEDKKHERHPIFGNIVDEVAYHEKYPTIYHLRKKLVDSTDKADLRLIYLALAHMIKFRGHFLIEGDLNPDNSDVDKLFIQLVQTYNQLFEENPINASGVDAKAILSARLSKSRRLENLIAQLPGEKKNGLFGNLIALSLGLTPNFKSNFDLAEDAKLQLSKDTYDDDLDNLLAQIGDQYADLFLAAKNLSDAILLSDILRVNTEITKAPLSASMIKRYDEHHQDLTLLKALVRQQLPEKYKEIFFDQSKNGYAGYIDGGASQEEFYKFIKPILEKMDGTEELLVKLNREDLLRKQRTFDNGSIPHQIHLGELHAILRRQEDFYPFLKDNREKIEKILTFRIPYYVGPLARGNSRFAWMTRKSEETITPWNFEEVVDKGASAQSFIERMTNFDKNLPNEKVLPKHSLLYEYFTVYNELTKVKYVTEGMRKPAFLSGEQKKAIVDLLFKTNRKVTVKQLKEDYFKKIECFDSVEISGVEDRFNASLGTYHDLLKIIKDKDFLDNEENEDILEDIVLTLTLFEDREMIEERLKTYAHLFDDKVMKQLKRRRYTGWGRLSRKLINGIRDKQSGKTILDFLKSDGFANRNFMQLIHDDSLTFKEDIQKAQVSGQGDSLHEHIANLAGSPAIKKGILQTVKVVDELVKVMGRHKPENIVIEMARENQTTQKGQKNSRERMKRIEEGIKELGSQILKEHPVENTQLQNEKLYLYYLQNGRDMYVDQELDINRLSDYDVDHIVPQSFLKDDSIDNKVLTRSDKARGKSDNVPSEEVVKKMKNYWRQLLNAKLITQRKFDNLTKAERGGLSELDKAGFIKRQLVETRQITKHVAQILDSRMNTKYDENDKLIREVKVITLKSKLVSDFRKDFQFYKVREINNYHHAHDAYLNAVVGTALIKKYPKLESEFVYGDYKVYDVRKMIAKSEQEIGKATAKYFFYSNIMNFFKTEITLANGEIRKRPLIETNGETGEIVWDKGRDFATVRKVLSMPQVNIVKKTEVQTGGFSKESILPKRNSDKLIARKKDWDPKKYGGFDSPTVAYSVLVVAKVEKGKSKKLKSVKELLGITIMERSSFEKNPIDFLEAKGYKEVKKDLIIKLPKYSLFELENGRKRMLASAGELQKGNELALPSKYVNFLYLASHYEKLKGSPEDNEQKQLFVEQHKHYLDEIIEQISEFSKRVILADANLDKVLSAYNKHRDKPIREQAENIIHLFTLTNLGAPAAFKYFDTTIDRKRYTSTKEVLDATLIHQSITGLYETRIDLSQLGGDGGGGGPAPEAAAKGGMDLLKPLTVERKGVKIKGYWNSQADITCVPKDLLQGEEPVRQQNVTTIHGTQEGDVYYVNLKIDGRRINTEVIGTTLDYAIITPGDVPWILKKPLELTIKLDLEEQQGTLLNNSILSKKGKEELKQLFEKYSALWQSWENQVGHRRIRPHKIATGTVKPTPQKQYHINPKAKPDIQIVINDLLKQGVLIQKESTMNTPVYPVPKPNGRWRMVLDYRAVNKVTPLIAVQNQHSYGILGSLFKGRYKTTIDLSNGFWAHPIVPEDYWITAFTWQGKQYCWTVLPQGFLNSPGLFNGDVVDLLQGIPNVEVYVDDVYISHDSEKEHLEYLDILFNRLKEAGYIISLKKSNIANSIVDFLGFQITNEGRGLTDTFKEKLENITAPTTLKQLQSILGLLNFARNFIPDFTELIAPLYALIPKSPKNYVPWQIEHSTTLETLITKLNGAEYLQGRKGDKTLIMKVNASYTTGYIRYYNEGEKKPISYVSIVFSKTELKFTELEKLLTTVHKGLLKALDLSMGQNIHVYSPIVSMQNIQKTPQTAKKALASRWLSWLSYLEDPRIRFFYDPQMPALKDLPAVDTGKDNKKHPSNFQHIFYTDGSAITSPTKEGHLNAGMGIVYFINKDGNLQKQQEWSISLGNHTAQFAEIAAFEFALKKCLPLGGNILVVTDSNYVAKAYNEELDVWASNGFVNNRKKPLKHISKWKSVADLKRLRPDVVVTHEPGHQKLDSSPHAYGNNLADQLATQASFKVHAGKRTADGSEFEKRTADGSEFESPKKKAKVE

SEQ ID NO: 7467 - protein, 2094 aa, synthetic construct
MPAAKRVKLDGGDKKYSIGLDIGTNSVGWAVITDEYKVPSKKFKVLGNTDRHSIKKNLIGALLFDSGETAEATRLKRTARRRYTRRKNRICYLQEIFSNEMAKVDDSFFHRLEESFLVEEDKKHERHPIFGNIVDEVAYHEKYPTIYHLRKKLVDSTDKADLRLIYLALAHMIKFRGHFLIEGDLNPDNSDVDKLFIQLVQTYNQLFEENPINASGVDAKAILSARLSKSRRLENLIAQLPGEKKNGLFGNLIALSLGLTPNFKSNFDLAEDAKLQLSKDTYDDDLDNLLAQIGDQYADLFLAAKNLSDAILLSDILRVNTEITKAPLSASMIKRYDEHHQDLTLLKALVRQQLPEKYKEIFFDQSKNGYAGYIDGGASQEEFYKFIKPILEKMDGTEELLVKLNREDLLRKQRTFDNGSIPHQIHLGELHAILRRQEDFYPFLKDNREKIEKILTFRIPYYVGPLARGNSRFAWMTRKSEETITPWNFEEVVDKGASAQSFIERMTNFDKNLPNEKVLPKHSLLYEYFTVYNELTKVKYVTEGMRKPAFLSGEQKKAIVDLLFKTNRKVTVKQLKEDYFKKIECFDSVEISGVEDRFNASLGTYHDLLKIIKDKDFLDNEENEDILEDIVLTLTLFEDREMIEERLKTYAHLFDDKVMKQLKRRRYTGWGRLSRKLINGIRDKQSGKTILDFLKSDGFANRNFMQLIHDDSLTFKEDIQKAQVSGQGDSLHEHIANLAGSPAIKKGILQTVKVVDELVKVMGRHKPENIVIEMARENQTTQKGQKNSRERMKRIEEGIKELGSQILKEHPVENTQLQNEKLYLYYLQNGRDMYVDQELDINRLSDYDVDHIVPQSFLKDDSIDNKVLTRSDKARGKSDNVPSEEVVKKMKNYWRQLLNAKLITQRKFDNLTKAERGGLSELDKAGFIKRQLVETRQITKHVAQILDSRMNTKYDENDKLIREVKVITLKSKLVSDFRKDFQFYKVREINNYHHAHDAYLNAVVGTALIKKYPKLESEFVYGDYKVYDVRKMIAKSEQEIGKATAKYFFYSNIMNFFKTEITLANGEIRKRPLIETNGETGEIVWDKGRDFATVRKVLSMPQVNIVKKTEVQTGGFSKESILPKRNSDKLIARKKDWDPKKYGGFDSPTVAYSVLVVAKVEKGKSKKLKSVKELLGITIMERSSFEKNPIDFLEAKGYKEVKKDLIIKLPKYSLFELENGRKRMLASAGELQKGNELALPSKYVNFLYLASHYEKLKGSPEDNEQKQLFVEQHKHYLDEIIEQISEFSKRVILADANLDKVLSAYNKHRDKPIREQAENIIHLFTLTNLGAPAAFKYFDTTIDRKRYTSTKEVLDATLIHQSITGLYETRIDLSQLGGDGGGGGPAPEAAAKGGVLNLEEEYRLHEKPVPSSIDPSWLQLFPTVWAERAGMGLANQVPPVVVELRSGASPVAVRQYPMSKEAREGIRPHIQKFLDLGVLVPCRSPWNTPLLPVKKPGTNDYRPVQDLREINKRVQDIHPTVPNPYNLLSSLPPSYTWYSVLDLKDAFFCLRLHPNSQPLFAFEWKDPEKGNTGQLTWTRLPQGFKNSPTLFNEALHRDLAPFRALNPQVVLLQYVDDLLVAAPTYEDCKKGTQKLLQELSKLGYRVSAKKAQLCQREVTYLGYLLKEGKRWLTPARKATVMKIPVPTTPRQVREFLGKAGFCRLFIPGFASLAAPLYPLTKPSIPFIWTEEHQQAFDHIKKALLSAPALALPDLTKPFTLYIDERAGVARGVLTQTLGPWRRPVAYLSKKLDPVASGWPTCLKAVAAVALLLKDADKLTLGQNVTVIASHSLESIVRQPPDRWMTNARMTHYQSLLLNERVSFAPPAVLNPATLLPVESEATPVHRCSEILAEETGTRRDLEDQPLPGVPTWYTDGSSFITEGKRRAGAPIVDGKRTVWASSLPEGTSAQKAELVALTQALRLAEGKNINIYTDSRYAFATAHIHGAIYKQRGWLTSAGKDIKNKEEILALLEAIHLPRRVAIIHCPGHQRGSNPVATGNRRADEAAKQAALSTRVLAGTTKPAGKRTADGSEFEKRTADGSEFESPKKKAKVE

SEQ ID NO: 7468 - protein, 2009 aa, synthetic construct
MPAAKRVKLDGGDKKYSIGLDIGTNSVGWAVITDEYKVPSKKFKVLGNTDRHSIKKNLIGALLFDSGETAEATRLKRTARRRYTRRKNRICYLQEIFSNEMAKVDDSFFHRLEESFLVEEDKKHERHPIFGNIVDEVAYHEKYPTIYHLRKKLVDSTDKADLRLIYLALAHMIKFRGHFLIEGDLNPDNSDVDKLFIQLVQTYNQLFEENPINASGVDAKAILSARLSKSRRLENLIAQLPGEKKNGLFGNLIALSLGLTPNFKSNFDLAEDAKLQLSKDTYDDDLDNLLAQIGDQYADLFLAAKNLSDAILLSDILRVNTEITKAPLSASMIKRYDEHHQDLTLLKALVRQQLPEKYKEIFFDQSKNGYAGYIDGGASQEEFYKFIKPILEKMDGTEELLVKLNREDLLRKQRTFDNGSIPHQIHLGELHAILRRQEDFYPFLKDNREKIEKILTFRIPYYVGPLARGNSRFAWMTRKSEETITPWNFEEVVDKGASAQSFIERMTNFDKNLPNEKVLPKHSLLYEYFTVYNELTKVKYVTEGMRKPAFLSGEQKKAIVDLLFKTNRKVTVKQLKEDYFKKIECFDSVEISGVEDRFNASLGTYHDLLKIIKDKDFLDNEENEDILEDIVLTLTLFEDREMIEERLKTYAHLFDDKVMKQLKRRRYTGWGRLSRKLINGIRDKQSGKTILDFLKSDGFANRNFMQLIHDDSLTFKEDIQKAQVSGQGDSLHEHIANLAGSPAIKKGILQTVKVVDELVKVMGRHKPENIVIEMARENQTTQKGQKNSRERMKRIEEGIKELGSQILKEHPVENTQLQNEKLYLYYLQNGRDMYVDQELDINRLSDYDVDHIVPQSFLKDDSIDNKVLTRSDKARGKSDNVPSEEVVKKMKNYWRQLLNAKLITQRKFDNLTKAERGGLSELDKAGFIKRQLVETRQITKHVAQILDSRMNTKYDENDKLIREVKVITLKSKLVSDFRKDFQFYKVREINNYHHAHDAYLNAVVGTALIKKYPKLESEFVYGDYKVYDVRKMIAKSEQEIGKATAKYFFYSNIMNFFKTEITLANGEIRKRPLIETNGETGEIVWDKGRDFATVRKVLSMPQVNIVKKTEVQTGGFSKESILPKRNSDKLIARKKDWDPKKYGGFDSPTVAYSVLVVAKVEKGKSKKLKSVKELLGITIMERSSFEKNPIDFLEAKGYKEVKKDLIIKLPKYSLFELENGRKRMLASAGELQKGNELALPSKYVNFLYLASHYEKLKGSPEDNEQKQLFVEQHKHYLDEIIEQISEFSKRVILADANLDKVLSAYNKHRDKPIREQAENIIHLFTLTNLGAPAAFKYFDTTIDRKRYTSTKEVLDATLIHQSITGLYETRIDLSQLGGDGGGGGPAPEAAAKGGHLPPPPQVDQFPLNLPERLQALNDLVSKALEAGHIEPYSGPGNNPVFPVKKPNGKWRFIHDLRATNAITTTLTSPSPGPPDLTSLPTALPHLQTIDLTDAFFQIPLPKQYQPYFAFTIPQPCNYGPGTRYAWTVLPQGFKNSPTLFQQQLAAVLNPMRKMFPTSTIVQYMDDILLASPTNEELQQLSQLTLQALTTHGLPISQEKTQQTPGQIRFLGQVISPNHITYESTPTIPIKSQWTLTELQVILGEIQWVSKGTPILRKHLQSLYSALHPYRDPRACITLTPQQLHALHAIQQALQHNCRGRLNPALPLLGLISLSTSGTTSVIFQPKQNWPLAWLHTPHPPTSLCPWGHLLACTILTLDKYTLQHYGQLCQSFHHNMSKQALCDFLRNSPHPSVGILIHHMGRFHNLGSQPSGPWKTLLHLPTLLQEPRLLRPIFTLSPVVLDTAPCLFSDGSPQKAAYVLWDQTILQQDITPLPSHETHSAQKGELLALICGLRAAKPWPSLNIFLDSKYLIKYLHSLAIGAFLGTSAHQTLQAALPPLLQGKTIYLHHVRSHTNLPDPISTFNEYTDSLILAPLVPLAGKRTADGSEFEKRTADGSEFESPKKKAKVE

SEQ ID NO: 7469 - protein, 2127 aa, synthetic construct
MPAAKRVKLDGGDKKYSIGLDIGTNSVGWAVITDEYKVPSKKFKVLGNTDRHSIKKNLIGALLFDSGETAEATRLKRTARRRYTRRKNRICYLQEIFSNEMAKVDDSFFHRLEESFLVEEDKKHERHPIFGNIVDEVAYHEKYPTIYHLRKKLVDSTDKADLRLIYLALAHMIKFRGHFLIEGDLNPDNSDVDKLFIQLVQTYNQLFEENPINASGVDAKAILSARLSKSRRLENLIAQLPGEKKNGLFGNLIALSLGLTPNFKSNFDLAEDAKLQLSKDTYDDDLDNLLAQIGDQYADLFLAAKNLSDAILLSDILRVNTEITKAPLSASMIKRYDEHHQDLTLLKALVRQQLPEKYKEIFFDQSKNGYAGYIDGGASQEEFYKFIKPILEKMDGTEELLVKLNREDLLRKQRTFDNGSIPHQIHLGELHAILRRQEDFYPFLKDNREKIEKILTFRIPYYVGPLARGNSRFAWMTRKSEETITPWNFEEVVDKGASAQSFIERMTNFDKNLPNEKVLPKHSLLYEYFTVYNELTKVKYVTEGMRKPAFLSGEQKKAIVDLLFKTNRKVTVKQLKEDYFKKIECFDSVEISGVEDRFNASLGTYHDLLKIIKDKDFLDNEENEDILEDIVLTLTLFEDREMIEERLKTYAHLFDDKVMKQLKRRRYTGWGRLSRKLINGIRDKQSGKTILDFLKSDGFANRNFMQLIHDDSLTFKEDIQKAQVSGQGDSLHEHIANLAGSPAIKKGILQTVKVVDELVKVMGRHKPENIVIEMARENQTTQKGQKNSRERMKRIEEGIKELGSQILKEHPVENTQLQNEKLYLYYLQNGRDMYVDQELDINRLSDYDVDHIVPQSFLKDDSIDNKVLTRSDKARGKSDNVPSEEVVKKMKNYWRQLLNAKLITQRKFDNLTKAERGGLSELDKAGFIKRQLVETRQITKHVAQILDSRMNTKYDENDKLIREVKVITLKSKLVSDFRKDFQFYKVREINNYHHAHDAYLNAVVGTALIKKYPKLESEFVYGDYKVYDVRKMIAKSEQEIGKATAKYFFYSNIMNFFKTEITLANGEIRKRPLIETNGETGEIVWDKGRDFATVRKVLSMPQVNIVKKTEVQTGGFSKESILPKRNSDKLIARKKDWDPKKYGGFDSPTVAYSVLVVAKVEKGKSKKLKSVKELLGITIMERSSFEKNPIDFLEAKGYKEVKKDLIIKLPKYSLFELENGRKRMLASAGELQKGNELALPSKYVNFLYLASHYEKLKGSPEDNEQKQLFVEQHKHYLDEIIEQISEFSKRVILADANLDKVLSAYNKHRDKPIREQAENIIHLFTLTNLGAPAAFKYFDTTIDRKRYTSTKEVLDATLIHQSITGLYETRIDLSQLGGDGGGGGPAPEAAAKGGLLGRDLLTKLKAQIQFSTEGPQVTWEDRPAMCLVLNLEEEYRLHEKPVPPSIDPSWLQLFPMVWAEKAGMGLANQVPPVVVELKSDASPVAVRQYPMSKEAREGIRPHIQRFLDLGILVPCQSPWNTPLLPVKKPGTNDYRPVQDLREVNKRVQDIHPTVPNPYNLLSSLPPSHTWYSVLDLKDAFFCLKLHPNSQPLFAFEWRDPEKGNTGQLTWTRLPQGFKNSPTLFNEALHRDLASFRALNPQVVMLQYVDDLLVAAPTYRDCKEGTRRLLQELSKLGYRVSAKKAQLCREEVTYLGYLLKGGKRWLTPARKATVMKIPTPTTPRQVREFLGTAGFCRLWIPGFASLAAPLYPLTRPKVPFTWTEAHQEAFGRIKEALLSAPALALPDLTKPFALYVDEKEGVARGVLTQTLGPWRRPVAYLSKKLDPVASGWPTCLKAIAAVALLLKDADKLTLGQNVLVIAPHNLESIVRQPPDRWMTNARMTHYQSLLLNERVSFAPPAILNPATLLPVESDDTPIHICSEILAEETGTRPDLRDQPLPGVPAWYTDGSSFIMDGRRQAGAAIVDNKRTVWASNLPEGTSAQKAELIALTQALRLAEGKSINIYTDSRYAFATAHVHGAIYKQRGWLTSAGKDIKNKEEILALLEAIHLPKRVAIIHCPGHQRGTDPVATGNRKADEAAKQAAQSTRILTETTKNAGKRTADGSEFEKRTADGSEFESPKKKAKVE

SEQ ID NO: 7470 - protein, 2127 aa, synthetic construct
MPAAKRVKLDGGDKKYSIGLDIGTNSVGWAVITDEYKVPSKKFKVLGNTDRHSIKKNLIGALLFDSGETAEATRLKRTARRRYTRRKNRICYLQEIFSNEMAKVDDSFFHRLEESFLVEEDKKHERHPIFGNIVDEVAYHEKYPTIYHLRKKLVDSTDKADLRLIYLALAHMIKFRGHFLIEGDLNPDNSDVDKLFIQLVQTYNQLFEENPINASGVDAKAILSARLSKSRRLENLIAQLPGEKKNGLFGNLIALSLGLTPNFKSNFDLAEDAKLQLSKDTYDDDLDNLLAQIGDQYADLFLAAKNLSDAILLSDILRVNTEITKAPLSASMIKRYDEHHQDLTLLKALVRQQLPEKYKEIFFDQSKNGYAGYIDGGASQEEFYKFIKPILEKMDGTEELLVKLNREDLLRKQRTFDNGSIPHQIHLGELHAILRRQEDFYPFLKDNREKIEKILTFRIPYYVGPLARGNSRFAWMTRKSEETITPWNFEEVVDKGASAQSFIERMTNFDKNLPNEKVLPKHSLLYEYFTVYNELTKVKYVTEGMRKPAFLSGEQKKAIVDLLFKTNRKVTVKQLKEDYFKKIECFDSVEISGVEDRFNASLGTYHDLLKIIKDKDFLDNEENEDILEDIVLTLTLFEDREMIEERLKTYAHLFDDKVMKQLKRRRYTGWGRLSRKLINGIRDKQSGKTILDFLKSDGFANRNFMQLIHDDSLTFKEDIQKAQVSGQGDSLHEHIANLAGSPAIKKGILQTVKVVDELVKVMGRHKPENIVIEMARENQTTQKGQKNSRERMKRIEEGIKELGSQILKEHPVENTQLQNEKLYLYYLQNGRDMYVDQELDINRLSDYDVDHIVPQSFLKDDSIDNKVLTRSDKARGKSDNVPSEEVVKKMKNYWRQLLNAKLITQRKFDNLTKAERGGLSELDKAGFIKRQLVETRQITKHVAQILDSRMNTKYDENDKLIREVKVITLKSKLVSDFRKDFQFYKVREINNYHHAHDAYLNAVVGTALIKKYPKLESEFVYGDYKVYDVRKMIAKSEQEIGKATAKYFFYSNIMNFFKTEITLANGEIRKRPLIETNGETGEIVWDKGRDFATVRKVLSMPQVNIVKKTEVQTGGFSKESILPKRNSDKLIARKKDWDPKKYGGFDSPTVAYSVLVVAKVEKGKSKKLKSVKELLGITIMERSSFEKNPIDFLEAKGYKEVKKDLIIKLPKYSLFELENGRKRMLASAGELQKGNELALPSKYVNFLYLASHYEKLKGSPEDNEQKQLFVEQHKHYLDEIIEQISEFSKRVILADANLDKVLSAYNKHRDKPIREQAENIIHLFTLTNLGAPAAFKYFDTTIDRKRYTSTKEVLDATLIHQSITGLYETRIDLSQLGGDGGGGGPAPEAAAKGGLLGRDLLTKLKAQIQFSTEGPQVTWEDRPAMCLVLNLEEEYRLHEKPVPPSIDPSWLQLFPMVWAEKAGMGLANQVPPVVVELKSDASPVAVRQYPMSKEAREGIRPHIQRFLDLGILVPCQSPWNTPLLPVKKPGTNDYRPVQDLREVNKRVQDIHPTVPNPYNLLSSLPPSHTWYSVLDLKDAFFCLKLHPNSQPLFAFEWRDPEKGNTGQLTWTRLPQGFKNSPTLFNEALHRDLASFRALNPQVVMLQYVDDLLVAAPTYRDCKEGTRRLLQELSKLGYRVSAKKAQLCREEVTYLGYLLKGGKRWLTPARKATVMKIPTPTTPRQVREFLGKAGFCRLFIPGFASLAAPLYPLTRPKVPFTWTEAHQEAFGRIKEALLSAPALALPDLTKPFALYVDEKEGVARGVLTQTLGPWRRPVAYLSKKLDPVASGWPTCLKAIAAVALLLKDADKLTLGQNVLVIAPHNLESIVRQPPDRWMTNARMTHYQSLLLNERVSFAPPAILNPATLLPVESDDTPIHICSEILAEETGTRPDLRDQPLPGVPAWYTDGSSFIMDGRRQAGAAIVDNKRTVWASNLPEGTSAQKAELIALTQALRLAEGKSINIYTDSRYAFATAHVHGAIYKQRGWLTSAGKDIKNKEEILALLEAIHLPKRVAIIHCPGHQRGTDPVATGNRKADEAAKQAAQSTRILTETTKNAGKRTADGSEFEKRTADGSEFESPKKKAKVE

SEQ ID NO: 7471 - protein, 2096 aa, synthetic construct
MPAAKRVKLDGGDKKYSIGLDIGTNSVGWAVITDEYKVPSKKFKVLGNTDRHSIKKNLIGALLFDSGETAEATRLKRTARRRYTRRKNRICYLQEIFSNEMAKVDDSFFHRLEESFLVEEDKKHERHPIFGNIVDEVAYHEKYPTIYHLRKKLVDSTDKADLRLIYLALAHMIKFRGHFLIEGDLNPDNSDVDKLFIQLVQTYNQLFEENPINASGVDAKAILSARLSKSRRLENLIAQLPGEKKNGLFGNLIALSLGLTPNFKSNFDLAEDAKLQLSKDTYDDDLDNLLAQIGDQYADLFLAAKNLSDAILLSDILRVNTEITKAPLSASMIKRYDEHHQDLTLLKALVRQQLPEKYKEIFFDQSKNGYAGYIDGGASQEEFYKFIKPILEKMDGTEELLVKLNREDLLRKQRTFDNGSIPHQIHLGELHAILRRQEDFYPFLKDNREKIEKILTFRIPYYVGPLARGNSRFAWMTRKSEETITPWNFEEVVDKGASAQSFIERMTNFDKNLPNEKVLPKHSLLYEYFTVYNELTKVKYVTEGMRKPAFLSGEQKKAIVDLLFKTNRKVTVKQLKEDYFKKIECFDSVEISGVEDRFNASLGTYHDLLKIIKDKDFLDNEENEDILEDIVLTLTLFEDREMIEERLKTYAHLFDDKVMKQLKRRRYTGWGRLSRKLINGIRDKQSGKTILDFLKSDGFANRNFMQLIHDDSLTFKEDIQKAQVSGQGDSLHEHIANLAGSPAIKKGILQTVKVVDELVKVMGRHKPENIVIEMARENQTTQKGQKNSRERMKRIEEGIKELGSQILKEHPVENTQLQNEKLYLYYLQNGRDMYVDQELDINRLSDYDVDHIVPQSFLKDDSIDNKVLTRSDKARGKSDNVPSEEVVKKMKNYWRQLLNAKLITQRKFDNLTKAERGGLSELDKAGFIKRQLVETRQITKHVAQILDSRMNTKYDENDKLIREVKVITLKSKLVSDFRKDFQFYKVREINNYHHAHDAYLNAVVGTALIKKYPKLESEFVYGDYKVYDVRKMIAKSEQEIGKATAKYFFYSNIMNFFKTEITLANGEIRKRPLIETNGETGEIVWDKGRDFATVRKVLSMPQVNIVKKTEVQTGGFSKESILPKRNSDKLIARKKDWDPKKYGGFDSPTVAYSVLVVAKVEKGKSKKLKSVKELLGITIMERSSFEKNPIDFLEAKGYKEVKKDLIIKLPKYSLFELENGRKRMLASAGELQKGNELALPSKYVNFLYLASHYEKLKGSPEDNEQKQLFVEQHKHYLDEIIEQISEFSKRVILADANLDKVLSAYNKHRDKPIREQAENIIHLFTLTNLGAPAAFKYFDTTIDRKRYTSTKEVLDATLIHQSITGLYETRIDLSQLGGDGGGGGPAPEAAAKGGLGIEDEYRLHETSTEPDVSLGSTWLSDFPQAWAETGGMGLAVRQAPLIIPLKATSTPVSIQQYPMSHEARLGIKPHIQRLLDQGILVPCQSPWNTPLLPVKKPGTNDYRPVQDLREVNKRVEDIHPTVPNPYNLLSGLPPSHQWYTVLDLKDAFFCLRLHPTSQPLFAFEWRDPGMGISGQLTWTRLPQGFKNSPTLFNEALHRDLADFRIQHPDLILLQYVDDILLAATSELDCQQGTRALLQTLGDLGYRASAKKAQICQKQVKYLGYLLREGQRWLTEARKETVMGQPVPKTPRQLREFLGKAGFCRLFIPGFAEMAAPLYPLTKPGTLFSWGPDQQKAYQEIKQALLTAPALGLPDLTKPFELFVDEKQGYAKGVLTQKLGPWRRPVAYLSKKLDPVAAGWPPCLRMVAAIAVLTKDAGKLTMGQPLVILAPHAVEALVKQPPDRWLSNARMTHYQAMLLDTDRVQFGPVVALNPATLLPLPEEGAPHDCLEILAETHGTRPDLTDQPIPDADHTWYTDGSSFLQEGQRKAGAAVTTETEVIWAGALPAGTSAQRAELIALTQALKMAEGKRLNVYTDSRYAFATAHIHGEIYRRRGWLTSEGREIKNKSEILALLKALFLPKRLSIIHCLGHQKGDSAEARGNRLADQAAREAAIKTPPDTSTLLIAGKRTADGSEFEKRTADGSEFESPKKKAKVE

SEQ ID NO: 7472 - protein, 2096 aa, synthetic construct
MPAAKRVKLDGGDKKYSIGLDIGTNSVGWAVITDEYKVPSKKFKVLGNTDRHSIKKNLIGALLFDSGETAEATRLKRTARRRYTRRKNRICYLQEIFSNEMAKVDDSFFHRLEESFLVEEDKKHERHPIFGNIVDEVAYHEKYPTIYHLRKKLVDSTDKADLRLIYLALAHMIKFRGHFLIEGDLNPDNSDVDKLFIQLVQTYNQLFEENPINASGVDAKAILSARLSKSRRLENLIAQLPGEKKNGLFGNLIALSLGLTPNFKSNFDLAEDAKLQLSKDTYDDDLDNLLAQIGDQYADLFLAAKNLSDAILLSDILRVNTEITKAPLSASMIKRYDEHHQDLTLLKALVRQQLPEKYKEIFFDQSKNGYAGYIDGGASQEEFYKFIKPILEKMDGTEELLVKLNREDLLRKQRTFDNGSIPHQIHLGELHAILRRQEDFYPFLKDNREKIEKILTFRIPYYVGPLARGNSRFAWMTRKSEETITPWNFEEVVDKGASAQSFIERMTNFDKNLPNEKVLPKHSLLYEYFTVYNELTKVKYVTEGMRKPAFLSGEQKKAIVDLLFKTNRKVTVKQLKEDYFKKIECFDSVEISGVEDRFNASLGTYHDLLKIIKDKDFLDNEENEDILEDIVLTLTLFEDREMIEERLKTYAHLFDDKVMKQLKRRRYTGWGRLSRKLINGIRDKQSGKTILDFLKSDGFANRNFMQLIHDDSLTFKEDIQKAQVSGQGDSLHEHIANLAGSPAIKKGILQTVKVVDELVKVMGRHKPENIVIEMARENQTTQKGQKNSRERMKRIEEGIKELGSQILKEHPVENTQLQNEKLYLYYLQNGRDMYVDQELDINRLSDYDVDHIVPQSFLKDDSIDNKVLTRSDKARGKSDNVPSEEVVKKMKNYWRQLLNAKLITQRKFDNLTKAERGGLSELDKAGFIKRQLVETRQITKHVAQILDSRMNTKYDENDKLIREVKVITLKSKLVSDFRKDFQFYKVREINNYHHAHDAYLNAVVGTALIKKYPKLESEFVYGDYKVYDVRKMIAKSEQEIGKATAKYFFYSNIMNFFKTEITLANGEIRKRPLIETNGETGEIVWDKGRDFATVRKVLSMPQVNIVKKTEVQTGGFSKESILPKRNSDKLIARKKDWDPKKYGGFDSPTVAYSVLVVAKVEKGKSKKLKSVKELLGITIMERSSFEKNPIDFLEAKGYKEVKKDLIIKLPKYSLFELENGRKRMLASAGELQKGNELALPSKYVNFLYLASHYEKLKGSPEDNEQKQLFVEQHKHYLDEIIEQISEFSKRVILADANLDKVLSAYNKHRDKPIREQAENIIHLFTLTNLGAPAAFKYFDTTIDRKRYTSTKEVLDATLIHQSITGLYETRIDLSQLGGDGGGGGPAPEAAAKGGTLGIEDEYRLHETSTEPDVSLGSTWLSDFPQAWAETGGMGLAVRQAPLIIPLKATSTPVSIQQYPMSHEARLGIKPHIQRLLDQGILVPCQSPWNTPLLPVKKPGTNDYRPVQDLREVNKRVEDIHPTVPNPYNLLSGLPPSHQWYTVLDLKDAFFCLRLHPTSQPLFAFEWRDPGMGISGQLTWTRLPQGFKNSPTLFNEALHRDLADFRIQHPDLILLQYVDDILLAATSELDCQQGTRALLQTLGDLGYRASAKKAQICQKQVKYLGYLLREGQRWLTEARKETVMGQPVPKTPRQLREFLGTAGFCRLWIPGFAEMAAPLYPLTKPGTLFSWGPDQQKAYQEIKQALLTAPALGLPDLTKPFELFVDEKQGYAKGVLTQKLGPWRRPVAYLSKKLDPVAAGWPPCLRMVAAIAVLTKDAGKLTMGQPLVILAPHAVEALVKQPPDRWLSNARMTHYQAMLLDTDRVQFGPVVALNPATLLPLPEEGAPHDCLEILAETHGTRPDLTDQPIPDADHTWYTDGSSFLQEGQRKAGAAVTTETEVIWAGALPAGTSAQRAELIALTQALKMAEGKRLNVYTDSRYAFATAHIHGEIYRRRGWLTSEGREIKNKSEILALLKALFLPKRLSIIHCLGHQKGDSAEARGNRLADQAAREAAIKTPPDTSTLLAGKRTADGSEFEKRTADGSEFESPKKKAKVE

SEQ ID NO: 7473 - protein, 2096 aa, synthetic construct; identical to SEQ ID NO: 7471

SEQ ID NO: 7474 - protein, 2096 aa, synthetic construct; identical to SEQ ID NO: 7472

SEQ ID NO: 7475 - protein, 2096 aa, synthetic construct
MPAAKRVKLDGGDKKYSIGLDIGTNSVGWAVITDEYKVPSKKFKVLGNTDRHSIKKNLIGALLFDSGETAEATRLKRTARRRYTRRKNRICYLQEIFSNEMAKVDDSFFHRLEESFLVEEDKKHERHPIFGNIVDEVAYHEKYPTIYHLRKKLVDSTDKADLRLIYLALAHMIKFRGHFLIEGDLNPDNSDVDKLFIQLVQTYNQLFEENPINASGVDAKAILSARLSKSRRLENLIAQLPGEKKNGLFGNLIALSLGLTPNFKSNFDLAEDAKLQLSKDTYDDDLDNLLAQIGDQYADLFLAAKNLSDAILLSDILRVNTEITKAPLSASMIKRYDEHHQDLTLLKALVRQQLPEKYKEIFFDQSKNGYAGYIDGGASQEEFYKFIKPILEKMDGTEELLVKLNREDLLRKQRTFDNGSIPHQIHLGELHAILRRQEDFYPFLKDNREKIEKILTFRIPYYVGPLARGNSRFAWMTRKSEETITPWNFEEVVDKGASAQSFIERMTNFDKNLPNEKVLPKHSLLYEYFTVYNELTKVKYVTEGMRKPAFLSGEQKKAIVDLLFKTNRKVTVKQLKEDYFKKIECFDSVEISGVEDRFNASLGTYHDLLKIIKDKDFLDNEENEDILEDIVLTLTLFEDREMIEERLKTYAHLFDDKVMKQLKRRRYTGWGRLSRKLINGIRDKQSGKTILDFLKSDGFANRNFMQLIHDDSLTFKEDIQKAQVSGQGDSLHEHIANLAGSPAIKKGILQTVKVVDELVKVMGRHKPENIVIEMARENQTTQKGQKNSRERMKRIEEGIKELGSQILKEHPVENTQLQNEKLYLYYLQNGRDMYVDQELDINRLSDYDVDHIVPQSFLKDDSIDNKVLTRSDKARGKSDNVPSEEVVKKMKNYWRQLLNAKLITQRKFDNLTKAERGGLSELDKAGFIKRQLVETRQITKHVAQILDSRMNTKYDENDKLIREVKVITLKSKLVSDFRKDFQFYKVREINNYHHAHDAYLNAVVGTALIKKYPKLESEFVYGDYKVYDVRKMIAKSEQEIGKATAKYFFYSNIMNFFKTEITLANGEIRKRPLIETNGETGEIVWDKGRDFATVRKVLSMPQVNIVKKTEVQTGGFSKESILPKRNSDKLIARKKDWDPKKYGGFDSPTVAYSVLVVAKVEKGKSKKLKSVKELLGITIMERSSFEKNPIDFLEAKGYKEVKKDLIIKLPKYSLFELENGRKRMLASAGELQKGNELALPSKYVNFLYLASHYEKLKGSPEDNEQKQLFVEQHKHYLDEIIEQISEFSKRVILADANLDKVLSAYNKHRDKPIREQAENIIHLFTLTNLGAPAAFKYFDTTIDRKRYTSTKEVLDATLIHQSITGLYETRIDLSQLGGDGGGGGPAPEAAAKGGTLNIEDEYRLHETSKEPDVSLGSTWLSDFPQAWAETGGMGLAVRQAPLIIPLKATSTPVSIKQYPMSQEARLGIKPHIQRLLDQGILVPCQSPWNTPLLPVKKPGTNDYRPVQDLREVNKRVEDIHPTVPNPYNLLSGLPPSHQWYTVLDLKDAFFCLRLHPTSQPLFAFEWRDPEMGISGQLTWTRLPQGFKNSPTLFNEALHRDLAGFRIQHPDLILLQYVDDLLLAATSELDCQQGTRALLQTLGDLGYRASAKKAQICQKQVKYLGYLLKEGQRWLTEARKETVMGQPIPKTPRQLREFLGTAGFCRLWIPGFAEMAAPLYPLTKPGTLFNWGPDQQKAFQEIKQALLTAPALGLPDLTKPFELFVDEKQGYAKGVLTQKLGPWRRPVAYLSKKLDPVAAGWPPCLRMVAAIAVLTKDAGKLTMGQPLVILAPHAVEALVKQPPDRWLSNARMTHYQALLLDTDRVQFGPVVALNPATLLPLPEEGLQHDCLDILAEAHGTRSDLMDQPLPDADHTWYTDGSSFLQEGQRKAGAAVTTETEVIWARALPAGTSAQRAELIALTQALKMAEGKKLNVYTDSRYAFATAHIHGEIYRRRGWLTSEGKEIKNKDEILALLKALFLPKRLSIIHCPGHQKGNSAEARGNRMADQAAREVATRETPETSTLLAGKRTADGSEFEKRTADGSEFESPKKKAKVE

SEQ ID NO: 7476 - protein, 2096 aa, synthetic construct; identical to SEQ ID NO: 4534

SEQ ID NO: 7477 - protein, 2096 aa, synthetic construct
MPAAKRVKLDGGDKKYSIGLDIGTNSVGWAVITDEYKVPSKKFKVLGNTDRHSIKKNLIGALLFDSGETAEATRLKRTARRRYTRRKNRICYLQEIFSNEMAKVDDSFFHRLEESFLVEEDKKHERHPIFGNIVDEVAYHEKYPTIYHLRKKLVDSTDKADLRLIYLALAHMIKFRGHFLIEGDLNPDNSDVDKLFIQLVQTYNQLFEENPINASGVDAKAILSARLSKSRRLENLIAQLPGEKKNGLFGNLIALSLGLTPNFKSNFDLAEDAKLQLSKDTYDDDLDNLLAQIGDQYADLFLAAKNLSDAILLSDILRVNTEITKAPLSASMIKRYDEHHQDLTLLKALVRQQLPEKYKEIFFDQSKNGYAGYIDGGASQEEFYKFIKPILEKMDGTEELLVKLNREDLLRKQRTFDNGSIPHQIHLGELHAILRRQEDFYPFLKDNREKIEKILTFRIPYYVGPLARGNSRFAWMTRKSEETITPWNFEEVVDKGASAQSFIERMTNFDKNLPNEKVLPKHSLLYEYFTVYNELTKVKYVTEGMRKPAFLSGEQKKAIVDLLFKTNRKVTVKQLKEDYFKKIECFDSVEISGVEDRFNASLGTYHDLLKIIKDKDFLDNEENEDILEDIVLTLTLFEDREMIEERLKTYAHLFDDKVMKQLKRRRYTGWGRLSRKLINGIRDKQSGKTILDFLKSDGFANRNFMQLIHDDSLTFKEDIQKAQVSGQGDSLHEHIANLAGSPAIKKGILQTVKVVDELVKVMGRHKPENIVIEMARENQTTQKGQKNSRERMKRIEEGIKELGSQILKEHPVENTQLQNEKLYLYYLQNGRDMYVDQELDINRLSDYDVDHIVPQSFLKDDSIDNKVLTRSDKARGKSDNVPSEEVVKKMKNYWRQLLNAKLITQRKFDNLTKAERGGLSELDKAGFIKRQLVETRQITKHVAQILDSRMNTKYDENDKLIREVKVITLKSKLVSDFRKDFQFYKVREINNYHHAHDAYLNAVVGTALIKKYPKLESEFVYGDYKVYDVRKMIAKSEQEIGKATAKYFFYSNIMNFFKTEITLANGEIRKRPLIETNGETGEIVWDKGRDFATVRKVLSMPQVNIVKKTEVQTGGFSKESILPKRNSDKLIARKKDWDPKKYGGFDSPTVAYSVLVVAKVEKGKSKKLKSVKELLGITIMERSSFEKNPIDFLEAKGYKEVKKDLIIKLPKYSLFELENGRKRMLASAGELQKGNELALPSKYVNFLYLASHYEKLKGSPEDNEQKQLFVEQHKHYLDEIIEQISEFSKRVILADANLDKVLSAYNKHRDKPIREQAENIIHLFTLTNLGAPAAFKYFDTTIDRKRYTSTKEVLDATLIHQSITGLYETRIDLSQLGGDGGGGGPAPEAAAKGGTLNIEDEHRLHETSKEPDVSLGSTWLSDFPQAWAETGGMGLAVRQAPLIIPLKATSTPVSIKQYPMSQEARLGIKPHIQRLLDQGILVPCQSPWNTPLLPVKKPGTNDYRPVQDLREVNKRVEDIHPTVPNPYNLLSGLPPSHQWYTVLDLKDAFFCLRLHPTSQPLFAFEWRDPEMGISGQLTWTRLPQGFKNSPTLFDEALHRDLADFRIQHPDLILLQYVDDLLLAATSELDCQQGTRALLQTLGNLGYRASAKKAQICQKQVKYLGYLLKEGQRWLTEARKETVMGQPTPKTPRQLREFLGTAGFCRLWIPGFAEMAAPLYPLTKTGTLFNWGPDQQKAYQEIKQALLTAPALGLPDLTKPFELFVDEKQGYAKGVLTQKLGPWRRPVAYLSKKLDPVAAGWPPCLRMVAAIAVLTKDAGKLTMGQPLVILAPHAVEALVKQPPDRWLSNARMTHYQALLLDTDRVQFGPVVALNPATLLPLPEEGLQHNCLDILAEAHGTRPDLTDQPLPDADHTWYTDGSSLLQEGQRKAGAAVTTETEVIWAKALPAGTSAQRAELIALTQALKMAEGKKLNVYTDSRYAFATAHIHGEIYRRRGLLTSEGKEIKNKDEILALLKALFLPKRLSIIHCPGHQKGHSAEARGNRMADQAARKAAITETPDTSTLLAGKRTADGSEFEKRTADGSEFESPKKKAKVE

SEQ ID NO: 7478 - protein, 2096 aa, synthetic construct; identical to SEQ ID NO: 4534

SEQ ID NO: 7479 - protein, 2088 aa, synthetic construct
MPAAKRVKLDGGDKKYSIGLDIGTNSVGWAVITDEYKVPSKKFKVLGNTDRHSIKKNLIGALLFDSGETAEATRLKRTARRRYTRRKNRICYLQEIFSNEMAKVDDSFFHRLEESFLVEEDKKHERHPIFGNIVDEVAYHEKYPTIYHLRKKLVDSTDKADLRLIYLALAHMIKFRGHFLIEGDLNPDNSDVDKLFIQLVQTYNQLFEENPINASGVDAKAILSARLSKSRRLENLIAQLPGEKKNGLFGNLIALSLGLTPNFKSNFDLAEDAKLQLSKDTYDDDLDNLLAQIGDQYADLFLAAKNLSDAILLSDILRVNTEITKAPLSASMIKRYDEHHQDLTLLKALVRQQLPEKYKEIFFDQSKNGYAGYIDGGASQEEFYKFIKPILEKMDGTEELLVKLNREDLLRKQRTFDNGSIPHQIHLGELHAILRRQEDFYPFLKDNREKIEKILTFRIPYYVGPLARGNSRFAWMTRKSEETITPWNFEEVVDKGASAQSFIERMTNFDKNLPNEKVLPKHSLLYEYFTVYNELTKVKYVTEGMRKPAFLSGEQKKAIVDLLFKTNRKVTVKQLKEDYFKKIECFDSVEISGVEDRFNASLGTYHDLLKIIKDKDFLDNEENEDILEDIVLTLTLFEDREMIEERLKTYAHLFDDKVMKQLKRRRYTGWGRLSRKLINGIRDKQSGKTILDFLKSDGFANRNFMQLIHDDSLTFKEDIQKAQVSGQGDSLHEHIANLAGSPAIKKGILQTVKVVDELVKVMGRHKPENIVIEMARENQTTQKGQKNSRERMKRIEEGIKELGSQILKEHPVENTQLQNEKLYLYYLQNGRDMYVDQELDINRLSDYDVDHIVPQSFLKDDSIDNKVLTRSDKARGKSDNVPSEEVVKKMKNYWRQLLNAKLITQRKFDNLTKAERGGLSELDKAGFIKRQLVETRQITKHVAQILDSRMNTKYDENDKLIREVKVITLKSKLVSDFRKDFQFYKVREINNYHHAHDAYLNAVVGTALIKKYPKLESEFVYGDYKVYDVRKMIAKSEQEIGKATAKYFFYSNIMNFFKTEITLANGEIRKRPLIETNGETGEIVWDKGRDFATVRKVLSMPQVNIVKKTEVQTGGFSKESILPKRNSDKLIARKKDWDPKKYGGFDSPTVAYSVLVVAKVEKGKSKKLKSVKELLGITIMERSSFEKNPIDFLEAKGYKEVKKDLIIKLPKYSLFELENGRKRMLASAGELQKGNELALPSKYVNFLYLASHYEKLKGSPEDNEQKQLFVEQHKHYLDEIIEQISEFSKRVILADANLDKVLSAYNKHRDKPIREQAENIIHLFTLTNLGAPAAFKYFDTTIDRKRYTSTKEVLDATLIHQSITGLYETRIDLSQLGGDGGGGGPAPEAAAKGGLDDEYRLYSPLVKPDQNIQFWLEQFPQAWAETAGMGLAKQVPPQVIQLKASATPVSVRQYPLSKEAQEGIRPHVQRLIQQGILVPVQSPWNTPLLPVRKPGTNDYRPVQDLREVNKRVQDIHPTVPNPYNLLCALPPQRSWYTVLDLKDAFFCLRLHPTSQPLFAFEWRDPGTGRTGQLTWTRLPQGFKNSPTIFNEALHRDLANFRIQHPQVTLLQYVDDLLLAGATKQDCLEGTKALLLELSDLGYRASAKKAQICRREVTYLGYSLRDGQRWLTEARKKTVVQIPAPTTAKQVREFLGKAGFCRLFIPGFATLAAPLYPLTKPKGEFSWAPEHQKAFDAIKKALLSAPALALPDVTKPFTLYVDERKGVARGVLTQTLGPWRRPVAYLSKKLDPVASGWPVCLKAIAAVAILVKDADKLTLGQNITVIAPHALENIVRQPPDRWMTNARMTHYQSLLLTERVTFAPPAALNPATLLPEETDEPVTHDCHQLLIEETGVRKDLTDIPLTGEVLTWFTDGSSYVVEGKRMAGAAVVDGTRTIWASSLPEGTSAQKAELMALTQALRLAEGKSINIYTDSRYAFATAHVHGAIYKQRGWLTSAGREIKNKEEILSLLEALHLPKRLAIIHCPGHQKAKDPISRGNQMADRVAKQAAQGVNLLPAGKRTADGSEFEKRTADGSEFESPKKKAKVE

SEQ ID NO: 7480 - protein, 2088 aa, synthetic construct; identical to SEQ ID NO: 7479

SEQ ID NO: 7481 - protein, 2090 aa, synthetic construct
MPAAKRVKLDGGDKKYSIGLDIGTNSVGWAVITDEYKVPSKKFKVLGNTDRHSIKKNLIGALLFDSGETAEATRLKRTARRRYTRRKNRICYLQEIFSNEMAKVDDSFFHRLEESFLVEEDKKHERHPIFGNIVDEVAYHEKYPTIYHLRKKLVDSTDKADLRLIYLALAHMIKFRGHFLIEGDLNPDNSDVDKLFIQLVQTYNQLFEENPINASGVDAKAILSARLSKSRRLENLIAQLPGEKKNGLFGNLIALSLGLTPNFKSNFDLAEDAKLQLSKDTYDDDLDNLLAQIGDQYADLFLAAKNLSDAILLSDILRVNTEITKAPLSASMIKRYDEHHQDLTLLKALVRQQLPEKYKEIFFDQSKNGYAGYIDGGASQEEFYKFIKPILEKMDGTEELLVKLNREDLLRKQRTFDNGSIPHQIHLGELHAILRRQEDFYPFLKDNREKIEKILTFRIPYYVGPLARGNSRFAWMTRKSEETITPWNFEEVVDKGASAQSFIERMTNFDKNLPNEKVLPKHSLLYEYFTVYNELTKVKYVTEGMRKPAFLSGEQKKAIVDLLFKTNRKVTVKQLKEDYFKKIECFDSVEISGVEDRFNASLGTYHDLLKIIKDKDFLDNEENEDILEDIVLTLTLFEDREMIEERLKTYAHLFDDKVMKQLKRRRYTGWGRLSRKLINGIRDKQSGKTILDFLKSDGFANRNFMQLIHDDSLTFKEDIQKAQVSGQGDSLHEHIANLAGSPAIKKGILQTVKVVDELVKVMGRHKPENIVIEMARENQTTQKGQKNSRERMKRIEEGIKELGSQILKEHPVENTQLQNEKLYLYYLQNGRDMYVDQELDINRLSDYDVDHIVPQSFLKDDSIDNKVLTRSDKARGKSDNVPSEEVVKKMKNYWRQLLNAKLITQRKFDNLTKAERGGLSELDKAGFIKRQLVETRQITKHVAQILDSRMNTKYDENDKLIREVKVITLKSKLVSDFRKDFQFYKVREINNYHHAHDAYLNAVVGTALIKKYPKLESEFVYGDYKVYDVRKMIAKSEQEIGKATAKYFFYSNIMNFFKTEITLANGEIRKRPLIETNGETGEIVWDKGRDFATVRKVLSMPQVNIVKKTEVQTGGFSKESILPKRNSDKLIARKKDWDPKKYGGFDSPTVAYSVLVVAKVEKGKSKKLKSVKELLGITIMERSSFEKNPIDFLEAKGYKEVKKDLIIKLPKYSLFELENGRKRMLASAGELQKGNELALPSKYVNFLYLASHYEKLKGSPEDNEQKQLFVEQHKHYLDEIIEQISEFSKRVILADANLDKVLSAYNKHRDKPIREQAENIIHLFTLTNLGAPAAFKYFDTTIDRKRYTSTKEVLDATLIHQSITGLYETRIDLSQLGGDGGGGGPAPEAAAKGGTLQLDDEYRLYSPLVKPDQNIQFWLEQFPQAWAETAGMGLAKQVPPQVIQLKASATPVSVRQYPLSKEAQEGIRPHVQRLIQQGILVPVQSPWNTPLLPVRKPGTNDYRPVQDLREVNKRVQDIHPTVPNPYNLLCALPPQRSWYTVLDLKDAFFCLRLHPTSQPLFAFEWRDPGTGRTGQLTWTRLPQGFKNSPTIFDEALHRDLANFRIQHPQVTLLQYVDDLLLAGATKQDCLEGTKALLLELSDLGYRASAKKAQICRREVTYLGYSLRDGQRWLTEARKKTVVQIPAPTTAKQVREFLGTAGFCRLWIPGFATLAAPLYPLTKEKGEFSWAPEHQKAFDAIKKALLSAPALALPDVTKPFTLYVDERKGVARGVLTQTLGPWRRPVAYLSKKLDPVASGWPVCLKAIAAVAILVKDADKLTLGQNITVIAPHALENIVRQPPDRWMTNARMTHYQSLLLTERVTFAPPAALNPATLLPEETDEPVTHDCHQLLIEETGVRKDLTDIPLTGEVLTWFTDGSSYVVEGKRMAGAAVVDGTRTIWASSLPEGTSAQKAELMALTQALRLAEGKSINIYTDSRYAFATAHVHGAIYKQRGLLTSAGREIKNKEEILSLLEALHLPKRLAIIHCPGHQKAKDPISRGNQMADRVAKQAAQGVNLLAGKRTADGSEFEKRTADGSEFESPKKKAKVE

SEQ ID NO: 7482 - protein, 2176 aa, synthetic construct
MPAAKRVKLDGGDKKYSIGLDIGTNSVGWAVITDEYKVPSKKFKVLGNTDRHSIKKNLIGALLFDSGETAEATRLKRTARRRYTRRKNRICYLQEIFSNEMAKVDDSFFHRLEESFLVEEDKKHERHPIFGNIVDEVAYHEKYPTIYHLRKKLVDSTDKADLRLIYLALAHMIKFRGHFLIEGDLNPDNSDVDKLFIQLVQTYNQLFEENPINASGVDAKAILSARLSKSRRLENLIAQLPGEKKNGLFGNLIALSLGLTPNFKSNFDLAEDAKLQLSKDTYDDDLDNLLAQIGDQYADLFLAAKNLSDAILLSDILRVNTEITKAPLSASMIKRYDEHHQDLTLLKALVRQQLPEKYKEIFFDQSKNGYAGYIDGGASQEEFYKFIKPILEKMDGTEELLVKLNREDLLRKQRTFDNGSIPHQIHLGELHAILRRQEDFYPFLKDNREKIEKILTFRIPYYVGPLARGNSRFAWMTRKSEETITPWNFEEVVDKGASAQSFIERMTNFDKNLPNEKVLPKHSLLYEYFTVYNELTKVKYVTEGMRKPAFLSGEQKKAIVDLLFKTNRKVTVKQLKEDYFKKIECFDSVEISGVEDRFNASLGTYHDLLKIIKDKDFLDNEENEDILEDIVLTLTLFEDREMIEERLKTYAHLFDDKVMKQLKRRRYTGWGRLSRKLINGIRDKQSGKTILDFLKSDGFANRNFMQLIHDDSLTFKEDIQKAQVSGQGDSLHEHIANLAGSPAIKKGILQTVKVVDELVKVMGRHKPENIVIEMARENQTTQKGQKNSRERMKRIEEGIKELGSQILKEHPVENTQLQNEKLYLYYLQNGRDMYVDQELDINRLSDYDVDHIVPQSFLKDDSIDNKVLTRSDKARGKSDNVPSEEVVKKMKNYWRQLLNAKLITQRKFDNLTKAERGGLSELDKAGFIKRQLVETRQITKHVAQILDSRMNTKYDENDKLIREVKVITLKSKLVSDFRKDFQFYKVREINNYHHAHDAYLNAVVGTALIKKYPKLESEFVYGDYKVYDVRKMIAKSEQEIGKATAKYFFYSNIMNFFKTEITLANGEIRKRPLIETNGETGEIVWDKGRDFATVRKVLSMPQVNIVKKTEVQTGGFSKESILPKRNSDKLIARKKDWDPKKYGGFDSPTVAYSVLVVAKVEKGKSKKLKSVKELLGITIMERSSFEKNPIDFLEAKGYKEVKKDLIIKLPKYSLFELENGRKRMLASAGELQKGNELALPSKYVNFLYLASHYEKLKGSPEDNEQKQLFVEQHKHYLDEIIEQISEFSKRVILADANLDKVLSAYNKHRDKPIREQAENIIHLFTLTNLGAPAAFKYFDTTIDRKRYTSTKEVLDATLIHQSITGLYETRIDLSQLGGDGGGGGPAPEAAAKGGMDPLQLLQPLEAEIKGTKLKAHWNSGATITCVPEAFLEDERPIQTMLIKTIHGEKQQDVYYLTFKVQGRKVEAEVLASPYDYILLNPSDVPWLMKKPLQLTVLVPLHEYQERLLQQTALPKEQKELLQKLFLKYDALWQHWENQVGHRRIKPHNIATGTLAPRPQKQYPINPKAKPSIQIVIDDLLKQGVLIQQNSTMNTPVYPVPKPDGKWRMVLDYREVNKTIPLIAAQNQHSAGILSSIYRGKYKTTLDLTNGFWAHPITPESYWLTAFTWQGKQYCWTRLPQGFLNSPALFNADVVDLLKEIPNVQAYVDDIYISHDDPQEHLEQLEKIFSILLNAGYVVSLKKSEIAQREVEFLGFNITKEGRGLTDTFKQKLLNITPPKDLKQLQSILGKLNFARNFIPNYSELVKPLYTIVAPANGKFISWTEDNSNQLQHIISVLNQADNLEERNPETRLIIKVNSSPSAGYIRYYNEGSKRPIMYVNYIFSKAEAKFTQTEKLLTTMHKGLIKAMDLAMGQEILVYSPIVSMTKIQRTPLPERKALPVRWITWMTYLEDPRIQFHYDKSLPELQQIPNVTEDVIAKTKHPSEFAMVFYTDGSAIKHPDVNKSHSAGMGIAQVQFIPEYKIVHQWSIPLGDHTAQLAEIAAVEFACKKALKISGPVLIVTDSFYVAESANKELPYWKSNGFLNNKKKPLRHVSKWKSIAECLQLKPDIIIMHEKGHQQPMTTLHTEGNNLADKLATQGSYVVHAGKRTADGSEFEKRTADGSEFESPKKKAKVE

SEQ ID NO: 7483 - protein, 2176 aa, synthetic construct
MPAAKRVKLDGGDKKYSIGLDIGTNSVGWAVITDEYKVPSKKFKVLGNTDRHSIKKNLIGALLFDSGETAEATRLKRTARRRYTRRKNRICYLQEIFSNEMAKVDDSFFHRLEESFLVEEDKKHERHPIFGNIVDEVAYHEKYPTIYHLRKKLVDSTDKADLRLIYLALAHMIKFRGHFLIEGDLNPDNSDVDKLFIQLVQTYNQLFEENPINASGVDAKAILSARLSKSRRLENLIAQLPGEKKNGLFGNLIALSLGLTPNFKSNFDLAEDAKLQLSKDTYDDDLDNLLAQIGDQYADLFLAAKNLSDAILLSDILRVNTEITKAPLSASMIKRYDEHHQDLTLLKALVRQQLPEKYKEIFFDQSKNGYAGYIDGGASQEEFYKFIKPILEKMDGTEELLVKLNREDLLRKQRTFDNGSIPHQIHLGELHAILRRQEDFYPFLKDNREKIEKILTFRIPYYVGPLARGNSRFAWMTRKSEETITPWNFEEVVDKGASAQSFIERMTNFDKNLPNEKVLPKHSLLYEYFTVYNELTKVKYVTEGMRKPAFLSGEQKKAIVDLLFKTNRKVTVKQLKEDYFKKIECFDSVEISGVEDRFNASLGTYHDLLKIIKDKDFLDNEENEDILEDIVLTLTLFEDREMIEERLKTYAHLFDDKVMKQLKRRRYTGWGRLSRKLINGIRDKQSGKTILDFLKSDGFANRNFMQLIHDDSLTFKEDIQKAQVSGQGDSLHEHIANLAGSPAIKKGILQTVKVVDELVKVMGRHKPENIVIEMARENQTTQKGQKNSRERMKRIEEGIKELGSQILKEHPVENTQLQNEKLYLYYLQNGRDMYVDQELDINRLSDYDVDHIVPQSFLKDDSIDNKVLTRSDKARGKSDNVPSEEVVKKMKNYWRQLLNAKLITQRKFDNLTKAERGGLSELDKAGFIKRQLVETRQITKHVAQILDSRMNTKYDENDKLIREVKVITLKSKLVSDFRKDFQFYKVREINNYHHAHDAYLNAVVGTALIKKYPKLESEFVYGDYKVYDVRKMIAKSEQEIGKATAKYFFYSNIMNFFKTEITLANGEIRKRPLIETNGETGEIVWDKGRDFATVRKVLSMPQVNIVKKTEVQTGGFSKESILPKRNSDKLIARKKDWDPKKYGGFDSPTVAYSVLVVAKVEKGKSKKLKSVKELLGITIMERSSFEKNPIDFLEAKGYKEVKKDLIIKLPKYSLFELENGRKRMLASAGELQKGNELALPSKYVNFLYLASHYEKLKGSPEDNEQKQLFVEQHKHYLDEIIEQISEFSKRVILADANLDKVLSAYNKHRDKPIREQAENIIHLFTLTNLGAPAAFKYFDTTIDRKRYTSTKEVLDATLIHQSITGLYETRIDLSQLGGDGGGGGPAPEAAAKGGMNPLQLLQPLPAEVKGTKLLAHWNSGATITCIPESFLEDEQPIKQTLIKTIHGEKQQNVYYLTFKVKGRKVEAEVIASPYEYILLSPTDVPWLTQQPLQLTILVPLQEYQDRILNKTALPEEQKQQLKALFTKYDNLWQHWENQVGHRKIRPHNIATGDYPPRPQKQYPINPKAKPSIQIVIDDLLKQGVLTPQNSTMNTPVYPVPKPDGRWRMVLDYREVNKTIPLTAAQNQHSAGILATIVRQKYKTTLDLANGFWAHPITPDSYWLTAFTWQGKQYCWTRLPQGFLNSPALFNADAVDLLKEVPNVQVYVDDIYLSHDNPHEHIQQLEKVFQILLQAGYVVSLKKSEIGQRTVEFLGFNITKEGRGLTDTFKTKLLNVTPPKDLKQLQSILGLLNFARNFIPNFAELVQTLYNLIASSPGKYIEWTEDNTKQLNKVIEALNTASNLEERLPDQRLVIKVNTSPSAGYVRYYNESGKKPIMYLNYVFSKAELKFSMLEKLLTTMHKALIKAMDLAMGQEILVYSPIVSMTKIQKTPLPERKALPIRWITWMTYLEDPRIQFHYDKTLPELKHIPDVYTSSIPPLKHPSQYEGVFCTDGSAIKSPDPTKSNNAGMGIVHAIYNPEYKILNQWSIPLGHHTAQMAEIAAVEFACKKALKVPGPVLVITDSFYVAESANKELPYWKSNGFVNNKKEPLKHISKWKSIAECLSIKPDITIQHEKGHQPINTSIHTEGNALADKLATQGSYVVNAGKRTADGSEFEKRTADGSEFESPKKKAKVE

SEQ ID NO: 7484 - protein, 2094 aa, synthetic construct
MPAAKRVKLDGGDKKYSIGLDIGTNSVGWAVITDEYKVPSKKFKVLGNTDRHSIKKNLIGALLFDSGETAEATRLKRTARRRYTRRKNRICYLQEIFSNEMAKVDDSFFHRLEESFLVEEDKKHERHPIFGNIVDEVAYHEKYPTIYHLRKKLVDSTDKADLRLIYLALAHMIKFRGHFLIEGDLNPDNSDVDKLFIQLVQTYNQLFEENPINASGVDAKAILSARLSKSRRLENLIAQLPGEKKNGLFGNLIALSLGLTPNFKSNFDLAEDAKLQLSKDTYDDDLDNLLAQIGDQYADLFLAAKNLSDAILLSDILRVNTEITKAPLSASMIKRYDEHHQDLTLLKALVRQQLPEKYKEIFFDQSKNGYAGYIDGGASQEEFYKFIKPILEKMDGTEELLVKLNREDLLRKQRTFDNGSIPHQIHLGELHAILRRQEDFYPFLKDNREKIEKILTFRIPYYVGPLARGNSRFAWMTRKSEETITPWNFEEVVDKGASAQSFIERMTNFDKNLPNEKVLPKHSLLYEYFTVYNELTKVKYVTEGMRKPAFLSGEQKKAIVDLLFKTNRKVTVKQLKEDYFKKIECFDSVEISGVEDRFNASLGTYHDLLKIIKDKDFLDNEENEDILEDIVLTLTLFEDREMIEERLKTYAHLFDDKVMKQLKRRRYTGWGRLSRKLINGIRDKQSGKTILDFLKSDGFANRNFMQLIHDDSLTFKEDIQKAQVSGQGDSLHEHIANLAGSPAIKKGILQTVKVVDELVKVMGRHKPENIVIEMARENQTTQKGQKNSRERMKRIEEGIKELGSQILKEHPVENTQLQNEKLYLYYLQNGRDMYVDQELDINRLSDYDVDHIVPQSFLKDDSIDNKVLTRSDKARGKSDNVPSEEVVKKMKNYWRQLLNAKLITQRKFDNLTKAERGGLSELDKAGFIKRQLVETRQITKHVAQILDSRMNTKYDENDKLIREVKVITLKSKLVSDFRKDFQFYKVREINNYHHAHDAYLNAVVGTALIKKYPKLESEFVYGDYKVYDVRKMIAKSEQEIGKATAKYFFYSNIMNFFKTEITLANGEIRKRPLIETNGETGEIVWDKGRDFATVRKVLSMPQVNIVKKTEVQTGGFSKESILPKRNSDKLIARKKDWDPKKYGGFDSPTVAYSVLVVAKVEKGKSKKLKSVKELLGITIMERSSFEKNPIDFLEAKGYKEVKKDLIIKLPKYSLFELENGRKRMLASAGELQKGNELALPSKYVNFLYLASHYEKLKGSPEDNEQKQLFVEQHKHYLDEIIEQISEFSKRVILADANLDKVLSAYNKHRDKPIREQAENIIHLFTLTNLGAPAAFKYFDTTIDRKRYTSTKEVLDATLIHQSITGLYETRIDLSQLGGDGGGGGPAPEAAAKGGVLNLEEEYRLHEKPVPSSIDPSWLQLFPTVWAERAGMGLANQVPPVVVELRSGASPVAVRQYPMSKEAREGIRPHIQRFLDLGVLVPCQSPWNTPLLPVKKPGTNDYRPVQDLREINKRVQDIHPTVPNPYNLLSSLPPSHTWYSVLDLKDAFFCLKLHPNSQPLFAFEWRDPEKGNTGQLTWTRLPQGFKNSPTLFNEALHRDLAPFRALNPQVVLLQYVDDLLVAAPTYRDCKEGTQKLLQELSKLGYRVSAKKAQLCQKEVTYLGYLLKEGKRWLTPARKATVMKIPPPTTPRQVREFLGKAGFCRLFIPGFASLAAPLYPLTKPSIPFIWTEEHQKAFDRIKEALLSAPALALPDLTKPFTLYVDERAGVARGVLTQTLGPWRRPVAYLSKKLDPVASGWPTCLKAVAAVALLLKDADKLTLGQNVTVIASHSLESIVRQPPDRWMTNARMTHYQSLLLNERVSFAPPAVLNPATLLPVESEATPVHRCSEILAEETGTRRDLKDQPLPGVPAWYTDGSSFIAEGKRRAGAAIVDGKRTVWASSLPEGTSAQKAELVALTQALRLAEGKDINIYTDSRYAFATAHIHGAIYKQRGWLTSAGKDIKNKEEILALLEAIHLPKRVAIIHCPGHQKGNDPVATGNRRADEAAKQAALSTRVLAETTKPAGKRTADGSEFEKRTADGSEFESPKKKAKVE

SEQ ID NO: 7485 - protein, 2096 aa, synthetic construct
MPAAKRVKLDGGDKKYSIGLDIGTNSVGWAVITDEYKVPSKKFKVLGNTDRHSIKKNLIGALLFDSGETAEATRLKRTARRRYTRRKNRICYLQEIFSNEMAKVDDSFFHRLEESFLVEEDKKHERHPIFGNIVDEVAYHEKYPTIYHLRKKLVDSTDKADLRLIYLALAHMIKFRGHFLIEGDLNPDNSDVDKLFIQLVQTYNQLFEENPINASGVDAKAILSARLSKSRRLENLIAQLPGEKKNGLFGNLIALSLGLTPNFKSNFDLAEDAKLQLSKDTYDDDLDNLLAQIGDQYADLFLAAKNLSDAILLSDILRVNTEITKAPLSASMIKRYDEHHQDLTLLKALVRQQLPEKYKEIFFDQSKNGYAGYIDGGASQEEFYKFIKPILEKMDGTEELLVKLNREDLLRKQRTFDNGSIPHQIHLGELHAILRRQEDFYPFLKDNREKIEKILTFRIPYYVGPLARGNSRFAWMTRKSEETITPWNFEEVVDKGASAQSFIERMTNFDKNLPNEKVLPKHSLLYEYFTVYNELTKVKYVTEGMRKPAFLSGEQKKAIVDLLFKTNRKVTVKQLKEDYFKKIECFDSVEISGVEDRFNASLGTYHDLLKIIKDKDFLDNEENEDILEDIVLTLTLFEDREMIEERLKTYAHLFDDKVMKQLKRRRYTGWGRLSRKLINGIRDKQSGKTILDFLKSDGFANRNFMQLIHDDSLTFKEDIQKAQVSGQGDSLHEHIANLAGSPAIKKGILQTVKVVDELVKVMGRHKPENIVIEMARENQTTQKGQKNSRERMKRIEEGIKELGSQILKEHPVENTQLQNEKLYLYYLQNGRDMYVDQELDINRLSDYDVDHIVPQSFLKDDSIDNKVLTRSDKARGKSDNVPSEEVVKKMKNYWRQLLNAKLITQRKFDNLTKAERGGLSELDKAGFIKRQLVETRQITKHVAQILDSRMNTKYDENDKLIREVKVITLKSKLVSDFRKDFQFYKVREINNYHHAHDAYLNAVVGTALIKKYPKLESEFVYGDYKVYDVRKMIAKSEQEIGKATAKYFFYSNIMNFFKTEITLANGEIRKRPLIETNGETGEIVWDKGRDFATVRKVLSMPQVNIVKKTEVQTGGFSKESILPKRNSDKLIARKKDWDPKKYGGFDSPTVAYSVLVVAKVEKGKSKKLKSVKELLGITIMERSSFEKNPIDFLEAKGYKEVKKDLIIKLPKYSLFELENGRKRMLASAGELQKGNELALPSKYVNFLYLASHYEKLKGSPEDNEQKQLFVEQHKHYLDEIIEQISEFSKRVILADANLDKVLSAYNKHRDKPIREQAENIIHLFTLTNLGAPAAFKYFDTTIDRKRYTSTKEVLDATLIHQSITGLYETRIDLSQLGGDGGGGGPAPEAAAKGGTLNIEDEYRLHETSKEPDVPLGSTWLSDFPQAWAETGGMGLAVRQAPLIIPLKATSTPVSIKQYPMSQEARLGIKPHIQRLLDQGILVPCQSPWNTPLLPVKKPGTNDYRPVQDLREVNKRVEDIHPTVPNPYNLLSGLPPSHQWYTVLDLKDAFFCLRLHPTSQPLFAFEWRDPEMGISGQLTWTRLPQGFKNSPTLFNEALHRDLADFRIQHPDLILLQYVDDLLLAATSEQDCQRGTRALLQTLGNLGYRASAKKAQICQKQVKYLGYLLKEGQRWLTEARKETVMGQPTPKTPRQLREFLGTAGFCRLWIPGFAEMAAPLYPLTKPGTLFNWGPDQQKAYQEIKQALLTAPALGLPDLTKPFELFVDEKQGYAKGVLTQKLGPWRRPVAYLSKKLDPVAAGWPPCLRMVAAIAVLTKDAGKLTMGQPLVILAPHAVEALVKQPPDRWLSNARMTHYQAMLLDTDRVQFGPVVALNPATLLPLPEKEAPHDCLEILAETHGTRPDLTDQPIPDADYTWYTDGSSFLQEGQRRAGAAVTTETEVIWARALPAGTSAQRAELIALTQALKMAEGKKLNVYTDSRYAFATAHVHGEIYRRRGWLTSEGREIKNKNEILALLKALFLPKRLSIIHCPGHQKGNSAEARGNRMADQAAREAAMKAVLETSTLLAGKRTADGSEFEKRTADGSEFESPKKKAKVE

SEQ ID NO: 7486 - protein, 2098 aa, synthetic construct
MPAAKRVKLDGGDKKYSIGLDIGTNSVGWAVITDEYKVPSKKFKVLGNTDRHSIKKNLIGALLFDSGETAEATRLKRTARRRYTRRKNRICYLQEIFSNEMAKVDDSFFHRLEESFLVEEDKKHERHPIFGNIVDEVAYHEKYPTIYHLRKKLVDSTDKADLRLIYLALAHMIKFRGHFLIEGDLNPDNSDVDKLFIQLVQTYNQLFEENPINASGVDAKAILSARLSKSRRLENLIAQLPGEKKNGLFGNLIALSLGLTPNFKSNFDLAEDAKLQLSKDTYDDDLDNLLAQIGDQYADLFLAAKNLSDAILLSDILRVNTEITKAPLSASMIKRYDEHHQDLTLLKALVRQQLPEKYKEIFFDQSKNGYAGYIDGGASQEEFYKFIKPILEKMDGTEELLVKLNREDLLRKQRTFDNGSIPHQIHLGELHAILRRQEDFYPFLKDNREKIEKILTFRIPYYVGPLARGNSRFAWMTRKSEETITPWNFEEVVDKGASAQSFIERMTNFDKNLPNEKVLPKHSLLYEYFTVYNELTKVKYVTEGMRKPAFLSGEQKKAIVDLLFKTNRKVTVKQLKEDYFKKIECFDSVEISGVEDRFNASLGTYHDLLKIIKDKDFLDNEENEDILEDIVLTLTLFEDREMIEERLKTYAHLFDDKVMKQLKRRRYTGWGRLSRKLINGIRDKQSGKTILDFLKSDGFANRNFMQLIHDDSLTFKEDIQKAQVSGQGDSLHEHIANLAGSPAIKKGILQTVKVVDELVKVMGRHKPENIVIEMARENQTTQKGQKNSRERMKRIEEGIKELGSQILKEHPVENTQLQNEKLYLYYLQNGRDMYVDQELDINRLSDYDVDHIVPQSFLKDDSIDNKVLTRSDKARGKSDNVPSEEVVKKMKNYWRQLLNAKLITQRKFDNLTKAERGGLSELDKAGFIKRQLVETRQITKHVAQILDSRMNTKYDENDKLIREVKVITLKSKLVSDFRKDFQFYKVREINNYHHAHDAYLNAVVGTALIKKYPKLESEFVYGDYKVYDVRKMIAKSEQEIGKATAKYFFYSNIMNFFKTEITLANGEIRKRPLIETNGETGEIVWDKGRDFATVRKVLSMPQVNIVKKTEVQTGGFSKESILPKRNSDKLIARKKDWDPKKYGGFDSPTVAYSVLVVAKVEKGKSKKLKSVKELLGITIMERSSFEKNPIDFLEAKGYKEVKKDLIIKLPKYSLFELENGRKRMLASAGELQKGNELALPSKYVNFLYLASHYEKLKGSPEDNEQKQLFVEQHKHYLDEIIEQISEFSKRVILADANLDKVLSAYNKHRDKPIREQAENIIHLFTLTNLGAPAAFKYFDTTIDRKRYTSTKEVLDATLIHQSITGLYETRIDLSQLGGDGGEAAAKGGGPAPGGTAPLEEEYRLFLEAPIQNVTLLEQWKREIPKVWAEINPPGLASTQAPIHVQLLSTALPVRVRQYPITLEAKRSLRETIRKFRAAGILRPVHSPWNTPLLPVRKSGTSEYRMVQDLREVNKRVETIHPTVPNPYTLLSLLPPDRIWYSVLDLKDAFFCIPLAPESQLIFAFEWADAEEGESGQLTWTRLPQGFKNSPTLFDEALNRDLQGFRLDHPSVSLLQYVDDLLIAADTQAACLSATRDLLMTLAELGYRVSGKKAQLCQEEVTYLGFKIHKGSRSLSNSRTQAILQIPVPKTKRQVREFLGTIGYCRLWIPGFAELAQPLYAATRGGNDPLVWGEKEEEAFQSLKLALTQPPALALPSLDKPFQLFVEETSGAAKGVLTQALGPWKRPVAYLSKRLDPVAAGWPRCLRAIAAAALLTREASKLTFGQDIEITSSHNLESLLRSPPDKWLTNARITQYQVLLLDPPRVRFKQTAALNPATLLPETDDTLPIHHCLDTLDSLTSTRPDLTDQPLAQAEATLFTDGSSYIRDGKRYAGAAVVTLDSVIWAEPLPIGTSAQKAELIALTKALEWSKDKSVNIYTDSRYAFATLHVHGMIYRERGLLTAGGKAIKNAPEILALLTAVWLPKRVAVMHCKGHQKDDAPTSTGNRRADEVAREVAIRPLSTQATISAGKRTADGSEFEKRTADGSEFESPKKKAKVE

SEQ ID NO: 7487 - protein, 2098 aa, synthetic construct
MPAAKRVKLDGGDKKYSIGLDIGTNSVGWAVITDEYKVPSKKFKVLGNTDRHSIKKNLIGALLFDSGETAEATRLKRTARRRYTRRKNRICYLQEIFSNEMAKVDDSFFHRLEESFLVEEDKKHERHPIFGNIVDEVAYHEKYPTIYHLRKKLVDSTDKADLRLIYLALAHMIKFRGHFLIEGDLNPDNSDVDKLFIQLVQTYNQLFEENPINASGVDAKAILSARLSKSRRLENLIAQLPGEKKNGLFGNLIALSLGLTPNFKSNFDLAEDAKLQLSKDTYDDDLDNLLAQIGDQYADLFLAAKNLSDAILLSDILRVNTEITKAPLSASMIKRYDEHHQDLTLLKALVRQQLPEKYKEIFFDQSKNGYAGYIDGGASQEEFYKFIKPILEKMDGTEELLVKLNREDLLRKQRTFDNGSIPHQIHLGELHAILRRQEDFYPFLKDNREKIEKILTFRIPYYVGPLARGNSRFAWMTRKSEETITPWNFEEVVDKGASAQSFIERMTNFDKNLPNEKVLPKHSLLYEYFTVYNELTKVKYVTEGMRKPAFLSGEQKKAIVDLLFKTNRKVTVKQLKEDYFKKIECFDSVEISGVEDRFNASLGTYHDLLKIIKDKDFLDNEENEDILEDIVLTLTLFEDREMIEERLKTYAHLFDDKVMKQLKRRRYTGWGRLSRKLINGIRDKQSGKTILDFLKSDGFANRNFMQLIHDDSLTFKEDIQKAQVSGQGDSLHEHIANLAGSPAIKKGILQTVKVVDELVKVMGRHKPENIVIEMARENQTTQKGQKNSRERMKRIEEGIKELGSQILKEHPVENTQLQNEKLYLYYLQNGRDMYVDQELDINRLSDYDVDHIVPQSFLKDDSIDNKVLTRSDKARGKSDNVPSEEVVKKMKNYWRQLLNAKLITQRKFDNLTKAERGGLSELDKAGFIKRQLVETRQITKHVAQILDSRMNTKYDENDKLIREVKVITLKSKLVSDFRKDFQFYKVREINNYHHAHDAYLNAVVGTALIKKYPKLESEFVYGDYKVYDVRKMIAKSEQEIGKATAKYFFYSNIMNFFKTEITLANGEIRKRPLIETNGETGEIVWDKGRDFATVRKVLSMPQVNIVKKTEVQTGGFSKESILPKRNSDKLIARKKDWDPKKYGGFDSPTVAYSVLVVAKVEKGKSKKLKSVKELLGITIMERSSFEKNPIDFLEAKGYKEVKKDLIIKLPKYSLFELENGRKRMLASAGELQKGNELALPSKYVNFLYLASHYEKLKGSPEDNEQKQLFVEQHKHYLDEIIEQISEFSKRVILADANLDKVLSAYNKHRDKPIREQAENIIHLFTLTNLGAPAAFKYFDTTIDRKRYTSTKEVLDATLIHQSITGLYETRIDLSQLGGDGGEAAAKGGGPAPGGTAPLEEEYRLFLEAPIQNVTLLEQWKREIPKVWAEINPPGLASTQAPIHVQLLSTALPVRVRQYPITLEAKRSLRETIRKFRAAGILRPVHSPWNTPLLPVRKSGTSEYRMVQDLREVNKRVETIHPTVPNPYTLLSLLPPDRIWYSVLDLKDAFFCIPLAPESQLIFAFEWADAEEGESGQLTWTRLPQGFKNSPTLFNEALNRDLQGFRLDHPSVSLLQYVDDLLIAADTQAACLSATRDLLMTLAELGYRVSGKKAQLCQEEVTYLGFKIHKGSRSLSNSRTQAILQIPVPKTKRQVREFLGTIGYCRLWIPGFAELAQPLYAATRPGNDPLVWGEKEEEAFQSLKLALTQPPALALPSLDKPFQLFVEETSGAAKGVLTQALGPWKRPVAYLSKRLDPVAAGWPRCLRAIAAAALLTREASKLTFGQDIEITSSHNLESLLRSPPDKWLTNARITQYQVLLLDPPRVRFKQTAALNPATLLPETDDTLPIHHCLDTLDSLTSTRPDLTDQPLAQAEATLFTDGSSYIRDGKRYAGAAVVTLDSVIWAEPLPIGTSAQKAELIALTKALEWSKDKSVNIYTDSRYAFATLHVHGMIYRERGWLTAGGKAIKNAPEILALLTAVWLPKRVAVMHCKGHQKDDAPTSTGNRRADEVAREVAIRPLSTQATISAGKRTADGSEFEKRTADGSEFESPKKKAKVE

SEQ ID NO: 7488 - protein, 2098 aa, synthetic construct
MPAAKRVKLDGGDKKYSIGLDIGTNSVGWAVITDEYKVPSKKFKVLGNTDRHSIKKNLIGALLFDSGETAEATRLKRTARRRYTRRKNRICYLQEIFSNEMAKVDDSFFHRLEESFLVEEDKKHERHPIFGNIVDEVAYHEKYPTIYHLRKKLVDSTDKADLRLIYLALAHMIKFRGHFLIEGDLNPDNSDVDKLFIQLVQTYNQLFEENPINASGVDAKAILSARLSKSRRLENLIAQLPGEKKNGLFGNLIALSLGLTPNFKSNFDLAEDAKLQLSKDTYDDDLDNLLAQIGDQYADLFLAAKNLSDAILLSDILRVNTEITKAPLSASMIKRYDEHHQDLTLLKALVRQQLPEKYKEIFFDQSKNGYAGYIDGGASQEEFYKFIKPILEKMDGTEELLVKLNREDLLRKQRTFDNGSIPHQIHLGELHAILRRQEDFYPFLKDNREKIEKILTFRIPYYVGPLARGNSRFAWMTRKSEETITPWNFEEVVDKGASAQSFIERMTNFDKNLPNEKVLPKHSLLYEYFTVYNELTKVKYVTEGMRKPAFLSGEQKKAIVDLLFKTNRKVTVKQLKEDYFKKIECFDSVEISGVEDRFNASLGTYHDLLKIIKDKDFLDNEENEDILEDIVLTLTLFEDREMIEERLKTYAHLFDDKVMKQLKRRRYTGWGRLSRKLINGIRDKQSGKTILDFLKSDGFANRNFMQLIHDDSLTFKEDIQKAQVSGQGDSLHEHIANLAGSPAIKKGILQTVKVVDELVKVMGRHKPENIVIEMARENQTTQKGQKNSRERMKRIEEGIKELGSQILKEHPVENTQLQNEKLYLYYLQNGRDMYVDQELDINRLSDYDVDHIVPQSFLKDDSIDNKVLTRSDKARGKSDNVPSEEVVKKMKNYWRQLLNAKLITQRKFDNLTKAERGGLSELDKAGFIKRQLVETRQITKHVAQILDSRMNTKYDENDKLIREVKVITLKSKLVSDFRKDFQFYKVREINNYHHAHDAYLNAVVGTALIKKYPKLESEFVYGDYKVYDVRKMIAKSEQEIGKATAKYFFYSNIMNFFKTEITLANGEIRKRPLIETNGETGEIVWDKGRDFATVRKVLSMPQVNIVKKTEVQTGGFSKESILPKRNSDKLIARKKDWDPKKYGGFDSPTVAYSVLVVAKVEKGKSKKLKSVKELLGITIMERSSFEKNPIDFLEAKGYKEVKKDLIIKLPKYSLFELENGRKRMLASAGELQKGNELALPSKYVNFLYLASHYEKLKGSPEDNEQKQLFVEQHKHYLDEIIEQISEFSKRVILADANLDKVLSAYNKHRDKPIREQAENIIHLFTLTNLGAPAAFKYFDTTIDRKRYTSTKEVLDATLIHQSITGLYETRIDLSQLGGDGGEAAAKGGGPAPGGTAPLEEEYRLFLEAPIQNVTLLEQWKREIPKVWAEINPPGLASTQAPIHVQLLSTALPVRVRQYPITLEAKRSLRETIRKFRAAGILRPVHSPWNTPLLPVRKSGTSEYRMVQDLREVNKRVETIHPTVPNPYTLLSLLPPDRIWYSVLDLKDAFFCIPLAPESQLIFAFEWADAEEGESGQLTWTRLPQGFKNSPTLFNEALNRDLQGFRLDHPSVSLLQYVDDLLIAADTQAACLSATRDLLMTLAELGYRVSGKKAQLCQEEVTYLGFKIHKGSRSLSNSRTQAILQIPVPKTKRQVREFLGKIGYCRLFIPGFAELAQPLYAATRPGNDPLVWGEKEEEAFQSLKLALTQPPALALPSLDKPFQLFVEETSGAAKGVLTQALGPWKRPVAYLSKRLDPVAAGWPRCLRAIAAAALLTREASKLTFGQDIEITSSHNLESLLRSPPDKWLTNARITQYQVLLLDPPRVRFKQTAALNPATLLPETDDTLPIHHCLDTLDSLTSTRPDLTDQPLAQAEATLFTDGSSYIRDGKRYAGAAVVTLDSVIWAEPLPIGTSAQKAELIALTKALEWSKDKSVNIYTDSRYAFATLHVHGMIYRERGWLTAGGKAIKNAPEILALLTAVWLPKRVAVMHCKGHQKDDAPTSTGNRRADEVAREVAIRPLSTQATISAGKRTADGSEFEKRTADGSEFESPKKKAKVE

SEQ ID NO: 7489 - protein, 2102 aa, synthetic construct
MPAAKRVKLDGGDKKYSIGLDIGTNSVGWAVITDEYKVPSKKFKVLGNTDRHSIKKNLIGALLFDSGETAEATRLKRTARRRYTRRKNRICYLQEIFSNEMAKVDDSFFHRLEESFLVEEDKKHERHPIFGNIVDEVAYHEKYPTIYHLRKKLVDSTDKADLRLIYLALAHMIKFRGHFLIEGDLNPDNSDVDKLFIQLVQTYNQLFEENPINASGVDAKAILSARLSKSRRLENLIAQLPGEKKNGLFGNLIALSLGLTPNFKSNFDLAEDAKLQLSKDTYDDDLDNLLAQIGDQYADLFLAAKNLSDAILLSDILRVNTEITKAPLSASMIKRYDEHHQDLTLLKALVRQQLPEKYKEIFFDQSKNGYAGYIDGGASQEEFYKFIKPILEKMDGTEELLVKLNREDLLRKQRTFDNGSIPHQIHLGELHAILRRQEDFYPFLKDNREKIEKILTFRIPYYVGPLARGNSRFAWMTRKSEETITPWNFEEVVDKGASAQSFIERMTNFDKNLPNEKVLPKHSLLYEYFTVYNELTKVKYVTEGMRKPAFLSGEQKKAIVDLLFKTNRKVTVKQLKEDYFKKIECFDSVEISGVEDRFNASLGTYHDLLKIIKDKDFLDNEENEDILEDIVLTLTLFEDREMIEERLKTYAHLFDDKVMKQLKRRRYTGWGRLSRKLINGIRDKQSGKTILDFLKSDGFANRNFMQLIHDDSLTFKEDIQKAQVSGQGDSLHEHIANLAGSPAIKKGILQTVKVVDELVKVMGRHKPENIVIEMARENQTTQKGQKNSRERMKRIEEGIKELGSQILKEHPVENTQLQNEKLYLYYLQNGRDMYVDQELDINRLSDYDVDHIVPQSFLKDDSIDNKVLTRSDKARGKSDNVPSEEVVKKMKNYWRQLLNAKLITQRKFDNLTKAERGGLSELDKAGFIKRQLVETRQITKHVAQILDSRMNTKYDENDKLIREVKVITLKSKLVSDFRKDFQFYKVREINNYHHAHDAYLNAVVGTALIKKYPKLESEFVYGDYKVYDVRKMIAKSEQEIGKATAKYFFYSNIMNFFKTEITLANGEIRKRPLIETNGETGEIVWDKGRDFATVRKVLSMPQVNIVKKTEVQTGGFSKESILPKRNSDKLIARKKDWDPKKYGGFDSPTVAYSVLVVAKVEKGKSKKLKSVKELLGITIMERSSFEKNPIDFLEAKGYKEVKKDLIIKLPKYSLFELENGRKRMLASAGELQKGNELALPSKYVNFLYLASHYEKLKGSPEDNEQKQLFVEQHKHYLDEIIEQISEFSKRVILADANLDKVLSAYNKHRDKPIREQAENIIHLFTLTNLGAPAAFKYFDTTIDRKRYTSTKEVLDATLIHQSITGLYETRIDLSQLGGDGGEAAAKGGGPAPGGTVSLQDEHRLFDIPVTTSLPDVWLQDFPQAWAETGGLGRAKCQAPIIIDLKPTAVPVSIKQYPMSLEAHMGIRQHIIKFLELGVLRPCRSPWNTPLLPVKKPGTQDYRPVQDLREINKRTVDIHPTVPNPYNLLSTLKPDYSWYTVLDLKDAFFCLPLAPQSQELFAFEWKDPERGISGQLTWTRLPQGFKNSPTLFDEALHRDLTDFRTQHPEVTLLQYVDDLLLAAPTKKACTQGTRHLLQELGEKGYRASAKKAQICQTKVTYLGYILSEGKRWLTPGRIETVARIPPPRNPREVREFLGTAGFCRLWIPGFAELAAPLYALTKESTPFTWQTEHQLAFEALKKALLSAPALGLPDTSKPFTLFLDERQGIAKGVLTQKLGPWKRPVAYLSKKLDPVAAGWPPCLRIMAATAMLVKDSAKLTLGQPLTVITPHTLEAIVRQPPDRWITNARLTHYQALLLDTDRVQFGPPVTLNPATLLPVPENQPSPHDCRQVLAETHGTREDLKDQELPDADHTWYTDGSSYLDSGTRRAGAAVVDGHNTIWAQSLPPGTSAQKAELIALTKALELSKGKKANIYTDSRYAFATAHTHGSIYERRGLLTSEGKEIKNKAEIIALLKALFLPQEVAIIHCPGHQKGQDPVAVGNRQADRVARQAAMAEVLTLATEPDNTSHITAGKRTADGSEFEKRTADGSEFESPKKKAKVE

SEQ ID NO: 7490 - protein, 2102 aa, synthetic construct
MPAAKRVKLDGGDKKYSIGLDIGTNSVGWAVITDEYKVPSKKFKVLGNTDRHSIKKNLIGALLFDSGETAEATRLKRTARRRYTRRKNRICYLQEIFSNEMAKVDDSFFHRLEESFLVEEDKKHERHPIFGNIVDEVAYHEKYPTIYHLRKKLVDSTDKADLRLIYLALAHMIKFRGHFLIEGDLNPDNSDVDKLFIQLVQTYNQLFEENPINASGVDAKAILSARLSKSRRLENLIAQLPGEKKNGLFGNLIALSLGLTPNFKSNFDLAEDAKLQLSKDTYDDDLDNLLAQIGDQYADLFLAAKNLSDAILLSDILRVNTEITKAPLSASMIKRYDEHHQDLTLLKALVRQQLPEKYKEIFFDQSKNGYAGYIDGGASQEEFYKFIKPILEKMDGTEELLVKLNREDLLRKQRTFDNGSIPHQIHLGELHAILRRQEDFYPFLKDNREKIEKILTFRIPYYVGPLARGNSRFAWMTRKSEETITPWNFEEVVDKGASAQSFIERMTNFDKNLPNEKVLPKHSLLYEYFTVYNELTKVKYVTEGMRKPAFLSGEQKKAIVDLLFKTNRKVTVKQLKEDYFKKIECFDSVEISGVEDRFNASLGTYHDLLKIIKDKDFLDNEENEDILEDIVLTLTLFEDREMIEERLKTYAHLFDDKVMKQLKRRRYTGWGRLSRKLINGIRDKQSGKTILDFLKSDGFANRNFMQLIHDDSLTFKEDIQKAQVSGQGDSLHEHIANLAGSPAIKKGILQTVKVVDELVKVMGRHKPENIVIEMARENQTTQKGQKNSRERMKRIEEGIKELGSQILKEHPVENTQLQNEKLYLYYLQNGRDMYVDQELDINRLSDYDVDHIVPQSFLKDDSIDNKVLTRSDKARGKSDNVPSEEVVKKMKNYWRQLLNAKLITQRKFDNLTKAERGGLSELDKAGFIKRQLVETRQITKHVAQILDSRMNTKYDENDKLIREVKVITLKSKLVSDFRKDFQFYKVREINNYHHAHDAYLNAVVGTALIKKYPKLESEFVYGDYKVYDVRKMIAKSEQEIGKATAKYFFYSNIMNFFKTEITLANGEIRKRPLIETNGETGEIVWDKGRDFATVRKVLSMPQVNIVKKTEVQTGGFSKESILPKRNSDKLIARKKDWDPKKYGGFDSPTVAYSVLVVAKVEKGKSKKLKSVKELLGITIMERSSFEKNPIDFLEAKGYKEVKKDLIIKLPKYSLFELENGRKRMLASAGELQKGNELALPSKYVNFLYLASHYEKLKGSPEDNEQKQLFVEQHKHYLDEIIEQISEFSKRVILADANLDKVLSAYNKHRDKPIREQAENIIHLFTLTNLGAPAAFKYFDTTIDRKRYTSTKEVLDATLIHQSITGLYETRIDLSQLGGDGGEAAAKGGGPAPGGTVSLQDEHRLFDIPVTTSLPDVWLQDFPQAWAETGGLGRAKCQAPIIIDLKPTAVPVSIKQYPMSLEAHMGIRQHIIKFLELGVLRPCRSPWNTPLLPVKKPGTQDYRPVQDLREINKRTVDIHPTVPNPYNLLSTLKPDYSWYTVLDLKDAFFCLPLAPQSQELFAFEWKDPERGISGQLTWTRLPQGFKNSPTLFNEALHRDLTDFRTQHPEVTLLQYVDDLLLAAPTKKACTQGTRHLLQELGEKGYRASAKKAQICQTKVTYLGYILSEGKRWLTPGRIETVARIPPPRNPREVREFLGTAGFCRLWIPGFAELAAPLYALTKPSTPFTWQTEHQLAFEALKKALLSAPALGLPDTSKPFTLFLDERQGIAKGVLTQKLGPWKRPVAYLSKKLDPVAAGWPPCLRIMAATAMLVKDSAKLTLGQPLTVITPHTLEAIVRQPPDRWITNARLTHYQALLLDTDRVQFGPPVTLNPATLLPVPENQPSPHDCRQVLAETHGTREDLKDQELPDADHTWYTDGSSYLDSGTRRAGAAVVDGHNTIWAQSLPPGTSAQKAELIALTKALELSKGKKANIYTDSRYAFATAHTHGSIYERRGWLTSEGKEIKNKAEIIALLKALFLPQEVAIIHCPGHQKGQDPVAVGNRQADRVARQAAMAEVLTLATEPDNTSHITAGKRTADGSEFEKRTADGSEFESPKKKAKVE

SEQ ID NO: 7491 - protein, 2173 aa, synthetic construct
MPAAKRVKLDGGDKKYSIGLDIGTNSVGWAVITDEYKVPSKKFKVLGNTDRHSIKKNLIGALLFDSGETAEATRLKRTARRRYTRRKNRICYLQEIFSNEMAKVDDSFFHRLEESFLVEEDKKHERHPIFGNIVDEVAYHEKYPTIYHLRKKLVDSTDKADLRLIYLALAHMIKFRGHFLIEGDLNPDNSDVDKLFIQLVQTYNQLFEENPINASGVDAKAILSARLSKSRRLENLIAQLPGEKKNGLFGNLIALSLGLTPNFKSNFDLAEDAKLQLSKDTYDDDLDNLLAQIGDQYADLFLAAKNLSDAILLSDILRVNTEITKAPLSASMIKRYDEHHQDLTLLKALVRQQLPEKYKEIFFDQSKNGYAGYIDGGASQEEFYKFIKPILEKMDGTEELLVKLNREDLLRKQRTFDNGSIPHQIHLGELHAILRRQEDFYPFLKDNREKIEKILTFRIPYYVGPLARGNSRFAWMTRKSEETITPWNFEEVVDKGASAQSFIERMTNFDKNLPNEKVLPKHSLLYEYFTVYNELTKVKYVTEGMRKPAFLSGEQKKAIVDLLFKTNRKVTVKQLKEDYFKKIECFDSVEISGVEDRFNASLGTYHDLLKIIKDKDFLDNEENEDILEDIVLTLTLFEDREMIEERLKTYAHLFDDKVMKQLKRRRYTGWGRLSRKLINGIRDKQSGKTILDFLKSDGFANRNFMQLIHDDSLTFKEDIQKAQVSGQGDSLHEHIANLAGSPAIKKGILQTVKVVDELVKVMGRHKPENIVIEMARENQTTQKGQKNSRERMKRIEEGIKELGSQILKEHPVENTQLQNEKLYLYYLQNGRDMYVDQELDINRLSDYDVDHIVPQSFLKDDSIDNKVLTRSDKARGKSDNVPSEEVVKKMKNYWRQLLNAKLITQRKFDNLTKAERGGLSELDKAGFIKRQLVETRQITKHVAQILDSRMNTKYDENDKLIREVKVITLKSKLVSDFRKDFQFYKVREINNYHHAHDAYLNAVVGTALIKKYPKLESEFVYGDYKVYDVRKMIAKSEQEIGKATAKYFFYSNIMNFFKTEITLANGEIRKRPLIETNGETGEIVWDKGRDFATVRKVLSMPQVNIVKKTEVQTGGFSKESILPKRNSDKLIARKKDWDPKKYGGFDSPTVAYSVLVVAKVEKGKSKKLKSVKELLGITIMERSSFEKNPIDFLEAKGYKEVKKDLIIKLPKYSLFELENGRKRMLASAGELQKGNELALPSKYVNFLYLASHYEKLKGSPEDNEQKQLFVEQHKHYLDEIIEQISEFSKRVILADANLDKVLSAYNKHRDKPIREQAENIIHLFTLTNLGAPAAFKYFDTTIDRKRYTSTKEVLDATLIHQSITGLYETRIDLSQLGGDGGEAAAKGGGPAPGGMDLLKPLTVERKGVKIKGYWNSQADITCVPKDLLQGEEPVRQQNVTTIHGTQEGDVYYVNLKIDGRRINTEVIGTTLDYAIITPGDVPWILKKPLELTIKLDLEEQQGTLLNNSILSKKGKEELKQLFEKYSALWQSWENQVGHRRIRPHKIATGTVKPTPQKQYHINPKAKPDIQIVINDLLKQGVLIQKESTMNTPVYPVPKPNGRWRMVLDYRAVNKVTPLIAVQNQHSYGILGSLFKGRYKTTIDLSNGFWAHPIVPEDYWITAFTWQGKQYCWTVLPQGFLNSPGLFTGDVVDLLQGIPNVEVYVDDVYISHDSEKEHLEYLDILFNRLKEAGYIISLKKSNIANSIVDFLGFQITNEGRGLTDTFKEKLENITAPTTLKQLQSILGLLNFARNFIPDFTELIAPLYALIPKSTKNYVPWQIEHSTTLETLITKLNGAEYLQGRKGDKTLIMKVNASYTTGYIRYYNEGEKKPISYVSIVFSKTELKFTELEKLLTTVHKGLLKALDLSMGQNIHVYSPIVSMQNIQKTPQTAKKALASRWLSWLSYLEDPRIRFFYDPQMPALKDLPAVDTGKDNKKHPSNFQHIFYTDGSAITSPTKEGHLNAGMGIVYFINKDGNLQKQQEWSISLGNHTAQFAEIAAFEFALKKCLPLGGNILVVTDSNYVAKAYNEELDVWASNGFVNNRKKPLKHISKWKSVADLKRLRPDVVVTHEPGHQKLDSSPHAYGNNLADQLATQASFKVHAGKRTADGSEFEKRTADGSEFESPKKKAKVE

SEQ ID NO: 7492 - protein, 2094 aa, synthetic construct
MPAAKRVKLDGGDKKYSIGLDIGTNSVGWAVITDEYKVPSKKFKVLGNTDRHSIKKNLIGALLFDSGETAEATRLKRTARRRYTRRKNRICYLQEIFSNEMAKVDDSFFHRLEESFLVEEDKKHERHPIFGNIVDEVAYHEKYPTIYHLRKKLVDSTDKADLRLIYLALAHMIKFRGHFLIEGDLNPDNSDVDKLFIQLVQTYNQLFEENPINASGVDAKAILSARLSKSRRLENLIAQLPGEKKNGLFGNLIALSLGLTPNFKSNFDLAEDAKLQLSKDTYDDDLDNLLAQIGDQYADLFLAAKNLSDAILLSDILRVNTEITKAPLSASMIKRYDEHHQDLTLLKALVRQQLPEKYKEIFFDQSKNGYAGYIDGGASQEEFYKFIKPILEKMDGTEELLVKLNREDLLRKQRTFDNGSIPHQIHLGELHAILRRQEDFYPFLKDNREKIEKILTFRIPYYVGPLARGNSRFAWMTRKSEETITPWNFEEVVDKGASAQSFIERMTNFDKNLPNEKVLPKHSLLYEYFTVYNELTKVKYVTEGMRKPAFLSGEQKKAIVDLLFKTNRKVTVKQLKEDYFKKIECFDSVEISGVEDRFNASLGTYHDLLKIIKDKDFLDNEENEDILEDIVLTLTLFEDREMIEERLKTYAHLFDDKVMKQLKRRRYTGWGRLSRKLINGIRDKQSGKTILDFLKSDGFANRNFMQLIHDDSLTFKEDIQKAQVSGQGDSLHEHIANLAGSPAIKKGILQTVKVVDELVKVMGRHKPENIVIEMARENQTTQKGQKNSRERMKRIEEGIKELGSQILKEHPVENTQLQNEKLYLYYLQNGRDMYVDQELDINRLSDYDVDHIVPQSFLKDDSIDNKVLTRSDKARGKSDNVPSEEVVKKMKNYWRQLLNAKLITQRKFDNLTKAERGGLSELDKAGFIKRQLVETRQITKHVAQILDSRMNTKYDENDKLIREVKVITLKSKLVSDFRKDFQFYKVREINNYHHAHDAYLNAVVGTALIKKYPKLESEFVYGDYKVYDVRKMIAKSEQEIGKATAKYFFYSNIMNFFKTEITLANGEIRKRPLIETNGETGEIVWDKGRDFATVRKVLSMPQVNIVKKTEVQTGGFSKESILPKRNSDKLIARKKDWDPKKYGGFDSPTVAYSVLVVAKVEKGKSKKLKSVKELLGITIMERSSFEKNPIDFLEAKGYKEVKKDLIIKLPKYSLFELENGRKRMLASAGELQKGNELALPSKYVNFLYLASHYEKLKGSPEDNEQKQLFVEQHKHYLDEIIEQISEFSKRVILADANLDKVLSAYNKHRDKPIREQAENIIHLFTLTNLGAPAAFKYFDTTIDRKRYTSTKEVLDATLIHQSITGLYETRIDLSQLGGDGGEAAAKGGGPAPGGVLNLEEEYRLHEKPVPSSIDPSWLQLFPTVWAERAGMGLANQVPPVVVELRSGASPVAVRQYPMSKEAREGIRPHIQKFLDLGVLVPCRSPWNTPLLPVKKPGTNDYRPVQDLREINKRVQDIHPTVPNPYNLLSSLPPSYTWYSVLDLKDAFFCLRLHPNSQPLFAFEWKDPEKGNTGQLTWTRLPQGFKNSPTLFDEALHRDLAPFRALNPQVVLLQYVDDLLVAAPTYEDCKKGTQKLLQELSKLGYRVSAKKAQLCQREVTYLGYLLKEGKRWLTPARKATVMKIPVPTTPRQVREFLGTAGFCRLWIPGFASLAAPLYPLTKESIPFIWTEEHQQAFDHIKKALLSAPALALPDLTKPFTLYIDERAGVARGVLTQTLGPWRRPVAYLSKKLDPVASGWPTCLKAVAAVALLLKDADKLTLGQNVTVIASHSLESIVRQPPDRWMTNARMTHYQSLLLNERVSFAPPAVLNPATLLPVESEATPVHRCSEILAEETGTRRDLEDQPLPGVPTWYTDGSSFITEGKRRAGAPIVDGKRTVWASSLPEGTSAQKAELVALTQALRLAEGKNINIYTDSRYAFATAHIHGAIYKQRGLLTSAGKDIKNKEEILALLEAIHLPRRVAIIHCPGHQRGSNPVATGNRRADEAAKQAALSTRVLAGTTKPAGKRTADGSEFEKRTADGSEFESPKKKAKVE

SEQ ID NO: 7493 - protein, 2218 aa, synthetic construct
MPAAKRVKLDGGDKKYSIGLDIGTNSVGWAVITDEYKVPSKKFKVLGNTDRHSIKKNLIGALLFDSGETAEATRLKRTARRRYTRRKNRICYLQEIFSNEMAKVDDSFFHRLEESFLVEEDKKHERHPIFGNIVDEVAYHEKYPTIYHLRKKLVDSTDKADLRLIYLALAHMIKFRGHFLIEGDLNPDNSDVDKLFIQLVQTYNQLFEENPINASGVDAKAILSARLSKSRRLENLIAQLPGEKKNGLFGNLIALSLGLTPNFKSNFDLAEDAKLQLSKDTYDDDLDNLLAQIGDQYADLFLAAKNLSDAILLSDILRVNTEITKAPLSASMIKRYDEHHQDLTLLKALVRQQLPEKYKEIFFDQSKNGYAGYIDGGASQEEFYKFIKPILEKMDGTEELLVKLNREDLLRKQRTFDNGSIPHQIHLGELHAILRRQEDFYPFLKDNREKIEKILTFRIPYYVGPLARGNSRFAWMTRKSEETITPWNFEEVVDKGASAQSFIERMTNFDKNLPNEKVLPKHSLLYEYFTVYNELTKVKYVTEGMRKPAFLSGEQKKAIVDLLFKTNRKVTVKQLKEDYFKKIECFDSVEISGVEDRFNASLGTYHDLLKIIKDKDFLDNEENEDILEDIVLTLTLFEDREMIEERLKTYAHLFDDKVMKQLKRRRYTGWGRLSRKLINGIRDKQSGKTILDFLKSDGFANRNFMQLIHDDSLTFKEDIQKAQVSGQGDSLHEHIANLAGSPAIKKGILQTVKVVDELVKVMGRHKPENIVIEMARENQTTQKGQKNSRERMKRIEEGIKELGSQILKEHPVENTQLQNEKLYLYYLQNGRDMYVDQELDINRLSDYDVDHIVPQSFLKDDSIDNKVLTRSDKARGKSDNVPSEEVVKKMKNYWRQLLNAKLITQRKFDNLTKAERGGLSELDKAGFIKRQLVETRQITKHVAQILDSRMNTKYDENDKLIREVKVITLKSKLVSDFRKDFQFYKVREINNYHHAHDAYLNAVVGTALIKKYPKLESEFVYGDYKVYDVRKMIAKSEQEIGKATAKYFFYSNIMNFFKTEITLANGEIRKRPLIETNGETGEIVWDKGRDFATVRKVLSMPQVNIVKKTEVQTGGFSKESILPKRNSDKLIARKKDWDPKKYGGFDSPTVAYSVLVVAKVEKGKSKKLKSVKELLGITIMERSSFEKNPIDFLEAKGYKEVKKDLIIKLPKYSLFELENGRKRMLASAGELQKGNELALPSKYVNFLYLASHYEKLKGSPEDNEQKQLFVEQHKHYLDEIIEQISEFSKRVILADANLDKVLSAYNKHRDKPIREQAENIIHLFTLTNLGAPAAFKYFDTTIDRKRYTSTKEVLDATLIHQSITGLYETRIDLSQLGGDGGEAAAKGGGPAPGGTLGDQGSRGSDPLPEPRVTLTVEGIPTEFLVNTGAEHSVLTKPMGKMGSKRTVVAGATGSKVYPWTTKRLLKIGQKQVTHSFLVIPECPAPLLGRDLLTKLKAQIQFSTEGPQVTWEDRPAMCLVLNLEEEYRLHEKPVPPSIDPSWLQLFPMVWAEKAGMGLANQVPPVVVELKSDASPVAVRQYPMSKEAREGIRPHIQRFLDLGILVPCQSPWNTPLLPVKKPGTNDYRPVQDLREVNKRVQDIHPTVPNPYNLLSSLPPSHTWYSVLDLKDAFFCLKLHPNSQPLFAFEWRDPEKGNTGQLTWTRLPQGFKNSPTLFDEALHRDLASFRALNPQVVMLQYVDDLLVAAPTYRDCKEGTRRLLQELSKLGYRVSAKKAQLCREEVTYLGYLLKGGKRWLTPARKATVMKIPTPTTPRQVREFLGTAGFCRLWIPGFASLAAPLYPLTREKVPFTWTEAHQEAFGRIKEALLSAPALALPDLTKPFALYVDEKEGVARGVLTQTLGPWRRPVAYLSKKLDPVASGWPTCLKAIAAVALLLKDADKLTLGQNVLVIAPHNLESIVRQPPDRWMTNARMTHYQSLLLNERVSFAPPAILNPATLLPVESDDTPIHICSEILAEETGTRPDLRDQPLPGVPAWYTDGSSFIMDGRRQAGAAIVDNKRTVWASNLPEGTSAQKAELIALTQALRLAEGKSINIYTDSRYAFATAHVHGAIYKQRGLLTSAGKDIKNKEEILALLEAIHLPKRVAIIHCPGHQRGTDPVATGNRKADEAAKQAAQSTRILTETTKNAGKRTADGSEFEKRTADGSEFESPKKKAKVE

SEQ ID NO: 7494 - protein, 2127 aa, synthetic construct
MPAAKRVKLDGGDKKYSIGLDIGTNSVGWAVITDEYKVPSKKFKVLGNTDRHSIKKNLIGALLFDSGETAEATRLKRTARRRYTRRKNRICYLQEIFSNEMAKVDDSFFHRLEESFLVEEDKKHERHPIFGNIVDEVAYHEKYPTIYHLRKKLVDSTDKADLRLIYLALAHMIKFRGHFLIEGDLNPDNSDVDKLFIQLVQTYNQLFEENPINASGVDAKAILSARLSKSRRLENLIAQLPGEKKNGLFGNLIALSLGLTPNFKSNFDLAEDAKLQLSKDTYDDDLDNLLAQIGDQYADLFLAAKNLSDAILLSDILRVNTEITKAPLSASMIKRYDEHHQDLTLLKALVRQQLPEKYKEIFFDQSKNGYAGYIDGGASQEEFYKFIKPILEKMDGTEELLVKLNREDLLRKQRTFDNGSIPHQIHLGELHAILRRQEDFYPFLKDNREKIEKILTFRIPYYVGPLARGNSRFAWMTRKSEETITPWNFEEVVDKGASAQSFIERMTNFDKNLPNEKVLPKHSLLYEYFTVYNELTKVKYVTEGMRKPAFLSGEQKKAIVDLLFKTNRKVTVKQLKEDYFKKIECFDSVEISGVEDRFNASLGTYHDLLKIIKDKDFLDNEENEDILEDIVLTLTLFEDREMIEERLKTYAHLFDDKVMKQLKRRRYTGWGRLSRKLINGIRDKQSGKTILDFLKSDGFANRNFMQLIHDDSLTFKEDIQKAQVSGQGDSLHEHIANLAGSPAIKKGILQTVKVVDELVKVMGRHKPENIVIEMARENQTTQKGQKNSRERMKRIEEGIKELGSQILKEHPVENTQLQNEKLYLYYLQNGRDMYVDQELDINRLSDYDVDHIVPQSFLKDDSIDNKVLTRSDKARGKSDNVPSEEVVKKMKNYWRQLLNAKLITQRKFDNLTKAERGGLSELDKAGFIKRQLVETRQITKHVAQILDSRMNTKYDENDKLIREVKVITLKSKLVSDFRKDFQFYKVREINNYHHAHDAYLNAVVGTALIKKYPKLESEFVYGDYKVYDVRKMIAKSEQEIGKATAKYFFYSNIMNFFKTEITLANGEIRKRPLIETNGETGEIVWDKGRDFATVRKVLSMPQVNIVKKTEVQTGGFSKESILPKRNSDKLIARKKDWDPKKYGGFDSPTVAYSVLVVAKVEKGKSKKLKSVKELLGITIMERSSFEKNPIDFLEAKGYKEVKKDLIIKLPKYSLFELENGRKRMLASAGELQKGNELALPSKYVNFLYLASHYEKLKGSPEDNEQKQLFVEQHKHYLDEIIEQISEFSKRVILADANLDKVLSAYNKHRDKPIREQAENIIHLFTLTNLGAPAAFKYFDTTIDRKRYTSTKEVLDATLIHQSITGLYETRIDLSQLGGDGGEAAAKGGGPAPGGLLGRDLLTKLKAQIQFSTEGPQVTWEDRPAMCLVLNLEEEYRLHEKPVPPSIDPSWLQLFPMVWAEKAGMGLANQVPPVVVELKSDASPVAVRQYPMSKEAREGIRPHIQRFLDLGILVPCQSPWNTPLLPVKKPGTNDYRPVQDLREVNKRVQDIHPTVPNPYNLLSSLPPSHTWYSVLDLKDAFFCLKLHPNSQPLFAFEWRDPEKGNTGQLTWTRLPQGFKNSPTLFNEALHRDLASFRALNPQVVMLQYVDDLLVAAPTYRDCKEGTRRLLQELSKLGYRVSAKKAQLCREEVTYLGYLLKGGKRWLTPARKATVMKIPTPTTPRQVREFLGKAGFCRLFIPGFASLAAPLYPLTRPKVPFTWTEAHQEAFGRIKEALLSAPALALPDLTKPFALYVDEKEGVARGVLTQTLGPWRRPVAYLSKKLDPVASGWPTCLKAIAAVALLLKDADKLTLGQNVLVIAPHNLESIVRQPPDRWMTNARMTHYQSLLLNERVSFAPPAILNPATLLPVESDDTPIHICSEILAEETGTRPDLRDQPLPGVPAWYTDGSSFIMDGRRQAGAAIVDNKRTVWASNLPEGTSAQKAELIALTQALRLAEGKSINIYTDSRYAFATAHVHGAIYKQRGWLTSAGKDIKNKEEILALLEAIHLPKRVAIIHCPGHQRGTDPVATGNRKADEAAKQAAQSTRILTETTKNAGKRTADGSEFEKRTADGSEFESPKKKAKVE

SEQ ID NO: 7495 - protein, 2096 aa, synthetic construct
MPAAKRVKLDGGDKKYSIGLDIGTNSVGWAVITDEYKVPSKKFKVLGNTDRHSIKKNLIGALLFDSGETAEATRLKRTARRRYTRRKNRICYLQEIFSNEMAKVDDSFFHRLEESFLVEEDKKHERHPIFGNIVDEVAYHEKYPTIYHLRKKLVDSTDKADLRLIYLALAHMIKFRGHFLIEGDLNPDNSDVDKLFIQLVQTYNQLFEENPINASGVDAKAILSARLSKSRRLENLIAQLPGEKKNGLFGNLIALSLGLTPNFKSNFDLAEDAKLQLSKDTYDDDLDNLLAQIGDQYADLFLAAKNLSDAILLSDILRVNTEITKAPLSASMIKRYDEHHQDLTLLKALVRQQLPEKYKEIFFDQSKNGYAGYIDGGASQEEFYKFIKPILEKMDGTEELLVKLNREDLLRKQRTFDNGSIPHQIHLGELHAILRRQEDFYPFLKDNREKIEKILTFRIPYYVGPLARGNSRFAWMTRKSEETITPWNFEEVVDKGASAQSFIERMTNFDKNLPNEKVLPKHSLLYEYFTVYNELTKVKYVTEGMRKPAFLSGEQKKAIVDLLFKTNRKVTVKQLKEDYFKKIECFDSVEISGVEDRFNASLGTYHDLLKIIKDKDFLDNEENEDILEDIVLTLTLFEDREMIEERLKTYAHLFDDKVMKQLKRRRYTGWGRLSRKLINGIRDKQSGKTILDFLKSDGFANRNFMQLIHDDSLTFKEDIQKAQVSGQGDSLHEHIANLAGSPAIKKGILQTVKVVDELVKVMGRHKPENIVIEMARENQTTQKGQKNSRERMKRIEEGIKELGSQILKEHPVENTQLQNEKLYLYYLQNGRDMYVDQELDINRLSDYDVDHIVPQSFLKDDSIDNKVLTRSDKARGKSDNVPSEEVVKKMKNYWRQLLNAKLITQRKFDNLTKAERGGLSELDKAGFIKRQLVETRQITKHVAQILDSRMNTKYDENDKLIREVKVITLKSKLVSDFRKDFQFYKVREINNYHHAHDAYLNAVVGTALIKKYPKLESEFVYGDYKVYDVRKMIAKSEQEIGKATAKYFFYSNIMNFFKTEITLANGEIRKRPLIETNGETGEIVWDKGRDFATVRKVLSMPQVNIVKKTEVQTGGFSKESILPKRNSDKLIARKKDWDPKKYGGFDSPTVAYSVLVVAKVEKGKSKKLKSVKELLGITIMERSSFEKNPIDFLEAKGYKEVKKDLIIKLPKYSLFELENGRKRMLASAGELQKGNELALPSKYVNFLYLASHYEKLKGSPEDNEQKQLFVEQHKHYLDEIIEQISEFSKRVILADANLDKVLSAYNKHRDKPIREQAENIIHLFTLTNLGAPAAFKYFDTTIDRKRYTSTKEVLDATLIHQSITGLYETRIDLSQLGGDGGEAAAKGGGPAPGGTLGIEDEYRLHETSTEPDVSLGSTWLSDFPQAWAETGGMGLAVRQAPLIIPLKATSTPVSIQQYPMSHEARLGIKPHIQRLLDQGILVPCQSPWNTPLLPVKKPGTNDYRPVQDLREVNKRVEDIHPTVPNPYNLLSGLPPSHQWYTVLDLKDAFFCLRLHPTSQPLFAFEWRDPGMGISGQLTWTRLPQGFKNSPTLFNEALHRDLADFRIQHPDLILLQYVDDILLAATSELDCQQGTRALLQTLGDLGYRASAKKAQICQKQVKYLGYLLREGQRWLTEARKETVMGQPVPKTPRQLREFLGTAGFCRLWIPGFAEMAAPLYPLTKPGTLFSWGPDQQKAYQEIKQALLTAPALGLPDLTKPFELFVDEKQGYAKGVLTQKLGPWRRPVAYLSKKLDPVAAGWPPCLRMVAAIAVLTKDAGKLTMGQPLVILAPHAVEALVKQPPDRWLSNARMTHYQAMLLDTDRVQFGPVVALNPATLLPLPEEGAPHDCLEILAETHGTRPDLTDQPIPDADHTWYTDGSSFLQEGQRKAGAAVTTETEVIWAGALPAGTSAQRAELIALTQALKMAEGKRLNVYTDSRYAFATAHIHGEIYRRRGWLTSEGREIKNKSEILALLKALFLPKRLSIIHCLGHQKGDSAEARGNRLADQAAREAAIKTPPDTSTLLAGKRTADGSEFEKRTADGSEFESPKKKAKVE

SEQ ID NO: 7496 - protein, 2096 aa, synthetic construct; identical to SEQ ID NO: 4535

SEQ ID NO: 7497 - protein, 2096 aa, synthetic construct; identical to SEQ ID NO: 4535

SEQ ID NO: 7498 - protein, 2176 aa, synthetic construct
MPAAKRVKLDGGDKKYSIGLDIGTNSVGWAVITDEYKVPSKKFKVLGNTDRHSIKKNLIGALLFDSGETAEATRLKRTARRRYTRRKNRICYLQEIFSNEMAKVDDSFFHRLEESFLVEEDKKHERHPIFGNIVDEVAYHEKYPTIYHLRKKLVDSTDKADLRLIYLALAHMIKFRGHFLIEGDLNPDNSDVDKLFIQLVQTYNQLFEENPINASGVDAKAILSARLSKSRRLENLIAQLPGEKKNGLFGNLIALSLGLTPNFKSNFDLAEDAKLQLSKDTYDDDLDNLLAQIGDQYADLFLAAKNLSDAILLSDILRVNTEITKAPLSASMIKRYDEHHQDLTLLKALVRQQLPEKYKEIFFDQSKNGYAGYIDGGASQEEFYKFIKPILEKMDGTEELLVKLNREDLLRKQRTFDNGSIPHQIHLGELHAILRRQEDFYPFLKDNREKIEKILTFRIPYYVGPLARGNSRFAWMTRKSEETITPWNFEEVVDKGASAQSFIERMTNFDKNLPNEKVLPKHSLLYEYFTVYNELTKVKYVTEGMRKPAFLSGEQKKAIVDLLFKTNRKVTVKQLKEDYFKKIECFDSVEISGVEDRFNASLGTYHDLLKIIKDKDFLDNEENEDILEDIVLTLTLFEDREMIEERLKTYAHLFDDKVMKQLKRRRYTGWGRLSRKLINGIRDKQSGKTILDFLKSDGFANRNFMQLIHDDSLTFKEDIQKAQVSGQGDSLHEHIANLAGSPAIKKGILQTVKVVDELVKVMGRHKPENIVIEMARENQTTQKGQKNSRERMKRIEEGIKELGSQILKEHPVENTQLQNEKLYLYYLQNGRDMYVDQELDINRLSDYDVDHIVPQSFLKDDSIDNKVLTRSDKARGKSDNVPSEEVVKKMKNYWRQLLNAKLITQRKFDNLTKAERGGLSELDKAGFIKRQLVETRQITKHVAQILDSRMNTKYDENDKLIREVKVITLKSKLVSDFRKDFQFYKVREINNYHHAHDAYLNAVVGTALIKKYPKLESEFVYGDYKVYDVRKMIAKSEQEIGKATAKYFFYSNIMNFFKTEITLANGEIRKRPLIETNGETGEIVWDKGRDFATVRKVLSMPQVNIVKKTEVQTGGFSKESILPKRNSDKLIARKKDWDPKKYGGFDSPTVAYSVLVVAKVEKGKSKKLKSVKELLGITIMERSSFEKNPIDFLEAKGYKEVKKDLIIKLPKYSLFELENGRKRMLASAGELQKGNELALPSKYVNFLYLASHYEKLKGSPEDNEQKQLFVEQHKHYLDEIIEQISEFSKRVILADANLDKVLSAYNKHRDKPIREQAENIIHLFTLTNLGAPAAFKYFDTTIDRKRYTSTKEVLDATLIHQSITGLYETRIDLSQLGGDGGEAAAKGGGPAPGGMNPLQLLQPLPAEVKGTKLLAHWNSGATITCIPESFLEDEQPIKQTLIKTIHGEKQQNVYYLTFKVKGRKVEAEVIASPYEYILLSPTDVPWLTQQPLQLTILVPLQEYQDRILNKTALPEEQKQQLKALFTKYDNLWQHWENQVGHRKIRPHNIATGDYPPRPQKQYPINPKAKPSIQIVIDDLLKQGVLTPQNSTMNTPVYPVPKPDGRWRMVLDYREVNKTIPLTAAQNQHSAGILATIVRQKYKTTLDLANGFWAHPITPDSYWLTAFTWQGKQYCWTRLPQGFLNSPALFTADAVDLLKEVPNVQVYVDDIYLSHDNPHEHIQQLEKVFQILLQAGYVVSLKKSEIGQRTVEFLGFNITKEGRGLTDTFKTKLLNVTPPKDLKQLQSILGLLNFARNFIPNFAELVQTLYNLIASSKGKYIEWTEDNTKQLNKVIEALNTASNLEERLPDQRLVIKVNTSPSAGYVRYYNESGKKPIMYLNYVFSKAELKFSMLEKLLTTMHKALIKAMDLAMGQEILVYSPIVSMTKIQKTPLPERKALPIRWITWMTYLEDPRIQFHYDKTLPELKHIPDVYTSSIPPLKHPSQYEGVFCTDGSAIKSPDPTKSNNAGMGIVHAIYNPEYKILNQWSIPLGHHTAQMAEIAAVEFACKKALKVPGPVLVITDSFYVAESANKELPYWKSNGFVNNKKEPLKHISKWKSIAECLSIKPDITIQHEKGHQPINTSIHTEGNALADKLATQGSYVVNAGKRTADGSEFEKRTADGSEFESPKKKAKVE

SEQ ID NO: 7499 - protein, 2094 aa, synthetic construct
MPAAKRVKLDGGDKKYSIGLDIGTNSVGWAVITDEYKVPSKKFKVLGNTDRHSIKKNLIGALLFDSGETAEATRLKRTARRRYTRRKNRICYLQEIFSNEMAKVDDSFFHRLEESFLVEEDKKHERHPIFGNIVDEVAYHEKYPTIYHLRKKLVDSTDKADLRLIYLALAHMIKFRGHFLIEGDLNPDNSDVDKLFIQLVQTYNQLFEENPINASGVDAKAILSARLSKSRRLENLIAQLPGEKKNGLFGNLIALSLGLTPNFKSNFDLAEDAKLQLSKDTYDDDLDNLLAQIGDQYADLFLAAKNLSDAILLSDILRVNTEITKAPLSASMIKRYDEHHQDLTLLKALVRQQLPEKYKEIFFDQSKNGYAGYIDGGASQEEFYKFIKPILEKMDGTEELLVKLNREDLLRKQRTFDNGSIPHQIHLGELHAILRRQEDFYPFLKDNREKIEKILTFRIPYYVGPLARGNSRFAWMTRKSEETITPWNFEEVVDKGASAQSFIERMTNFDKNLPNEKVLPKHSLLYEYFTVYNELTKVKYVTEGMRKPAFLSGEQKKAIVDLLFKTNRKVTVKQLKEDYFKKIECFDSVEISGVEDRFNASLGTYHDLLKIIKDKDFLDNEENEDILEDIVLTLTLFEDREMIEERLKTYAHLFDDKVMKQLKRRRYTGWGRLSRKLINGIRDKQSGKTILDFLKSDGFANRNFMQLIHDDSLTFKEDIQKAQVSGQGDSLHEHIANLAGSPAIKKGILQTVKVVDELVKVMGRHKPENIVIEMARENQTTQKGQKNSRERMKRIEEGIKELGSQILKEHPVENTQLQNEKLYLYYLQNGRDMYVDQELDINRLSDYDVDHIVPQSFLKDDSIDNKVLTRSDKARGKSDNVPSEEVVKKMKNYWRQLLNAKLITQRKFDNLTKAERGGLSELDKAGFIKRQLVETRQITKHVAQILDSRMNTKYDENDKLIREVKVITLKSKLVSDFRKDFQFYKVREINNYHHAHDAYLNAVVGTALIKKYPKLESEFVYGDYKVYDVRKMIAKSEQEIGKATAKYFFYSNIMNFFKTEITLANGEIRKRPLIETNGETGEIVWDKGRDFATVRKVLSMPQVNIVKKTEVQTGGFSKESILPKRNSDKLIARKKDWDPKKYGGFDSPTVAYSVLVVAKVEKGKSKKLKSVKELLGITIMERSSFEKNPIDFLEAKGYKEVKKDLIIKLPKYSLFELENGRKRMLASAGELQKGNELALPSKYVNFLYLASHYEKLKGSPEDNEQKQLFVEQHKHYLDEIIEQISEFSKRVILADANLDKVLSAYNKHRDKPIREQAENIIHLFTLTNLGAPAAFKYFDTTIDRKRYTSTKEVLDATLIHQSITGLYETRIDLSQLGGDGGEAAAKGGGPAPGGVLNLEEEYRLHEKPVPSSIDPSWLQLFPTVWAERAGMGLANQVPPVVVELRSGASPVAVRQYPMSKEAREGIRPHIQRFLDLGVLVPCQSPWNTPLLPVKKPGTNDYRPVQDLREINKRVQDIHPTVPNPYNLLSSLPPSHTWYSVLDLKDAFFCLKLHPNSQPLFAFEWRDPEKGNTGQLTWTRLPQGFKNSPTLFNEALHRDLAPFRALNPQVVLLQYVDDLLVAAPTYRDCKEGTQKLLQELSKLGYRVSAKKAQLCQKEVTYLGYLLKEGKRWLTPARKATVMKIPPPTTPRQVREFLGKAGFCRLFIPGFASLAAPLYPLTKPSIPFIWTEEHQKAFDRIKEALLSAPALALPDLTKPFTLYVDERAGVARGVLTQTLGPWRRPVAYLSKKLDPVASGWPTCLKAVAAVALLLKDADKLTLGQNVTVIASHSLESIVRQPPDRWMTNARMTHYQSLLLNERVSFAPPAVLNPATLLPVESEATPVHRCSEILAEETGTRRDLKDQPLPGVPAWYTDGSSFIAEGKRRAGAAIVDGKRTVWASSLPEGTSAQKAELVALTQALRLAEGKDINIYTDSRYAFATAHIHGAIYKQRGWLTSAGKDIKNKEEILALLEAIHLPKRVAIIHCPGHQKGNDPVATGNRRADEAAKQAALSTRVLAETTKPAGKRTADGSEFEKRTADGSEFESPKKKAKVE

SEQ ID NO: 7500 - protein, 2098 aa, synthetic construct
MPAAKRVKLDGGDKKYSIGLDIGTNSVGWAVITDEYKVPSKKFKVLGNTDRHSIKKNLIGALLFDSGETAEATRLKRTARRRYTRRKNRICYLQEIFSNEMAKVDDSFFHRLEESFLVEEDKKHERHPIFGNIVDEVAYHEKYPTIYHLRKKLVDSTDKADLRLIYLALAHMIKFRGHFLIEGDLNPDNSDVDKLFIQLVQTYNQLFEENPINASGVDAKAILSARLSKSRRLENLIAQLPGEKKNGLFGNLIALSLGLTPNFKSNFDLAEDAKLQLSKDTYDDDLDNLLAQIGDQYADLFLAAKNLSDAILLSDILRVNTEITKAPLSASMIKRYDEHHQDLTLLKALVRQQLPEKYKEIFFDQSKNGYAGYIDGGASQEEFYKFIKPILEKMDGTEELLVKLNREDLLRKQRTFDNGSIPHQIHLGELHAILRRQEDFYPFLKDNREKIEKILTFRIPYYVGPLARGNSRFAWMTRKSEETITPWNFEEVVDKGASAQSFIERMTNFDKNLPNEKVLPKHSLLYEYFTVYNELTKVKYVTEGMRKPAFLSGEQKKAIVDLLFKTNRKVTVKQLKEDYFKKIECFDSVEISGVEDRFNASLGTYHDLLKIIKDKDFLDNEENEDILEDIVLTLTLFEDREMIEERLKTYAHLFDDKVMKQLKRRRYTGWGRLSRKLINGIRDKQSGKTILDFLKSDGFANRNFMQLIHDDSLTFKEDIQKAQVSGQGDSLHEHIANLAGSPAIKKGILQTVKVVDELVKVMGRHKPENIVIEMARENQTTQKGQKNSRERMKRIEEGIKELGSQILKEHPVENTQLQNEKLYLYYLQNGRDMYVDQELDINRLSDYDVDHIVPQSFLKDDSIDNKVLTRSDKARGKSDNVPSEEVVKKMKNYWRQLLNAKLITQRKFDNLTKAERGGLSELDKAGFIKRQLVETRQITKHVAQILDSRMNTKYDENDKLIREVKVITLKSKLVSDFRKDFQFYKVREINNYHHAHDAYLNAVVGTALIKKYPKLESEFVYGDYKVYDVRKMIAKSEQEIGKATAKYFFYSNIMNFFKTEITLANGEIRKRPLIETNGETGEIVWDKGRDFATVRKVLSMPQVNIVKKTEVQTGGFSKESILPKRNSDKLIARKKDWDPKKYGGFDSPTVAYSVLVVAKVEKGKSKKLKSVKELLGITIMERSSFEKNPIDFLEAKGYKEVKKDLIIKLPKYSLFELENGRKRMLASAGELQKGNELALPSKYVNFLYLASHYEKLKGSPEDNEQKQLFVEQHKHYLDEIIEQISEFSKRVILADANLDKVLSAYNKHRDKPIREQAENIIHLFTLTNLGAPAAFKYFDTTIDRKRYTSTKEVLDATLIHQSITGLYETRIDLSQLGGDGGEAAAKPAPGGGGGTAPLEEEYRLFLEAPIQNVTLLEQWKREIPKVWAEINPPGLASTQAPIHVQLLSTALPVRVRQYPITLEAKRSLRETIRKFRAAGILRPVHSPWNTPLLPVRKSGTSEYRMVQDLREVNKRVETIHPTVPNPYTLLSLLPPDRIWYSVLDLKDAFFCIPLAPESQLIFAFEWADAEEGESGQLTWTRLPQGFKNSPTLFNEALNRDLQGFRLDHPSVSLLQYVDDLLIAADTQAACLSATRDLLMTLAELGYRVSGKKAQLCQEEVTYLGFKIHKGSRSLSNSRTQAILQIPVPKTKRQVREFLGKIGYCRLFIPGFAELAQPLYAATRPGNDPLVWGEKEEEAFQSLKLALTQPPALALPSLDKPFQLFVEETSGAAKGVLTQALGPWKRPVAYLSKRLDPVAAGWPRCLRAIAAAALLTREASKLTFGQDIEITSSHNLESLLRSPPDKWLTNARITQYQVLLLDPPRVRFKQTAALNPATLLPETDDTLPIHHCLDTLDSLTSTRPDLTDQPLAQAEATLFTDGSSYIRDGKRYAGAAVVTLDSVIWAEPLPIGTSAQKAELIALTKALEWSKDKSVNIYTDSRYAFATLHVHGMIYRERGWLTAGGKAIKNAPEILALLTAVWLPKRVAVMHCKGHQKDDAPTSTGNRRADEVAREVAIRPLSTQATISAGKRTADGSEFEKRTADGSEFESPKKKAKVE

SEQ ID NO: 7501 - protein, 2102 aa, synthetic construct
MPAAKRVKLDGGDKKYSIGLDIGTNSVGWAVITDEYKVPSKKFKVLGNTDRHSIKKNLIGALLFDSGETAEATRLKRTARRRYTRRKNRICYLQEIFSNEMAKVDDSFFHRLEESFLVEEDKKHERHPIFGNIVDEVAYHEKYPTIYHLRKKLVDSTDKADLRLIYLALAHMIKFRGHFLIEGDLNPDNSDVDKLFIQLVQTYNQLFEENPINASGVDAKAILSARLSKSRRLENLIAQLPGEKKNGLFGNLIALSLGLTPNFKSNFDLAEDAKLQLSKDTYDDDLDNLLAQIGDQYADLFLAAKNLSDAILLSDILRVNTEITKAPLSASMIKRYDEHHQDLTLLKALVRQQLPEKYKEIFFDQSKNGYAGYIDGGASQEEFYKFIKPILEKMDGTEELLVKLNREDLLRKQRTFDNGSIPHQIHLGELHAILRRQEDFYPFLKDNREKIEKILTFRIPYYVGPLARGNSRFAWMTRKSEETITPWNFEEVVDKGASAQSFIERMTNFDKNLPNEKVLPKHSLLYEYFTVYNELTKVKYVTEGMRKPAFLSGEQKKAIVDLLFKTNRKVTVKQLKEDYFKKIECFDSVEISGVEDRFNASLGTYHDLLKIIKDKDFLDNEENEDILEDIVLTLTLFEDREMIEERLKTYAHLFDDKVMKQLKRRRYTGWGRLSRKLINGIRDKQSGKTILDFLKSDGFANRNFMQLIHDDSLTFKEDIQKAQVSGQGDSLHEHIANLAGSPAIKKGILQTVKVVDELVKVMGRHKPENIVIEMARENQTTQKGQKNSRERMKRIEEGIKELGSQILKEHPVENTQLQNEKLYLYYLQNGRDMYVDQELDINRLSDYDVDHIVPQSFLKDDSIDNKVLTRSDKARGKSDNVPSEEVVKKMKNYWRQLLNAKLITQRKFDNLTKAERGGLSELDKAGFIKRQLVETRQITKHVAQILDSRMNTKYDENDKLIREVKVITLKSKLVSDFRKDFQFYKVREINNYHHAHDAYLNAVVGTALIKKYPKLESEFVYGDYKVYDVRKMIAKSEQEIGKATAKYFFYSNIMNFFKTEITLANGEIRKRPLIETNGETGEIVWDKGRDFATVRKVLSMPQVNIVKKTEVQTGGFSKESILPKRNSDKLIARKKDWDPKKYGGFDSPTVAYSVLVVAKVEKGKSKKLKSVKELLGITIMERSSFEKNPIDFLEAKGYKEVKKDLIIKLPKYSLFELENGRKRMLASAGELQKGNELALPSKYVNFLYLASHYEKLKGSPEDNEQKQLFVEQHKHYLDEIIEQISEFSKRVILADANLDKVLSAYNKHRDKPIREQAENIIHLFTLTNLGAPAAFKYFDTTIDRKRYTSTKEVLDATLIHQSITGLYETRIDLSQLGGDGGEAAAKPAPGGGGGTVSLQDEHRLFDIPVTTSLPDVWLQDFPQAWAETGGLGRAKCQAPIIIDLKPTAVPVSIKQYPMSLEAHMGIRQHIIKFLELGVLRPCRSPWNTPLLPVKKPGTQDYRPVQDLREINKRTVDIHPTVPNPYNLLSTLKPDYSWYTVLDLKDAFFCLPLAPQSQELFAFEWKDPERGISGQLTWTRLPQGFKNSPTLFNEALHRDLTDFRTQHPEVTLLQYVDDLLLAAPTKKACTQGTRHLLQELGEKGYRASAKKAQICQTKVTYLGYILSEGKRWLTPGRIETVARIPPPRNPREVREFLGKAGFCRLFIPGFAELAAPLYALTKPSTPFTWQTEHQLAFEALKKALLSAPALGLPDTSKPFTLFLDERQGIAKGVLTQKLGPWKRPVAYLSKKLDPVAAGWPPCLRIMAATAMLVKDSAKLTLGQPLTVITPHTLEAIVRQPPDRWITNARLTHYQALLLDTDRVQFGPPVTLNPATLLPVPENQPSPHDCRQVLAETHGTREDLKDQELPDADHTWYTDGSSYLDSGTRRAGAAVVDGHNTIWAQSLPPGTSAQKAELIALTKALELSKGKKANIYTDSRYAFATAHTHGSIYERRGWLTSEGKEIKNKAEIIALLKALFLPQEVAIIHCPGHQKGQDPVAVGNRQADRVARQAAMAEVLTLATEPDNTSHITAGKRTADGSEFEKRTADGSEFESPKKKAKVE

SEQ ID NO: 7502 - protein, 2095 aa, synthetic construct
MPAAKRVKLDGGDKKYSIGLDIGTNSVGWAVITDEYKVPSKKFKVLGNTDRHSIKKNLIGALLFDSGETAEATRLKRTARRRYTRRKNRICYLQEIFSNEMAKVDDSFFHRLEESFLVEEDKKHERHPIFGNIVDEVAYHEKYPTIYHLRKKLVDSTDKADLRLIYLALAHMIKFRGHFLIEGDLNPDNSDVDKLFIQLVQTYNQLFEENPINASGVDAKAILSARLSKSRRLENLIAQLPGEKKNGLFGNLIALSLGLTPNFKSNFDLAEDAKLQLSKDTYDDDLDNLLAQIGDQYADLFLAAKNLSDAILLSDILRVNTEITKAPLSASMIKRYDEHHQDLTLLKALVRQQLPEKYKEIFFDQSKNGYAGYIDGGASQEEFYKFIKPILEKMDGTEELLVKLNREDLLRKQRTFDNGSIPHQIHLGELHAILRRQEDFYPFLKDNREKIEKILTFRIPYYVGPLARGNSRFAWMTRKSEETITPWNFEEVVDKGASAQSFIERMTNFDKNLPNEKVLPKHSLLYEYFTVYNELTKVKYVTEGMRKPAFLSGEQKKAIVDLLFKTNRKVTVKQLKEDYFKKIECFDSVEISGVEDRFNASLGTYHDLLKIIKDKDFLDNEENEDILEDIVLTLTLFEDREMIEERLKTYAHLFDDKVMKQLKRRRYTGWGRLSRKLINGIRDKQSGKTILDFLKSDGFANRNFMQLIHDDSLTFKEDIQKAQVSGQGDSLHEHIANLAGSPAIKKGILQTVKVVDELVKVMGRHKPENIVIEMARENQTTQKGQKNSRERMKRIEEGIKELGSQILKEHPVENTQLQNEKLYLYYLQNGRDMYVDQELDINRLSDYDVDHIVPQSFLKDDSIDNKVLTRSDKARGKSDNVPSEEVVKKMKNYWRQLLNAKLITQRKFDNLTKAERGGLSELDKAGFIKRQLVETRQITKHVAQILDSRMNTKYDENDKLIREVKVITLKSKLVSDFRKDFQFYKVREINNYHHAHDAYLNAVVGTALIKKYPKLESEFVYGDYKVYDVRKMIAKSEQEIGKATAKYFFYSNIMNFFKTEITLANGEIRKRPLIETNGETGEIVWDKGRDFATVRKVLSMPQVNIVKKTEVQTGGFSKESILPKRNSDKLIARKKDWDPKKYGGFDSPTVAYSVLVVAKVEKGKSKKLKSVKELLGITIMERSSFEKNPIDFLEAKGYKEVKKDLIIKLPKYSLFELENGRKRMLASAGELQKGNELALPSKYVNFLYLASHYEKLKGSPEDNEQKQLFVEQHKHYLDEIIEQISEFSKRVILADANLDKVLSAYNKHRDKPIREQAENIIHLFTLTNLGAPAAFKYFDTTIDRKRYTSTKEVLDATLIHQSITGLYETRIDLSQLGGDGGEAAAKPAPGGGGGTLQLEEEYRLFEPESTQKQEMDIWLKNFPQAWAETGGMGTAHCQAPVLIQLKATATPISIRQYPMPHEAYQGIKPHIRRMLDQGILKPCQSPWNTPLLPVKKPGTEDYRPVQDLREVNKRVEDIHPTVPNPYNLLSTLPPSHPWYTVLDLKDAFFCLRLHSESQLLFAFEWRDPEIGLSGQLTWTRLPQGFKNSPTLFNEALHSDLADFRVRYPALVLLQYVDDLLLAAATRTECLEGTKALLETLGNKGYRASAKKAQICLQEVTYLGYSLKDGQRWLTKARKEAILSIPVPKNSRQVREFLGKAGYCRLFIPGFAELAAPLYPLTRPGTLFQWGTEQQLAFEDIKKALLSSPALGLPDITKPFELFIDENSGFAKGVLVQKLGPWKRPVAYLSKKLDTVASGWPPCLRMVAAIAILVKDAGKLTLGQPLTILTSHPVEALVRQPPNKWLSNARMTHYQAMLLDAERVHFGPTVSLNPATLLPLPSGGNHHDCLQILAETHGTRPDLTDQPLPDADLTWYTDGSSFIRNGEREAGAAVTTESEVIWAAPLPPGTSAQRAELIALTQALKMAEGKKLTVYTDSRYAFATTHVHGEIYRRRGWLTSEGKEIKNKNEILALLEALFLPKRLSIIHCPGHQKGDSPQAKGNRLADDTAKKAATETHSSLTVLPAGKRTADGSEFEKRTADGSEFESPKKKAKVE

SEQ ID NO: 7503 - protein, 2176 aa, synthetic construct
MPAAKRVKLDGGDKKYSIGLDIGTNSVGWAVITDEYKVPSKKFKVLGNTDRHSIKKNLIGALLFDSGETAEATRLKRTARRRYTRRKNRICYLQEIFSNEMAKVDDSFFHRLEESFLVEEDKKHERHPIFGNIVDEVAYHEKYPTIYHLRKKLVDSTDKADLRLIYLALAHMIKFRGHFLIEGDLNPDNSDVDKLFIQLVQTYNQLFEENPINASGVDAKAILSARLSKSRRLENLIAQLPGEKKNGLFGNLIALSLGLTPNFKSNFDLAEDAKLQLSKDTYDDDLDNLLAQIGDQYADLFLAAKNLSDAILLSDILRVNTEITKAPLSASMIKRYDEHHQDLTLLKALVRQQLPEKYKEIFFDQSKNGYAGYIDGGASQEEFYKFIKPILEKMDGTEELLVKLNREDLLRKQRTFDNGSIPHQIHLGELHAILRRQEDFYPFLKDNREKIEKILTFRIPYYVGPLARGNSRFAWMTRKSEETITPWNFEEVVDKGASAQSFIERMTNFDKNLPNEKVLPKHSLLYEYFTVYNELTKVKYVTEGMRKPAFLSGEQKKAIVDLLFKTNRKVTVKQLKEDYFKKIECFDSVEISGVEDRFNASLGTYHDLLKIIKDKDFLDNEENEDILEDIVLTLTLFEDREMIEERLKTYAHLFDDKVMKQLKRRRYTGWGRLSRKLINGIRDKQSGKTILDFLKSDGFANRNFMQLIHDDSLTFKEDIQKAQVSGQGDSLHEHIANLAGSPAIKKGILQTVKVVDELVKVMGRHKPENIVIEMARENQTTQKGQKNSRERMKRIEEGIKELGSQILKEHPVENTQLQNEKLYLYYLQNGRDMYVDQELDINRLSDYDVDHIVPQSFLKDDSIDNKVLTRSDKARGKSDNVPSEEVVKKMKNYWRQLLNAKLITQRKFDNLTKAERGGLSELDKAGFIKRQLVETRQITKHVAQILDSRMNTKYDENDKLIREVKVITLKSKLVSDFRKDFQFYKVREINNYHHAHDAYLNAVVGTALIKKYPKLESEFVYGDYKVYDVRKMIAKSEQEIGKATAKYFFYSNIMNFFKTEITLANGEIRKRPLIETNGETGEIVWDKGRDFATVRKVLSMPQVNIVKKTEVQTGGFSKESILPKRNSDKLIARKKDWDPKKYGGFDSPTVAYSVLVVAKVEKGKSKKLKSVKELLGITIMERSSFEKNPIDFLEAKGYKEVKKDLIIKLPKYSLFELENGRKRMLASAGELQKGNELALPSKYVNFLYLASHYEKLKGSPEDNEQKQLFVEQHKHYLDEIIEQISEFSKRVILADANLDKVLSAYNKHRDKPIREQAENIIHLFTLTNLGAPAAFKYFDTTIDRKRYTSTKEVLDATLIHQSITGLYETRIDLSQLGGDGGEAAAKPAPGGGGGMNPLQLLQPLPAEIKGTKLLAHWNSGATITCIPESFLEDEQPIKKTLIKTIHGEKQQNVYYVTFKVKGRKVEAEVIASPYEYILLSPTDVPWLTQQPLQLTILVPLQEYQEKILSKTALPEDQKQQLKTLFVKYDNLWQHWENQVGHRKIRPHNIATGDYPPRPQKQYPINPKAKPSIQIVIDDLLKQGVLTPQNSTMNTPVYPVPKPDGRWRMVLDYREVNKTIPLTAAQNQHSAGILATIVRQKYKTTLDLANGFWAHPITPESYWLTAFTWQGKQYCWTRLPQGFLNSPALFNADVVDLLKEIPNVQVYVDDIYLSHDDPKEHVQQLEKVFQILLQAGYVVSLKKSEIGQKTVEFLGFNITKEGRGLTDTFKTKLLNITPPKDLKQLQSILGLLNFARNFIPNFAELVQPLYNLIAPAKGKYIEWSEENTKQLNMVIEALNTASNLEERLPEQRLVIKVNTSPSAGYVRYYNETGKKPIMYLNYVFSKAELKFSMLEKLLTTMHKALIKAMDLAMGQEILVYSPIVSMTKIQKTPLPERKALPIRWITWMTYLEDPRIQFHYDKTLPELKHIPDVYTSSQSPVKHPSQYEGVFYTDGSAIKSPDPTKSNNAGMGIVHATYKPEYQVLNQWSIPLGNHTAQMAEIAAVEFACKKALKIPGPVLVITDSFYVAESANKELPYWKSNGFVNNKKKPLKHISKWKSIAECLSMKPDITIQHEKGISLQIPVFILKGNALADKLATQGSYVVNAGKRTADGSEFEKRTADGSEFESPKKKAKVE

SEQ ID NO: 7504 - protein, 2094 aa, synthetic construct
MPAAKRVKLDGGDKKYSIGLDIGTNSVGWAVITDEYKVPSKKFKVLGNTDRHSIKKNLIGALLFDSGETAEATRLKRTARRRYTRRKNRICYLQEIFSNEMAKVDDSFFHRLEESFLVEEDKKHERHPIFGNIVDEVAYHEKYPTIYHLRKKLVDSTDKADLRLIYLALAHMIKFRGHFLIEGDLNPDNSDVDKLFIQLVQTYNQLFEENPINASGVDAKAILSARLSKSRRLENLIAQLPGEKKNGLFGNLIALSLGLTPNFKSNFDLAEDAKLQLSKDTYDDDLDNLLAQIGDQYADLFLAAKNLSDAILLSDILRVNTEITKAPLSASMIKRYDEHHQDLTLLKALVRQQLPEKYKEIFFDQSKNGYAGYIDGGASQEEFYKFIKPILEKMDGTEELLVKLNREDLLRKQRTFDNGSIPHQIHLGELHAILRRQEDFYPFLKDNREKIEKILTFRIPYYVGPLARGNSRFAWMTRKSEETITPWNFEEVVDKGASAQSFIERMTNFDKNLPNEKVLPKHSLLYEYFTVYNELTKVKYVTEGMRKPAFLSGEQKKAIVDLLFKTNRKVTVKQLKEDYFKKIECFDSVEISGVEDRFNASLGTYHDLLKIIKDKDFLDNEENEDILEDIVLTLTLFEDREMIEERLKTYAHLFDDKVMKQLKRRRYTGWGRLSRKLINGIRDKQSGKTILDFLKSDGFANRNFMQLIHDDSLTFKEDIQKAQVSGQGDSLHEHIANLAGSPAIKKGILQTVKVVDELVKVMGRHKPENIVIEMARENQTTQKGQKNSRERMKRIEEGIKELGSQILKEHPVENTQLQNEKLYLYYLQNGRDMYVDQELDINRLSDYDVDHIVPQSFLKDDSIDNKVLTRSDKARGKSDNVPSEEVVKKMKNYWRQLLNAKLITQRKFDNLTKAERGGLSELDKAGFIKRQLVETRQITKHVAQILDSRMNTKYDENDKLIREVKVITLKSKLVSDFRKDFQFYKVREINNYHHAHDAYLNAVVGTALIKKYPKLESEFVYGDYKVYDVRKMIAKSEQEIGKATAKYFFYSNIMNFFKTEITLANGEIRKRPLIETNGETGEIVWDKGRDFATVRKVLSMPQVNIVKKTEVQTGGFSKESILPKRNSDKLIARKKDWDPKKYGGFDSPTVAYSVLVVAKVEKGKSKKLKSVKELLGITIMERSSFEKNPIDFLEAKGYKEVKKDLIIKLPKYSLFELENGRKRMLASAGELQKGNELALPSKYVNFLYLASHYEKLKGSPEDNEQKQLFVEQHKHYLDEIIEQISEFSKRVILADANLDKVLSAYNKHRDKPIREQAENIIHLFTLTNLGAPAAFKYFDTTIDRKRYTSTKEVLDATLIHQSITGLYETRIDLSQLGGDGGEAAAKPAPGGGGGVLNLEEEYRLHEKPVPSSIDPSWLQLFPTVWAERAGMGLANQVPPVVVELRSGASPVAVRQYPMSKEAREGIRPHIQKFLDLGVLVPCRSPWNTPLLPVKKPGTNDYRPVQDLREINKRVQDIHPTVPNPYNLLSSLPPSYTWYSVLDLKDAFFCLRLHPNSQPLFAFEWKDPEKGNTGQLTWTRLPQGFKNSPTLFNEALHRDLAPFRALNPQVVLLQYVDDLLVAAPTYEDCKKGTQKLLQELSKLGYRVSAKKAQLCQREVTYLGYLLKEGKRWLTPARKATVMKIPVPTTPRQVREFLGKAGFCRLFIPGFASLAAPLYPLTKPSIPFIWTEEHQQAFDHIKKALLSAPALALPDLTKPFTLYIDERAGVARGVLTQTLGPWRRPVAYLSKKLDPVASGWPTCLKAVAAVALLLKDADKLTLGQNVTVIASHSLESIVRQPPDRWMTNARMTHYQSLLLNERVSFAPPAVLNPATLLPVESEATPVHRCSEILAEETGTRRDLEDQPLPGVPTWYTDGSSFITEGKRRAGAPIVDGKRTVWASSLPEGTSAQKAELVALTQALRLAEGKNINIYTDSRYAFATAHIHGAIYKQRGWLTSAGKDIKNKEEILALLEAIHLPRRVAIIHCPGHQRGSNPVATGNRRADEAAKQAALSTRVLAGTTKPAGKRTADGSEFEKRTADGSEFESPKKKAKVE

SEQ ID NO: 7505 - protein, 2218 aa, synthetic construct
MPAAKRVKLDGGDKKYSIGLDIGTNSVGWAVITDEYKVPSKKFKVLGNTDRHSIKKNLIGALLFDSGETAEATRLKRTARRRYTRRKNRICYLQEIFSNEMAKVDDSFFHRLEESFLVEEDKKHERHPIFGNIVDEVAYHEKYPTIYHLRKKLVDSTDKADLRLIYLALAHMIKFRGHFLIEGDLNPDNSDVDKLFIQLVQTYNQLFEENPINASGVDAKAILSARLSKSRRLENLIAQLPGEKKNGLFGNLIALSLGLTPNFKSNFDLAEDAKLQLSKDTYDDDLDNLLAQIGDQYADLFLAAKNLSDAILLSDILRVNTEITKAPLSASMIKRYDEHHQDLTLLKALVRQQLPEKYKEIFFDQSKNGYAGYIDGGASQEEFYKFIKPILEKMDGTEELLVKLNREDLLRKQRTFDNGSIPHQIHLGELHAILRRQEDFYPFLKDNREKIEKILTFRIPYYVGPLARGNSRFAWMTRKSEETITPWNFEEVVDKGASAQSFIERMTNFDKNLPNEKVLPKHSLLYEYFTVYNELTKVKYVTEGMRKPAFLSGEQKKAIVDLLFKTNRKVTVKQLKEDYFKKIECFDSVEISGVEDRFNASLGTYHDLLKIIKDKDFLDNEENEDILEDIVLTLTLFEDREMIEERLKTYAHLFDDKVMKQLKRRRYTGWGRLSRKLINGIRDKQSGKTILDFLKSDGFANRNFMQLIHDDSLTFKEDIQKAQVSGQGDSLHEHIANLAGSPAIKKGILQTVKVVDELVKVMGRHKPENIVIEMARENQTTQKGQKNSRERMKRIEEGIKELGSQILKEHPVENTQLQNEKLYLYYLQNGRDMYVDQELDINRLSDYDVDHIVPQSFLKDDSIDNKVLTRSDKARGKSDNVPSEEVVKKMKNYWRQLLNAKLITQRKFDNLTKAERGGLSELDKAGFIKRQLVETRQITKHVAQILDSRMNTKYDENDKLIREVKVITLKSKLVSDFRKDFQFYKVREINNYHHAHDAYLNAVVGTALIKKYPKLESEFVYGDYKVYDVRKMIAKSEQEIGKATAKYFFYSNIMNFFKTEITLANGEIRKRPLIETNGETGEIVWDKGRDFATVRKVLSMPQVNIVKKTEVQTGGFSKESILPKRNSDKLIARKKDWDPKKYGGFDSPTVAYSVLVVAKVEKGKSKKLKSVKELLGITIMERSSFEKNPIDFLEAKGYKEVKKDLIIKLPKYSLFELENGRKRMLASAGELQKGNELALPSKYVNFLYLASHYEKLKGSPEDNEQKQLFVEQHKHYLDEIIEQISEFSKRVILADANLDKVLSAYNKHRDKPIREQAENIIHLFTLTNLGAPAAFKYFDTTIDRKRYTSTKEVLDATLIHQSITGLYETRIDLSQLGGDGGEAAAKPAPGGGGGTLGDQGSRGSDPLPEPRVTLTVEGIPTEFLVNTGAEHSVLTKPMGKMGSKRTVVAGATGSKVYPWTTKRLLKIGQKQVTHSFLVIPECPAPLLGRDLLTKLKAQIQFSTEGPQVTWEDRPAMCLVLNLEEEYRLHEKPVPPSIDPSWLQLFPMVWAEKAGMGLANQVPPVVVELKSDASPVAVRQYPMSKEAREGIRPHIQRFLDLGILVPCQSPWNTPLLPVKKPGTNDYRPVQDLREVNKRVQDIHPTVPNPYNLLSSLPPSHTWYSVLDLKDAFFCLKLHPNSQPLFAFEWRDPEKGNTGQLTWTRLPQGFKNSPTLFNEALHRDLASFRALNPQVVMLQYVDDLLVAAPTYRDCKEGTRRLLQELSKLGYRVSAKKAQLCREEVTYLGYLLKGGKRWLTPARKATVMKIPTPTTPRQVREFLGKAGFCRLFIPGFASLAAPLYPLTRPKVPFTWTEAHQEAFGRIKEALLSAPALALPDLTKPFALYVDEKEGVARGVLTQTLGPWRRPVAYLSKKLDPVASGWPTCLKAIAAVALLLKDADKLTLGQNVLVIAPHNLESIVRQPPDRWMTNARMTHYQSLLLNERVSFAPPAILNPATLLPVESDDTPIHICSEILAEETGTRPDLRDQPLPGVPAWYTDGSSFIMDGRRQAGAAIVDNKRTVWASNLPEGTSAQKAELIALTQALRLAEGKSINIYTDSRYAFATAHVHGAIYKQRGWLTSAGKDIKNKEEILALLEAIHLPKRVAIIHCPGHQRGTDPVATGNRKADEAAKQAAQSTRILTETTKNAGKRTADGSEFEKRTADGSEFESPKKKAKVE

SEQ ID NO: 7506 - protein, 2096 aa, synthetic construct
MPAAKRVKLDGGDKKYSIGLDIGTNSVGWAVITDEYKVPSKKFKVLGNTDRHSIKKNLIGALLFDSGETAEATRLKRTARRRYTRRKNRICYLQEIFSNEMAKVDDSFFHRLEESFLVEEDKKHERHPIFGNIVDEVAYHEKYPTIYHLRKKLVDSTDKADLRLIYLALAHMIKFRGHFLIEGDLNPDNSDVDKLFIQLVQTYNQLFEENPINASGVDAKAILSARLSKSRRLENLIAQLPGEKKNGLFGNLIALSLGLTPNFKSNFDLAEDAKLQLSKDTYDDDLDNLLAQIGDQYADLFLAAKNLSDAILLSDILRVNTEITKAPLSASMIKRYDEHHQDLTLLKALVRQQLPEKYKEIFFDQSKNGYAGYIDGGASQEEFYKFIKPILEKMDGTEELLVKLNREDLLRKQRTFDNGSIPHQIHLGELHAILRRQEDFYPFLKDNREKIEKILTFRIPYYVGPLARGNSRFAWMTRKSEETITPWNFEEVVDKGASAQSFIERMTNFDKNLPNEKVLPKHSLLYEYFTVYNELTKVKYVTEGMRKPAFLSGEQKKAIVDLLFKTNRKVTVKQLKEDYFKKIECFDSVEISGVEDRFNASLGTYHDLLKIIKDKDFLDNEENEDILEDIVLTLTLFEDREMIEERLKTYAHLFDDKVMKQLKRRRYTGWGRLSRKLINGIRDKQSGKTILDFLKSDGFANRNFMQLIHDDSLTFKEDIQKAQVSGQGDSLHEHIANLAGSPAIKKGILQTVKVVDELVKVMGRHKPENIVIEMARENQTTQKGQKNSRERMKRIEEGIKELGSQILKEHPVENTQLQNEKLYLYYLQNGRDMYVDQELDINRLSDYDVDHIVPQSFLKDDSIDNKVLTRSDKARGKSDNVPSEEVVKKMKNYWRQLLNAKLITQRKFDNLTKAERGGLSELDKAGFIKRQLVETRQITKHVAQILDSRMNTKYDENDKLIREVKVITLKSKLVSDFRKDFQFYKVREINNYHHAHDAYLNAVVGTALIKKYPKLESEFVYGDYKVYDVRKMIAKSEQEIGKATAKYFFYSNIMNFFKTEITLANGEIRKRPLIETNGETGEIVWDKGRDFATVRKVLSMPQVNIVKKTEVQTGGFSKESILPKRNSDKLIARKKDWDPKKYGGFDSPTVAYSVLVVAKVEKGKSKKLKSVKELLGITIMERSSFEKNPIDFLEAKGYKEVKKDLIIKLPKYSLFELENGRKRMLASAGELQKGNELALPSKYVNFLYLASHYEKLKGSPEDNEQKQLFVEQHKHYLDEIIEQISEFSKRVILADANLDKVLSAYNKHRDKPIREQAENIIHLFTLTNLGAPAAFKYFDTTIDRKRYTSTKEVLDATLIHQSITGLYETRIDLSQLGGDGGEAAAKPAPGGGGGTLNLEDEYRLYETSAEPEVSPGSTWLSDFPQAWAETGGMGLAVRQAPLIIPLKATSTPVSIKQYPMSQEAKLGIKPHIQRLLDQGILVPCQSPWNTPLLPVKKPGTNDYRPVQDLREVNKRVEDIHPTVPNPYNLLSGLPPSHRWYTVLDLKDAFFCLRLHPTSQPLFAFEWRDPGMGISGQLTWTRLPQGFKNSPTLFDEALHRDLADFRIQHPDLILLQYVDDILLAATSELDCQQGTRALLLTLGNLGYRASAKKAQLCQKQVKYLGYLLKEGQRWLTEARKETVMGQPTPKTPRQLREFLGTAGFCRLWIPGFAEMAAPLYPLTKTGTLFNWGPDQQKAYQEIKQALLTAPALGLPDLTKPFELFVDEKQGYAKGVLTQKLGPWRRPVAYLSKKLDPVAAGWPPCLRMVAAIAVLRKDAGKLTMGQPLVILAPHAVEALVKQPPDRWLSNARMTHYQAMLLDTDRVQFGPVVALNPATLLPLPEEGAPHDCLEILAETHGTRPDLTDQPIPDADHTWYTDGSSFLQEGQRKAGAAVTTETEVIWARALPAGTSAQRAELIALTQALKMAEGKRLNVYTDSRYAFATAHIHGEIYRRRGLLTSEGREIKNKSEILALLKALFLPKRLSIIHCLGHQKGDSAEARGNRLADQAAREAAIKTPPDTSTLLAGKRTADGSEFEKRTADGSEFESPKKKAKVE

SEQ ID NO: 7507 - protein, 2096 aa, synthetic construct
MPAAKRVKLDGGDKKYSIGLDIGTNSVGWAVITDEYKVPSKKFKVLGNTDRHSIKKNLIGALLFDSGETAEATRLKRTARRRYTRRKNRICYLQEIFSNEMAKVDDSFFHRLEESFLVEEDKKHERHPIFGNIVDEVAYHEKYPTIYHLRKKLVDSTDKADLRLIYLALAHMIKFRGHFLIEGDLNPDNSDVDKLFIQLVQTYNQLFEENPINASGVDAKAILSARLSKSRRLENLIAQLPGEKKNGLFGNLIALSLGLTPNFKSNFDLAEDAKLQLSKDTYDDDLDNLLAQIGDQYADLFLAAKNLSDAILLSDILRVNTEITKAPLSASMIKRYDEHHQDLTLLKALVRQQLPEKYKEIFFDQSKNGYAGYIDGGASQEEFYKFIKPILEKMDGTEELLVKLNREDLLRKQRTFDNGSIPHQIHLGELHAILRRQEDFYPFLKDNREKIEKILTFRIPYYVGPLARGNSRFAWMTRKSEETITPWNFEEVVDKGASAQSFIERMTNFDKNLPNEKVLPKHSLLYEYFTVYNELTKVKYVTEGMRKPAFLSGEQKKAIVDLLFKTNRKVTVKQLKEDYFKKIECFDSVEISGVEDRFNASLGTYHDLLKIIKDKDFLDNEENEDILEDIVLTLTLFEDREMIEERLKTYAHLFDDKVMKQLKRRRYTGWGRLSRKLINGIRDKQSGKTILDFLKSDGFANRNFMQLIHDDSLTFKEDIQKAQVSGQGDSLHEHIANLAGSPAIKKGILQTVKVVDELVKVMGRHKPENIVIEMARENQTTQKGQKNSRERMKRIEEGIKELGSQILKEHPVENTQLQNEKLYLYYLQNGRDMYVDQELDINRLSDYDVDHIVPQSFLKDDSIDNKVLTRSDKARGKSDNVPSEEVVKKMKNYWRQLLNAKLITQRKFDNLTKAERGGLSELDKAGFIKRQLVETRQITKHVAQILDSRMNTKYDENDKLIREVKVITLKSKLVSDFRKDFQFYKVREINNYHHAHDAYLNAVVGTALIKKYPKLESEFVYGDYKVYDVRKMIAKSEQEIGKATAKYFFYSNIMNFFKTEITLANGEIRKRPLIETNGETGEIVWDKGRDFATVRKVLSMPQVNIVKKTEVQTGGFSKESILPKRNSDKLIARKKDWDPKKYGGFDSPTVAYSVLVVAKVEKGKSKKLKSVKELLGITIMERSSFEKNPIDFLEAKGYKEVKKDLIIKLPKYSLFELENGRKRMLASAGELQKGNELALPSKYVNFLYLASHYEKLKGSPEDNEQKQLFVEQHKHYLDEIIEQISEFSKRVILADANLDKVLSAYNKHRDKPIREQAENIIHLFTLTNLGAPAAFKYFDTTIDRKRYTSTKEVLDATLIHQSITGLYETRIDLSQLGGDGGEAAAKPAPGGGGGTLNLEDEYRLYETSAEPEVSPGSTWLSDFPQAWAETGGMGLAVRQAPLIIPLKATSTPVSIKQYPMSQEAKLGIKPHIQRLLDQGILVPCQSPWNTPLLPVKKPGTNDYRPVQDLREVNKRVEDIHPTVPNPYNLLSGLPPSHRWYTVLDLKDAFFCLRLHPTSQPLFAFEWRDPGMGISGQLTWTRLPQGFKNSPTLFNEALHRDLADFRIQHPDLILLQYVDDILLAATSELDCQQGTRALLLTLGNLGYRASAKKAQLCQKQVKYLGYLLKEGQRWLTEARKETVMGQPTPKTPRQLREFLGTAGFCRLWIPGFAEMAAPLYPLTKPGTLFNWGPDQQKAYQEIKQALLTAPALGLPDLTKPFELFVDEKQGYAKGVLTQKLGPWRRPVAYLSKKLDPVAAGWPPCLRMVAAIAVLRKDAGKLTMGQPLVILAPHAVEALVKQPPDRWLSNARMTHYQAMLLDTDRVQFGPVVALNPATLLPLPEEGAPHDCLEILAETHGTRPDLTDQPIPDADHTWYTDGSSFLQEGQRKAGAAVTTETEVIWARALPAGTSAQRAELIALTQALKMAEGKRLNVYTDSRYAFATAHIHGEIYRRRGWLTSEGREIKNKSEILALLKALFLPKRLSIIHCLGHQKGDSAEARGNRLADQAAREAAIKTPPDTSTLLAGKRTADGSEFEKRTADGSEFESPKKKAKVE

SEQ ID NO: 7508 - protein, 2096 aa, synthetic construct
MPAAKRVKLDGGDKKYSIGLDIGTNSVGWAVITDEYKVPSKKFKVLGNTDRHSIKKNLIGALLFDSGETAEATRLKRTARRRYTRRKNRICYLQEIFSNEMAKVDDSFFHRLEESFLVEEDKKHERHPIFGNIVDEVAYHEKYPTIYHLRKKLVDSTDKADLRLIYLALAHMIKFRGHFLIEGDLNPDNSDVDKLFIQLVQTYNQLFEENPINASGVDAKAILSARLSKSRRLENLIAQLPGEKKNGLFGNLIALSLGLTPNFKSNFDLAEDAKLQLSKDTYDDDLDNLLAQIGDQYADLFLAAKNLSDAILLSDILRVNTEITKAPLSASMIKRYDEHHQDLTLLKALVRQQLPEKYKEIFFDQSKNGYAGYIDGGASQEEFYKFIKPILEKMDGTEELLVKLNREDLLRKQRTFDNGSIPHQIHLGELHAILRRQEDFYPFLKDNREKIEKILTFRIPYYVGPLARGNSRFAWMTRKSEETITPWNFEEVVDKGASAQSFIERMTNFDKNLPNEKVLPKHSLLYEYFTVYNELTKVKYVTEGMRKPAFLSGEQKKAIVDLLFKTNRKVTVKQLKEDYFKKIECFDSVEISGVEDRFNASLGTYHDLLKIIKDKDFLDNEENEDILEDIVLTLTLFEDREMIEERLKTYAHLFDDKVMKQLKRRRYTGWGRLSRKLINGIRDKQSGKTILDFLKSDGFANRNFMQLIHDDSLTFKEDIQKAQVSGQGDSLHEHIANLAGSPAIKKGILQTVKVVDELVKVMGRHKPENIVIEMARENQTTQKGQKNSRERMKRIEEGIKELGSQILKEHPVENTQLQNEKLYLYYLQNGRDMYVDQELDINRLSDYDVDHIVPQSFLKDDSIDNKVLTRSDKARGKSDNVPSEEVVKKMKNYWRQLLNAKLITQRKFDNLTKAERGGLSELDKAGFIKRQLVETRQITKHVAQILDSRMNTKYDENDKLIREVKVITLKSKLVSDFRKDFQFYKVREINNYHHAHDAYLNAVVGTALIKKYPKLESEFVYGDYKVYDVRKMIAKSEQEIGKATAKYFFYSNIMNFFKTEITLANGEIRKRPLIETNGETGEIVWDKGRDFATVRKVLSMPQVNIVKKTEVQTGGFSKESILPKRNSDKLIARKKDWDPKKYGGFDSPTVAYSVLVVAKVEKGKSKKLKSVKELLGITIMERSSFEKNPIDFLEAKGYKEVKKDLIIKLPKYSLFELENGRKRMLASAGELQKGNELALPSKYVNFLYLASHYEKLKGSPEDNEQKQLFVEQHKHYLDEIIEQISEFSKRVILADANLDKVLSAYNKHRDKPIREQAENIIHLFTLTNLGAPAAFKYFDTTIDRKRYTSTKEVLDATLIHQSITGLYETRIDLSQLGGDGGEAAAKPAPGGGGGTLGIEDEYRLHETSTEPDVSLGSTWLSDFPQAWAETGGMGLAVRQAPLIIPLKATSTPVSIQQYPMSHEARLGIKPHIQRLLDQGILVPCQSPWNTPLLPVKKPGTNDYRPVQDLREVNKRVEDIHPTVPNPYNLLSGLPPSHQWYTVLDLKDAFFCLRLHPTSQPLFAFEWRDPGMGISGQLTWTRLPQGFKNSPTLFNEALHRDLADFRIQHPDLILLQYVDDILLAATSELDCQQGTRALLQTLGDLGYRASAKKAQICQKQVKYLGYLLREGQRWLTEARKETVMGQPVPKTPRQLREFLGTAGFCRLWIPGFAEMAAPLYPLTKPGTLFSWGPDQQKAYQEIKQALLTAPALGLPDLTKPFELFVDEKQGYAKGVLTQKLGPWRRPVAYLSKKLDPVAAGWPPCLRMVAAIAVLTKDAGKLTMGQPLVILAPHAVEALVKQPPDRWLSNARMTHYQAMLLDTDRVQFGPVVALNPATLLPLPEEGAPHDCLEILAETHGTRPDLTDQPIPDADHTWYTDGSSFLQEGQRKAGAAVTTETEVIWAGALPAGTSAQRAELIALTQALKMAEGKRLNVYTDSRYAFATAHIHGEIYRRRGWLTSEGREIKNKSEILALLKALFLPKRLSIIHCLGHQKGDSAEARGNRLADQAAREAAIKTPPDTSTLLAGKRTADGSEFEKRTADGSEFESPKKKAKVE

SEQ ID NO: 7509 - protein, 2096 aa, synthetic construct; identical to SEQ ID NO: 4536

SEQ ID NO: 7510 - protein, 2096 aa, synthetic construct
MPAAKRVKLDGGDKKYSIGLDIGTNSVGWAVITDEYKVPSKKFKVLGNTDRHSIKKNLIGALLFDSGETAEATRLKRTARRRYTRRKNRICYLQEIFSNEMAKVDDSFFHRLEESFLVEEDKKHERHPIFGNIVDEVAYHEKYPTIYHLRKKLVDSTDKADLRLIYLALAHMIKFRGHFLIEGDLNPDNSDVDKLFIQLVQTYNQLFEENPINASGVDAKAILSARLSKSRRLENLIAQLPGEKKNGLFGNLIALSLGLTPNFKSNFDLAEDAKLQLSKDTYDDDLDNLLAQIGDQYADLFLAAKNLSDAILLSDILRVNTEITKAPLSASMIKRYDEHHQDLTLLKALVRQQLPEKYKEIFFDQSKNGYAGYIDGGASQEEFYKFIKPILEKMDGTEELLVKLNREDLLRKQRTFDNGSIPHQIHLGELHAILRRQEDFYPFLKDNREKIEKILTFRIPYYVGPLARGNSRFAWMTRKSEETITPWNFEEVVDKGASAQSFIERMTNFDKNLPNEKVLPKHSLLYEYFTVYNELTKVKYVTEGMRKPAFLSGEQKKAIVDLLFKTNRKVTVKQLKEDYFKKIECFDSVEISGVEDRFNASLGTYHDLLKIIKDKDFLDNEENEDILEDIVLTLTLFEDREMIEERLKTYAHLFDDKVMKQLKRRRYTGWGRLSRKLINGIRDKQSGKTILDFLKSDGFANRNFMQLIHDDSLTFKEDIQKAQVSGQGDSLHEHIANLAGSPAIKKGILQTVKVVDELVKVMGRHKPENIVIEMARENQTTQKGQKNSRERMKRIEEGIKELGSQILKEHPVENTQLQNEKLYLYYLQNGRDMYVDQELDINRLSDYDVDHIVPQSFLKDDSIDNKVLTRSDKARGKSDNVPSEEVVKKMKNYWRQLLNAKLITQRKFDNLTKAERGGLSELDKAGFIKRQLVETRQITKHVAQILDSRMNTKYDENDKLIREVKVITLKSKLVSDFRKDFQFYKVREINNYHHAHDAYLNAVVGTALIKKYPKLESEFVYGDYKVYDVRKMIAKSEQEIGKATAKYFFYSNIMNFFKTEITLANGEIRKRPLIETNGETGEIVWDKGRDFATVRKVLSMPQVNIVKKTEVQTGGFSKESILPKRNSDKLIARKKDWDPKKYGGFDSPTVAYSVLVVAKVEKGKSKKLKSVKELLGITIMERSSFEKNPIDFLEAKGYKEVKKDLIIKLPKYSLFELENGRKRMLASAGELQKGNELALPSKYVNFLYLASHYEKLKGSPEDNEQKQLFVEQHKHYLDEIIEQISEFSKRVILADANLDKVLSAYNKHRDKPIREQAENIIHLFTLTNLGAPAAFKYFDTTIDRKRYTSTKEVLDATLIHQSITGLYETRIDLSQLGGDGGEAAAKPAPGGGGGTLNIEDEYRLHETSKGPDVPLGSTWLSDFPQAWAETGGMGLAVRQAPLIIPLKATSTPVSIKQYPMSQEARLGIKPHIQRLLDQGILVPCQSPWNTPLLPVKKPGTNDYRPVQDLREVNKRVEDIHPTVPNPYNLLSGLPPSHQWYTVLDLKDAFFCLRLHPTSQSLFAFEWRDPEMGISGQLTWTRLPQGFKNSPTLFNEALHRDLADFRIQHPDLILLQYVDDLLLAATSELDCQQGTRALLQTLGDLGYRASAKKAQICQKQVKYLGYLLKEGQRWLTEARKETVMGQPTPKTPRQLREFLGTAGFCRLWIPGFAEMAAPLYPLTKPGTLFEWGPDQQKAYQEIKQALLTAPALGLPDLTKPFELFVDEKQGYAKGVLTQKLGPWRRPVAYLSKKLDPVAAGWPPCLRMVAAIAVLTKDAGKLTMGQPLVILAPHAVEALVKQPPDRWLSNARMTHYQALLLDTDRVQFGPIVALNPATLLPLPEEGLQHDCLDILAEAHGTRPDLTDQPLPDADHTWYTDGSSFLQEGQRKAGAAVTTETEVVWAKALPAGTSAQRAELIALTQALKMAEGKKLNVYTDSRYAFATAHIHGEIYRRRGWLTSEGKEIKNKDEILALLKALFLPKRLSIIHCPGHQKGNRAEARGNRMADQAAREVATRETPETSTLLAGKRTADGSEFEKRTADGSEFESPKKKAKVE

SEQ ID NO: 7511 - protein, 2096 aa, synthetic construct
MPAAKRVKLDGGDKKYSIGLDIGTNSVGWAVITDEYKVPSKKFKVLGNTDRHSIKKNLIGALLFDSGETAEATRLKRTARRRYTRRKNRICYLQEIFSNEMAKVDDSFFHRLEESFLVEEDKKHERHPIFGNIVDEVAYHEKYPTIYHLRKKLVDSTDKADLRLIYLALAHMIKFRGHFLIEGDLNPDNSDVDKLFIQLVQTYNQLFEENPINASGVDAKAILSARLSKSRRLENLIAQLPGEKKNGLFGNLIALSLGLTPNFKSNFDLAEDAKLQLSKDTYDDDLDNLLAQIGDQYADLFLAAKNLSDAILLSDILRVNTEITKAPLSASMIKRYDEHHQDLTLLKALVRQQLPEKYKEIFFDQSKNGYAGYIDGGASQEEFYKFIKPILEKMDGTEELLVKLNREDLLRKQRTFDNGSIPHQIHLGELHAILRRQEDFYPFLKDNREKIEKILTFRIPYYVGPLARGNSRFAWMTRKSEETITPWNFEEVVDKGASAQSFIERMTNFDKNLPNEKVLPKHSLLYEYFTVYNELTKVKYVTEGMRKPAFLSGEQKKAIVDLLFKTNRKVTVKQLKEDYFKKIECFDSVEISGVEDRFNASLGTYHDLLKIIKDKDFLDNEENEDILEDIVLTLTLFEDREMIEERLKTYAHLFDDKVMKQLKRRRYTGWGRLSRKLINGIRDKQSGKTILDFLKSDGFANRNFMQLIHDDSLTFKEDIQKAQVSGQGDSLHEHIANLAGSPAIKKGILQTVKVVDELVKVMGRHKPENIVIEMARENQTTQKGQKNSRERMKRIEEGIKELGSQILKEHPVENTQLQNEKLYLYYLQNGRDMYVDQELDINRLSDYDVDHIVPQSFLKDDSIDNKVLTRSDKARGKSDNVPSEEVVKKMKNYWRQLLNAKLITQRKFDNLTKAERGGLSELDKAGFIKRQLVETRQITKHVAQILDSRMNTKYDENDKLIREVKVITLKSKLVSDFRKDFQFYKVREINNYHHAHDAYLNAVVGTALIKKYPKLESEFVYGDYKVYDVRKMIAKSEQEIGKATAKYFFYSNIMNFFKTEITLANGEIRKRPLIETNGETGEIVWDKGRDFATVRKVLSMPQVNIVKKTEVQTGGFSKESILPKRNSDKLIARKKDWDPKKYGGFDSPTVAYSVLVVAKVEKGKSKKLKSVKELLGITIMERSSFEKNPIDFLEAKGYKEVKKDLIIKLPKYSLFELENGRKRMLASAGELQKGNELALPSKYVNFLYLASHYEKLKGSPEDNEQKQLFVEQHKHYLDEIIEQISEFSKRVILADANLDKVLSAYNKHRDKPIREQAENIIHLFTLTNLGAPAAFKYFDTTIDRKRYTSTKEVLDATLIHQSITGLYETRIDLSQLGGDGGEAAAKPAPGGGGGTLNIEDEHRLHETSKEPDVSLGSTWLSDFPQAWAETGGMGLAVRQAPLIIPLKATSTPVSIKQYPMSQEARLGIKPHIQRLLDQGILVPCQSPWNTPLLPVKKPGTNDYRPVQDLREVNKRVEDIHPTVPNPYNLLSGLPPSHQWYTVLDLKDAFFCLRLHPTSQPLFAFEWRDPEMGISGQLTWTRLPQGFKNSPTLFDEALHRDLADFRIQHPDLILLQYVDDLLLAATSELDCQQGTRALLQTLGNLGYRASAKKAQICQKQVKYLGYLLKEGQRWLTEARKETVMGQPTPKTPRQLREFLGTAGFCRLWIPGFAEMAAPLYPLTKTGTLFNWGPDQQKAYQEIKQALLTAPALGLPDLTKPFELFVDEKQGYAKGVLTQKLGPWRRPVAYLSKKLDPVAAGWPPCLRMVAAIAVLTKDAGKLTMGQPLVILAPHAVEALVKQPPDRWLSNARMTHYQALLLDTDRVQFGPVVALNPATLLPLPEEGLQHNCLDILAEAHGTRPDLTDQPLPDADHTWYTDGSSLLQEGQRKAGAAVTTETEVIWAKALPAGTSAQRAELIALTQALKMAEGKKLNVYTDSRYAFATAHIHGEIYRRRGLLTSEGKEIKNKDEILALLKALFLPKRLSIIHCPGHQKGHSAEARGNRMADQAARKAAITETPDTSTLLAGKRTADGSEFEKRTADGSEFESPKKKAKVE

SEQ ID NO: 7512 - protein, 2024 aa, synthetic construct
MPAAKRVKLDGGDKKYSIGLDIGTNSVGWAVITDEYKVPSKKFKVLGNTDRHSIKKNLIGALLFDSGETAEATRLKRTARRRYTRRKNRICYLQEIFSNEMAKVDDSFFHRLEESFLVEEDKKHERHPIFGNIVDEVAYHEKYPTIYHLRKKLVDSTDKADLRLIYLALAHMIKFRGHFLIEGDLNPDNSDVDKLFIQLVQTYNQLFEENPINASGVDAKAILSARLSKSRRLENLIAQLPGEKKNGLFGNLIALSLGLTPNFKSNFDLAEDAKLQLSKDTYDDDLDNLLAQIGDQYADLFLAAKNLSDAILLSDILRVNTEITKAPLSASMIKRYDEHHQDLTLLKALVRQQLPEKYKEIFFDQSKNGYAGYIDGGASQEEFYKFIKPILEKMDGTEELLVKLNREDLLRKQRTFDNGSIPHQIHLGELHAILRRQEDFYPFLKDNREKIEKILTFRIPYYVGPLARGNSRFAWMTRKSEETITPWNFEEVVDKGASAQSFIERMTNFDKNLPNEKVLPKHSLLYEYFTVYNELTKVKYVTEGMRKPAFLSGEQKKAIVDLLFKTNRKVTVKQLKEDYFKKIECFDSVEISGVEDRFNASLGTYHDLLKIIKDKDFLDNEENEDILEDIVLTLTLFEDREMIEERLKTYAHLFDDKVMKQLKRRRYTGWGRLSRKLINGIRDKQSGKTILDFLKSDGFANRNFMQLIHDDSLTFKEDIQKAQVSGQGDSLHEHIANLAGSPAIKKGILQTVKVVDELVKVMGRHKPENIVIEMARENQTTQKGQKNSRERMKRIEEGIKELGSQILKEHPVENTQLQNEKLYLYYLQNGRDMYVDQELDINRLSDYDVDHIVPQSFLKDDSIDNKVLTRSDKARGKSDNVPSEEVVKKMKNYWRQLLNAKLITQRKFDNLTKAERGGLSELDKAGFIKRQLVETRQITKHVAQILDSRMNTKYDENDKLIREVKVITLKSKLVSDFRKDFQFYKVREINNYHHAHDAYLNAVVGTALIKKYPKLESEFVYGDYKVYDVRKMIAKSEQEIGKATAKYFFYSNIMNFFKTEITLANGEIRKRPLIETNGETGEIVWDKGRDFATVRKVLSMPQVNIVKKTEVQTGGFSKESILPKRNSDKLIARKKDWDPKKYGGFDSPTVAYSVLVVAKVEKGKSKKLKSVKELLGITIMERSSFEKNPIDFLEAKGYKEVKKDLIIKLPKYSLFELENGRKRMLASAGELQKGNELALPSKYVNFLYLASHYEKLKGSPEDNEQKQLFVEQHKHYLDEIIEQISEFSKRVILADANLDKVLSAYNKHRDKPIREQAENIIHLFTLTNLGAPAAFKYFDTTIDRKRYTSTKEVLDATLIHQSITGLYETRIDLSQLGGDGGEAAAKPAPGGGGGGRDIMKDIKVRLMTDSPDDSQDLMIGAIESNLFADQISWKSDQPVWLNQWPLKQEKLQALQQLVTEQLQLGHLEESNSPWNTPVFVIKKKSGKWRLLQDLRAVNATMHDMGALQPGLPSPVAVPKGWEIIIIDLQDCFFNIKLHPEDCKRFAFSVPSPNFKRPYQRFQWKVLPQGMKNSPTLCQKFVDKAILTVRDKYQDSYIVHYMDDILLAHPSRSIVDEILTSMIQALNKHGLVVSTEKIQKYDNLKYLGTHIQGDSVSYQKLQIRTDKLRTLNDFQKLLGNINWIRPFLKLTTGELKPLFEILNGDSNPISTRKLTPEACKALQLMNERLSTARVKRLDLSQPWSLCILKTEYTPTACLWQDGVVEWIHLPHISPKVITPYDIFCTQLIIKGRHRSKELFSKDPDYIVVPYTKVQFDLLLQEKEDWPISLLGFLGEVHFHLPKDPLLTFTLQTAIIFPHMTSTTPLEKGIVIFTDGSANGRSVTYIQGREPIIKENTQNTAQQAEIVAVITAFEEVSQPFNLYTDSKYVTGLFPEIETATLSPRTKIYTELKHLQRLIHKRQEKFYIGHIRGHTGLPGPLAQGNAYADSLTRILTAGKRTADGSEFEKRTADGSEFESPKKKAKVE

SEQ ID NO: 7513 - protein, 2088 aa, synthetic construct
MPAAKRVKLDGGDKKYSIGLDIGTNSVGWAVITDEYKVPSKKFKVLGNTDRHSIKKNLIGALLFDSGETAEATRLKRTARRRYTRRKNRICYLQEIFSNEMAKVDDSFFHRLEESFLVEEDKKHERHPIFGNIVDEVAYHEKYPTIYHLRKKLVDSTDKADLRLIYLALAHMIKFRGHFLIEGDLNPDNSDVDKLFIQLVQTYNQLFEENPINASGVDAKAILSARLSKSRRLENLIAQLPGEKKNGLFGNLIALSLGLTPNFKSNFDLAEDAKLQLSKDTYDDDLDNLLAQIGDQYADLFLAAKNLSDAILLSDILRVNTEITKAPLSASMIKRYDEHHQDLTLLKALVRQQLPEKYKEIFFDQSKNGYAGYIDGGASQEEFYKFIKPILEKMDGTEELLVKLNREDLLRKQRTFDNGSIPHQIHLGELHAILRRQEDFYPFLKDNREKIEKILTFRIPYYVGPLARGNSRFAWMTRKSEETITPWNFEEVVDKGASAQSFIERMTNFDKNLPNEKVLPKHSLLYEYFTVYNELTKVKYVTEGMRKPAFLSGEQKKAIVDLLFKTNRKVTVKQLKEDYFKKIECFDSVEISGVEDRFNASLGTYHDLLKIIKDKDFLDNEENEDILEDIVLTLTLFEDREMIEERLKTYAHLFDDKVMKQLKRRRYTGWGRLSRKLINGIRDKQSGKTILDFLKSDGFANRNFMQLIHDDSLTFKEDIQKAQVSGQGDSLHEHIANLAGSPAIKKGILQTVKVVDELVKVMGRHKPENIVIEMARENQTTQKGQKNSRERMKRIEEGIKELGSQILKEHPVENTQLQNEKLYLYYLQNGRDMYVDQELDINRLSDYDVDHIVPQSFLKDDSIDNKVLTRSDKARGKSDNVPSEEVVKKMKNYWRQLLNAKLITQRKFDNLTKAERGGLSELDKAGFIKRQLVETRQITKHVAQILDSRMNTKYDENDKLIREVKVITLKSKLVSDFRKDFQFYKVREINNYHHAHDAYLNAVVGTALIKKYPKLESEFVYGDYKVYDVRKMIAKSEQEIGKATAKYFFYSNIMNFFKTEITLANGEIRKRPLIETNGETGEIVWDKGRDFATVRKVLSMPQVNIVKKTEVQTGGFSKESILPKRNSDKLIARKKDWDPKKYGGFDSPTVAYSVLVVAKVEKGKSKKLKSVKELLGITIMERSSFEKNPIDFLEAKGYKEVKKDLIIKLPKYSLFELENGRKRMLASAGELQKGNELALPSKYVNFLYLASHYEKLKGSPEDNEQKQLFVEQHKHYLDEIIEQISEFSKRVILADANLDKVLSAYNKHRDKPIREQAENIIHLFTLTNLGAPAAFKYFDTTIDRKRYTSTKEVLDATLIHQSITGLYETRIDLSQLGGDGGEAAAKPAPGGGGGLDDEYRLYSPLVKPDQNIQFWLEQFPQAWAETAGMGLAKQVPPQVIQLKASATPVSVRQYPLSKEAQEGIRPHVQRLIQQGILVPVQSPWNTPLLPVRKPGTNDYRPVQDLREVNKRVQDIHPTVPNPYNLLCALPPQRSWYTVLDLKDAFFCLRLHPTSQPLFAFEWRDPGTGRTGQLTWTRLPQGFKNSPTIFNEALHRDLANFRIQHPQVTLLQYVDDLLLAGATKQDCLEGTKALLLELSDLGYRASAKKAQICRREVTYLGYSLRDGQRWLTEARKKTVVQIPAPTTAKQVREFLGKAGFCRLFIPGFATLAAPLYPLTKPKGEFSWAPEHQKAFDAIKKALLSAPALALPDVTKPFTLYVDERKGVARGVLTQTLGPWRRPVAYLSKKLDPVASGWPVCLKAIAAVAILVKDADKLTLGQNITVIAPHALENIVRQPPDRWMTNARMTHYQSLLLTERVTFAPPAALNPATLLPEETDEPVTHDCHQLLIEETGVRKDLTDIPLTGEVLTWFTDGSSYVVEGKRMAGAAVVDGTRTIWASSLPEGTSAQKAELMALTQALRLAEGKSINIYTDSRYAFATAHVHGAIYKQRGWLTSAGREIKNKEEILSLLEALHLPKRLAIIHCPGHQKAKDPISRGNQMADRVAKQAAQGVNLLPAGKRTADGSEFEKRTADGSEFESPKKKAKVE

SEQ ID NO: 7514 - protein, 2090 aa, synthetic construct
MPAAKRVKLDGGDKKYSIGLDIGTNSVGWAVITDEYKVPSKKFKVLGNTDRHSIKKNLIGALLFDSGETAEATRLKRTARRRYTRRKNRICYLQEIFSNEMAKVDDSFFHRLEESFLVEEDKKHERHPIFGNIVDEVAYHEKYPTIYHLRKKLVDSTDKADLRLIYLALAHMIKFRGHFLIEGDLNPDNSDVDKLFIQLVQTYNQLFEENPINASGVDAKAILSARLSKSRRLENLIAQLPGEKKNGLFGNLIALSLGLTPNFKSNFDLAEDAKLQLSKDTYDDDLDNLLAQIGDQYADLFLAAKNLSDAILLSDILRVNTEITKAPLSASMIKRYDEHHQDLTLLKALVRQQLPEKYKEIFFDQSKNGYAGYIDGGASQEEFYKFIKPILEKMDGTEELLVKLNREDLLRKQRTFDNGSIPHQIHLGELHAILRRQEDFYPFLKDNREKIEKILTFRIPYYVGPLARGNSRFAWMTRKSEETITPWNFEEVVDKGASAQSFIERMTNFDKNLPNEKVLPKHSLLYEYFTVYNELTKVKYVTEGMRKPAFLSGEQKKAIVDLLFKTNRKVTVKQLKEDYFKKIECFDSVEISGVEDRFNASLGTYHDLLKIIKDKDFLDNEENEDILEDIVLTLTLFEDREMIEERLKTYAHLFDDKVMKQLKRRRYTGWGRLSRKLINGIRDKQSGKTILDFLKSDGFANRNFMQLIHDDSLTFKEDIQKAQVSGQGDSLHEHIANLAGSPAIKKGILQTVKVVDELVKVMGRHKPENIVIEMARENQTTQKGQKNSRERMKRIEEGIKELGSQILKEHPVENTQLQNEKLYLYYLQNGRDMYVDQELDINRLSDYDVDHIVPQSFLKDDSIDNKVLTRSDKARGKSDNVPSEEVVKKMKNYWRQLLNAKLITQRKFDNLTKAERGGLSELDKAGFIKRQLVETRQITKHVAQILDSRMNTKYDENDKLIREVKVITLKSKLVSDFRKDFQFYKVREINNYHHAHDAYLNAVVGTALIKKYPKLESEFVYGDYKVYDVRKMIAKSEQEIGKATAKYFFYSNIMNFFKTEITLANGEIRKRPLIETNGETGEIVWDKGRDFATVRKVLSMPQVNIVKKTEVQTGGFSKESILPKRNSDKLIARKKDWDPKKYGGFDSPTVAYSVLVVAKVEKGKSKKLKSVKELLGITIMERSSFEKNPIDFLEAKGYKEVKKDLIIKLPKYSLFELENGRKRMLASAGELQKGNELALPSKYVNFLYLASHYEKLKGSPEDNEQKQLFVEQHKHYLDEIIEQISEFSKRVILADANLDKVLSAYNKHRDKPIREQAENIIHLFTLTNLGAPAAFKYFDTTIDRKRYTSTKEVLDATLIHQSITGLYETRIDLSQLGGDGGEAAAKPAPGGGGGTLQLDDEYRLYSPLVKPDQNIQFWLEQFPQAWAETAGMGLAKQVPPQVIQLKASATPVSVRQYPLSKEAQEGIRPHVQRLIQQGILVPVQSPWNTPLLPVRKPGTNDYRPVQDLREVNKRVQDIHPTVPNPYNLLCALPPQRSWYTVLDLKDAFFCLRLHPTSQPLFAFEWRDPGTGRTGQLTWTRLPQGFKNSPTIFDEALHRDLANFRIQHPQVTLLQYVDDLLLAGATKQDCLEGTKALLLELSDLGYRASAKKAQICRREVTYLGYSLRDGQRWLTEARKKTVVQIPAPTTAKQVREFLGTAGFCRLWIPGFATLAAPLYPLTKEKGEFSWAPEHQKAFDAIKKALLSAPALALPDVTKPFTLYVDERKGVARGVLTQTLGPWRRPVAYLSKKLDPVASGWPVCLKAIAAVAILVKDADKLTLGQNITVIAPHALENIVRQPPDRWMTNARMTHYQSLLLTERVTFAPPAALNPATLLPEETDEPVTHDCHQLLIEETGVRKDLTDIPLTGEVLTWFTDGSSYVVEGKRMAGAAVVDGTRTIWASSLPEGTSAQKAELMALTQALRLAEGKSINIYTDSRYAFATAHVHGAIYKQRGLLTSAGREIKNKEEILSLLEALHLPKRLAIIHCPGHQKAKDPISRGNQMADRVAKQAAQGVNLLAGKRTADGSEFEKRTADGSEFESPKKKAKVE

SEQ ID NO: 7515 - protein, 2088 aa, synthetic construct; identical to SEQ ID NO: 7513

SEQ ID NO: 7516 - protein, 2176 aa, synthetic construct
MPAAKRVKLDGGDKKYSIGLDIGTNSVGWAVITDEYKVPSKKFKVLGNTDRHSIKKNLIGALLFDSGETAEATRLKRTARRRYTRRKNRICYLQEIFSNEMAKVDDSFFHRLEESFLVEEDKKHERHPIFGNIVDEVAYHEKYPTIYHLRKKLVDSTDKADLRLIYLALAHMIKFRGHFLIEGDLNPDNSDVDKLFIQLVQTYNQLFEENPINASGVDAKAILSARLSKSRRLENLIAQLPGEKKNGLFGNLIALSLGLTPNFKSNFDLAEDAKLQLSKDTYDDDLDNLLAQIGDQYADLFLAAKNLSDAILLSDILRVNTEITKAPLSASMIKRYDEHHQDLTLLKALVRQQLPEKYKEIFFDQSKNGYAGYIDGGASQEEFYKFIKPILEKMDGTEELLVKLNREDLLRKQRTFDNGSIPHQIHLGELHAILRRQEDFYPFLKDNREKIEKILTFRIPYYVGPLARGNSRFAWMTRKSEETITPWNFEEVVDKGASAQSFIERMTNFDKNLPNEKVLPKHSLLYEYFTVYNELTKVKYVTEGMRKPAFLSGEQKKAIVDLLFKTNRKVTVKQLKEDYFKKIECFDSVEISGVEDRFNASLGTYHDLLKIIKDKDFLDNEENEDILEDIVLTLTLFEDREMIEERLKTYAHLFDDKVMKQLKRRRYTGWGRLSRKLINGIRDKQSGKTILDFLKSDGFANRNFMQLIHDDSLTFKEDIQKAQVSGQGDSLHEHIANLAGSPAIKKGILQTVKVVDELVKVMGRHKPENIVIEMARENQTTQKGQKNSRERMKRIEEGIKELGSQILKEHPVENTQLQNEKLYLYYLQNGRDMYVDQELDINRLSDYDVDHIVPQSFLKDDSIDNKVLTRSDKARGKSDNVPSEEVVKKMKNYWRQLLNAKLITQRKFDNLTKAERGGLSELDKAGFIKRQLVETRQITKHVAQILDSRMNTKYDENDKLIREVKVITLKSKLVSDFRKDFQFYKVREINNYHHAHDAYLNAVVGTALIKKYPKLESEFVYGDYKVYDVRKMIAKSEQEIGKATAKYFFYSNIMNFFKTEITLANGEIRKRPLIETNGETGEIVWDKGRDFATVRKVLSMPQVNIVKKTEVQTGGFSKESILPKRNSDKLIARKKDWDPKKYGGFDSPTVAYSVLVVAKVEKGKSKKLKSVKELLGITIMERSSFEKNPIDFLEAKGYKEVKKDLIIKLPKYSLFELENGRKRMLASAGELQKGNELALPSKYVNFLYLASHYEKLKGSPEDNEQKQLFVEQHKHYLDEIIEQISEFSKRVILADANLDKVLSAYNKHRDKPIREQAENIIHLFTLTNLGAPAAFKYFDTTIDRKRYTSTKEVLDATLIHQSITGLYETRIDLSQLGGDGGEAAAKPAPGGGGGMDPLQLLQPLEAEIKGTKLKAHWNSGATITCVPEAFLEDERPIQTMLIKTIHGEKQQDVYYLTFKVQGRKVEAEVLASPYDYILLNPSDVPWLMKKPLQLTVLVPLHEYQERLLQQTALPKEQKELLQKLFLKYDALWQHWENQVGHRRIKPHNIATGTLAPRPQKQYPINPKAKPSIQIVIDDLLKQGVLIQQNSTMNTPVYPVPKPDGKWRMVLDYREVNKTIPLIAAQNQHSAGILSSIYRGKYKTTLDLTNGFWAHPITPESYWLTAFTWQGKQYCWTRLPQGFLNSPALFNADVVDLLKEIPNVQAYVDDIYISHDDPQEHLEQLEKIFSILLNAGYVVSLKKSEIAQREVEFLGFNITKEGRGLTDTFKQKLLNITPPKDLKQLQSILGKLNFARNFIPNYSELVKPLYTIVAPANGKFISWTEDNSNQLQHIISVLNQADNLEERNPETRLIIKVNSSPSAGYIRYYNEGSKRPIMYVNYIFSKAEAKFTQTEKLLTTMHKGLIKAMDLAMGQEILVYSPIVSMTKIQRTPLPERKALPVRWITWMTYLEDPRIQFHYDKSLPELQQIPNVTEDVIAKTKHPSEFAMVFYTDGSAIKHPDVNKSHSAGMGIAQVQFIPEYKIVHQWSIPLGDHTAQLAEIAAVEFACKKALKISGPVLIVTDSFYVAESANKELPYWKSNGFLNNKKKPLRHVSKWKSIAECLQLKPDIIIMHEKGHQQPMTTLHTEGNNLADKLATQGSYVVHAGKRTADGSEFEKRTADGSEFESPKKKAKVE

SEQ ID NO: 7517 - protein, 2176 aa, synthetic construct
MPAAKRVKLDGGDKKYSIGLDIGTNSVGWAVITDEYKVPSKKFKVLGNTDRHSIKKNLIGALLFDSGETAEATRLKRTARRRYTRRKNRICYLQEIFSNEMAKVDDSFFHRLEESFLVEEDKKHERHPIFGNIVDEVAYHEKYPTIYHLRKKLVDSTDKADLRLIYLALAHMIKFRGHFLIEGDLNPDNSDVDKLFIQLVQTYNQLFEENPINASGVDAKAILSARLSKSRRLENLIAQLPGEKKNGLFGNLIALSLGLTPNFKSNFDLAEDAKLQLSKDTYDDDLDNLLAQIGDQYADLFLAAKNLSDAILLSDILRVNTEITKAPLSASMIKRYDEHHQDLTLLKALVRQQLPEKYKEIFFDQSKNGYAGYIDGGASQEEFYKFIKPILEKMDGTEELLVKLNREDLLRKQRTFDNGSIPHQIHLGELHAILRRQEDFYPFLKDNREKIEKILTFRIPYYVGPLARGNSRFAWMTRKSEETITPWNFEEVVDKGASAQSFIERMTNFDKNLPNEKVLPKHSLLYEYFTVYNELTKVKYVTEGMRKPAFLSGEQKKAIVDLLFKTNRKVTVKQLKEDYFKKIECFDSVEISGVEDRFNASLGTYHDLLKIIKDKDFLDNEENEDILEDIVLTLTLFEDREMIEERLKTYAHLFDDKVMKQLKRRRYTGWGRLSRKLINGIRDKQSGKTILDFLKSDGFANRNFMQLIHDDSLTFKEDIQKAQVSGQGDSLHEHIANLAGSPAIKKGILQTVKVVDELVKVMGRHKPENIVIEMARENQTTQKGQKNSRERMKRIEEGIKELGSQILKEHPVENTQLQNEKLYLYYLQNGRDMYVDQELDINRLSDYDVDHIVPQSFLKDDSIDNKVLTRSDKARGKSDNVPSEEVVKKMKNYWRQLLNAKLITQRKFDNLTKAERGGLSELDKAGFIKRQLVETRQITKHVAQILDSRMNTKYDENDKLIREVKVITLKSKLVSDFRKDFQFYKVREINNYHHAHDAYLNAVVGTALIKKYPKLESEFVYGDYKVYDVRKMIAKSEQEIGKATAKYFFYSNIMNFFKTEITLANGEIRKRPLIETNGETGEIVWDKGRDFATVRKVLSMPQVNIVKKTEVQTGGFSKESILPKRNSDKLIARKKDWDPKKYGGFDSPTVAYSVLVVAKVEKGKSKKLKSVKELLGITIMERSSFEKNPIDFLEAKGYKEVKKDLIIKLPKYSLFELENGRKRMLASAGELQKGNELALPSKYVNFLYLASHYEKLKGSPEDNEQKQLFVEQHKHYLDEIIEQISEFSKRVILADANLDKVLSAYNKHRDKPIREQAENIIHLFTLTNLGAPAAFKYFDTTIDRKRYTSTKEVLDATLIHQSITGLYETRIDLSQLGGDGGEAAAKPAPGGGGGMDPLQLLQPLEAEIKGTKLKAHWNSGATITCVPQAFLEEEVPIKNIWIKTIHGEKEQPVYYLTFKIQGRKVEAEVISSPYDYILVSPSDIPWLMKKPLQLTTLVPLQEYEERLLKQTMLTGSYKEKLQSLFLKYDALWQHWENQVGHRRIKPHHIATGTVNPRPQKQYPINPKAKASIQTVINDLLKQGVLIQQNSIMNTPVYPVPKPDGKWRMVLDYREVNKTIPLIAAQNQHSAGILSSIFRGKYKTTLDLSNGFWAHSITPESYWLTAFTWLGQQYCWTRLPQGFLNSPALFTADVVDLLKEVPNVQVYVDDIYISHDDPREHLEQLEKVFSLLLNAGYVVSLKKSEIAQHEVEFLGFNITKEGRGLTETFKQKLLNITPPRDLKQLQSILGLLNFARNFIPNFSELVKPLYNIIATANGKYITWTTDNSQQLQNIISMLNSAENLEERNPEVRLIMKVNTSPSAGYIRFYNEFAKRPIMYLNYVYTKAEVKFTNTEKLLTTIHKGLIKALDLGMGQEILVYSPIVSMTKIQKTPLPERKALPIRWITWMSYLEDPRIQFHYDKTLPELQQVPTVTDDIIAKIKHPSEFSMVFYTDGSAIKHPNVNKSHNAGMGIAQVQFKPEFTVINTWSIPLGDHTAQLAEVAAVEFACKKALKIDGPVLIVTDSFYVAESVNKELPYWQSNGFFNNKKKPLKHVSKWKSIADCIQLKPDIIIIHEKGHQPTASTFHTEGNNLADKLATQGSYVVNAGKRTADGSEFEKRTADGSEFESPKKKAKVE

SEQ ID NO: 7518 - protein, 2087 aa, synthetic construct
MPAAKRVKLDGGDKKYSIGLDIGTNSVGWAVITDEYKVPSKKFKVLGNTDRHSIKKNLIGALLFDSGETAEATRLKRTARRRYTRRKNRICYLQEIFSNEMAKVDDSFFHRLEESFLVEEDKKHERHPIFGNIVDEVAYHEKYPTIYHLRKKLVDSTDKADLRLIYLALAHMIKFRGHFLIEGDLNPDNSDVDKLFIQLVQTYNQLFEENPINASGVDAKAILSARLSKSRRLENLIAQLPGEKKNGLFGNLIALSLGLTPNFKSNFDLAEDAKLQLSKDTYDDDLDNLLAQIGDQYADLFLAAKNLSDAILLSDILRVNTEITKAPLSASMIKRYDEHHQDLTLLKALVRQQLPEKYKEIFFDQSKNGYAGYIDGGASQEEFYKFIKPILEKMDGTEELLVKLNREDLLRKQRTFDNGSIPHQIHLGELHAILRRQEDFYPFLKDNREKIEKILTFRIPYYVGPLARGNSRFAWMTRKSEETITPWNFEEVVDKGASAQSFIERMTNFDKNLPNEKVLPKHSLLYEYFTVYNELTKVKYVTEGMRKPAFLSGEQKKAIVDLLFKTNRKVTVKQLKEDYFKKIECFDSVEISGVEDRFNASLGTYHDLLKIIKDKDFLDNEENEDILEDIVLTLTLFEDREMIEERLKTYAHLFDDKVMKQLKRRRYTGWGRLSRKLINGIRDKQSGKTILDFLKSDGFANRNFMQLIHDDSLTFKEDIQKAQVSGQGDSLHEHIANLAGSPAIKKGILQTVKVVDELVKVMGRHKPENIVIEMARENQTTQKGQKNSRERMKRIEEGIKELGSQILKEHPVENTQLQNEKLYLYYLQNGRDMYVDQELDINRLSDYDVDHIVPQSFLKDDSIDNKVLTRSDKARGKSDNVPSEEVVKKMKNYWRQLLNAKLITQRKFDNLTKAERGGLSELDKAGFIKRQLVETRQITKHVAQILDSRMNTKYDENDKLIREVKVITLKSKLVSDFRKDFQFYKVREINNYHHAHDAYLNAVVGTALIKKYPKLESEFVYGDYKVYDVRKMIAKSEQEIGKATAKYFFYSNIMNFFKTEITLANGEIRKRPLIETNGETGEIVWDKGRDFATVRKVLSMPQVNIVKKTEVQTGGFSKESILPKRNSDKLIARKKDWDPKKYGGFDSPTVAYSVLVVAKVEKGKSKKLKSVKELLGITIMERSSFEKNPIDFLEAKGYKEVKKDLIIKLPKYSLFELENGRKRMLASAGELQKGNELALPSKYVNFLYLASHYEKLKGSPEDNEQKQLFVEQHKHYLDEIIEQISEFSKRVILADANLDKVLSAYNKHRDKPIREQAENIIHLFTLTNLGAPAAFKYFDTTIDRKRYTSTKEVLDATLIHQSITGLYETRIDLSQLGGDGGEAAAKPAPGGGGGIPWLMKKPLQLTTLVPLQEYEERLLKQTMLTGSYKEKLQSLFLKYDALWQHWENQVGHRRIKPHHIATGTVNPRPQKQYPINPKAKASIQTVINDLLKQGVLIQQNSIMNTPVYPVPKPDGKWRMVLDYREVNKTIPLIAAQNQHSAGILSSIFRGKYKTTLDLSNGFWAHSITPESYWLTAFTWLGQQYCWTRLPQGFLNSPALFNADVVDLLKEVPNVQVYVDDIYISHDDPREHLEQLEKVFSLLLNAGYVVSLKKSEIAQHEVEFLGFNITKEGRGLTETFKQKLLNITPPRDLKQLQSILGLLNFARNFIPNFSELVKPLYNIIATAPGKYITWTTDNSQQLQNIISMLNSAENLEERNPEVRLIMKVNTSPSAGYIRFYNEFAKRPIMYLNYVYTKAEVKFTNTEKLLTTIHKGLIKALDLGMGQEILVYSPIVSMTKIQKTPLPERKALPIRWITWMSYLEDPRIQFHYDKTLPELQQVPTVTDDIIAKIKHPSEFSMVFYTDGSAIKHPNVNKSHNAGMGIAQVQFKPEFTVINTWSIPLGDHTAQLAEVAAVEFACKKALKIDGPVLIVTDSFYVAESVNKELPYWQSNGFFNNKKKPLKHVSKWKSIADCIQLKPDIIIIHEKGHQPTASTFHTEGNNLADKLATQGSYVVNAGKRTADGSEFEKRTADGSEFESPKKKAKVE

SEQ ID NO: 7519 - protein, 2176 aa, synthetic construct
MPAAKRVKLDGGDKKYSIGLDIGTNSVGWAVITDEYKVPSKKFKVLGNTDRHSIKKNLIGALLFDSGETAEATRLKRTARRRYTRRKNRICYLQEIFSNEMAKVDDSFFHRLEESFLVEEDKKHERHPIFGNIVDEVAYHEKYPTIYHLRKKLVDSTDKADLRLIYLALAHMIKFRGHFLIEGDLNPDNSDVDKLFIQLVQTYNQLFEENPINASGVDAKAILSARLSKSRRLENLIAQLPGEKKNGLFGNLIALSLGLTPNFKSNFDLAEDAKLQLSKDTYDDDLDNLLAQIGDQYADLFLAAKNLSDAILLSDILRVNTEITKAPLSASMIKRYDEHHQDLTLLKALVRQQLPEKYKEIFFDQSKNGYAGYIDGGASQEEFYKFIKPILEKMDGTEELLVKLNREDLLRKQRTFDNGSIPHQIHLGELHAILRRQEDFYPFLKDNREKIEKILTFRIPYYVGPLARGNSRFAWMTRKSEETITPWNFEEVVDKGASAQSFIERMTNFDKNLPNEKVLPKHSLLYEYFTVYNELTKVKYVTEGMRKPAFLSGEQKKAIVDLLFKTNRKVTVKQLKEDYFKKIECFDSVEISGVEDRFNASLGTYHDLLKIIKDKDFLDNEENEDILEDIVLTLTLFEDREMIEERLKTYAHLFDDKVMKQLKRRRYTGWGRLSRKLINGIRDKQSGKTILDFLKSDGFANRNFMQLIHDDSLTFKEDIQKAQVSGQGDSLHEHIANLAGSPAIKKGILQTVKVVDELVKVMGRHKPENIVIEMARENQTTQKGQKNSRERMKRIEEGIKELGSQILKEHPVENTQLQNEKLYLYYLQNGRDMYVDQELDINRLSDYDVDHIVPQSFLKDDSIDNKVLTRSDKARGKSDNVPSEEVVKKMKNYWRQLLNAKLITQRKFDNLTKAERGGLSELDKAGFIKRQLVETRQITKHVAQILDSRMNTKYDENDKLIREVKVITLKSKLVSDFRKDFQFYKVREINNYHHAHDAYLNAVVGTALIKKYPKLESEFVYGDYKVYDVRKMIAKSEQEIGKATAKYFFYSNIMNFFKTEITLANGEIRKRPLIETNGETGEIVWDKGRDFATVRKVLSMPQVNIVKKTEVQTGGFSKESILPKRNSDKLIARKKDWDPKKYGGFDSPTVAYSVLVVAKVEKGKSKKLKSVKELLGITIMERSSFEKNPIDFLEAKGYKEVKKDLIIKLPKYSLFELENGRKRMLASAGELQKGNELALPSKYVNFLYLASHYEKLKGSPEDNEQKQLFVEQHKHYLDEIIEQISEFSKRVILADANLDKVLSAYNKHRDKPIREQAENIIHLFTLTNLGAPAAFKYFDTTIDRKRYTSTKEVLDATLIHQSITGLYETRIDLSQLGGDGGEAAAKPAPGGGGGMDPLQLLQPLEAEIKGTKLKAHWNSGATITCVPQAFLEEEVPIKNIWIKTIHGEKEQPVYYLTFKIQGRKVEAEVISSPYDYILVSPSDIPWLMKKPLQLTTLVPLQEYEERLLKQTMLTGSYKEKLQSLFLKYDALWQHWENQVGHRRIKPHHIATGTVNPRPQKQYPINPKAKASIQTVINDLLKQGVLIQQNSIMNTPVYPVPKPDGKWRMVLDYREVNKTIPLIAAQNQHSAGILSSIFRGKYKTTLDLSNGFWAHSITPESYWLTAFTWLGQQYCWTRLPQGFLNSPALFNADVVDLLKEVPNVQVYVDDIYISHDDPREHLEQLEKVFSLLLNAGYVVSLKKSEIAQHEVEFLGFNITKEGRGLTETFKQKLLNITPPRDLKQLQSILGLLNFARNFIPNFSELVKPLYNIIATAPGKYITWTTDNSQQLQNIISMLNSAENLEERNPEVRLIMKVNTSPSAGYIRFYNEFAKRPIMYLNYVYTKAEVKFTNTEKLLTTIHKGLIKALDLGMGQEILVYSPIVSMTKIQKTPLPERKALPIRWITWMSYLEDPRIQFHYDKTLPELQQVPTVTDDIIAKIKHPSEFSMVFYTDGSAIKHPNVNKSHNAGMGIAQVQFKPEFTVINTWSIPLGDHTAQLAEVAAVEFACKKALKIDGPVLIVTDSFYVAESVNKELPYWQSNGFFNNKKKPLKHVSKWKSIADCIQLKPDIIIIHEKGHQPTASTFHTEGNNLADKLATQGSYVVNAGKRTADGSEFEKRTADGSEFESPKKKAKVE

SEQ ID NO: 7520 - protein, 2017 aa, synthetic construct
MPAAKRVKLDGGDKKYSIGLDIGTNSVGWAVITDEYKVPSKKFKVLGNTDRHSIKKNLIGALLFDSGETAEATRLKRTARRRYTRRKNRICYLQEIFSNEMAKVDDSFFHRLEESFLVEEDKKHERHPIFGNIVDEVAYHEKYPTIYHLRKKLVDSTDKADLRLIYLALAHMIKFRGHFLIEGDLNPDNSDVDKLFIQLVQTYNQLFEENPINASGVDAKAILSARLSKSRRLENLIAQLPGEKKNGLFGNLIALSLGLTPNFKSNFDLAEDAKLQLSKDTYDDDLDNLLAQIGDQYADLFLAAKNLSDAILLSDILRVNTEITKAPLSASMIKRYDEHHQDLTLLKALVRQQLPEKYKEIFFDQSKNGYAGYIDGGASQEEFYKFIKPILEKMDGTEELLVKLNREDLLRKQRTFDNGSIPHQIHLGELHAILRRQEDFYPFLKDNREKIEKILTFRIPYYVGPLARGNSRFAWMTRKSEETITPWNFEEVVDKGASAQSFIERMTNFDKNLPNEKVLPKHSLLYEYFTVYNELTKVKYVTEGMRKPAFLSGEQKKAIVDLLFKTNRKVTVKQLKEDYFKKIECFDSVEISGVEDRFNASLGTYHDLLKIIKDKDFLDNEENEDILEDIVLTLTLFEDREMIEERLKTYAHLFDDKVMKQLKRRRYTGWGRLSRKLINGIRDKQSGKTILDFLKSDGFANRNFMQLIHDDSLTFKEDIQKAQVSGQGDSLHEHIANLAGSPAIKKGILQTVKVVDELVKVMGRHKPENIVIEMARENQTTQKGQKNSRERMKRIEEGIKELGSQILKEHPVENTQLQNEKLYLYYLQNGRDMYVDQELDINRLSDYDVDHIVPQSFLKDDSIDNKVLTRSDKARGKSDNVPSEEVVKKMKNYWRQLLNAKLITQRKFDNLTKAERGGLSELDKAGFIKRQLVETRQITKHVAQILDSRMNTKYDENDKLIREVKVITLKSKLVSDFRKDFQFYKVREINNYHHAHDAYLNAVVGTALIKKYPKLESEFVYGDYKVYDVRKMIAKSEQEIGKATAKYFFYSNIMNFFKTEITLANGEIRKRPLIETNGETGEIVWDKGRDFATVRKVLSMPQVNIVKKTEVQTGGFSKESILPKRNSDKLIARKKDWDPKKYGGFDSPTVAYSVLVVAKVEKGKSKKLKSVKELLGITIMERSSFEKNPIDFLEAKGYKEVKKDLIIKLPKYSLFELENGRKRMLASAGELQKGNELALPSKYVNFLYLASHYEKLKGSPEDNEQKQLFVEQHKHYLDEIIEQISEFSKRVILADANLDKVLSAYNKHRDKPIREQAENIIHLFTLTNLGAPAAFKYFDTTIDRKRYTSTKEVLDATLIHQSITGLYETRIDLSQLGGDGGEAAAKPAPGGGGGPRSRAIDIPVPHADKISWKITDPVWVDQWPLTYEKTLAAIALVQEQLAAGHIEPTNSPWNTPIFIIKKKSGSWRLLQDLRAVNKVMVPMGALQPGLPSPVAPPLNYHKIVIDLKDCFFTIPLHPEDRPYFAFSVPQINFQSPMPRYQWKVLPQGMANSPTLCQKFVAAAIAPVRSQWPEAYILHYMDDILLACDSAEAAKACYAHIISCLTSYGLKIAPDKVQVSEPFSYLGFELHHQQVFTPRVCLKTDHLKTLNDFQKLLGDIQWLRPYLKLPTSALVPLNNILKPDPNPLSVRALTPEAKQSLALINKAIQNQSVQQISYNLPLVLLLLPTPHTPTAVFWQPNGTDPTKNGSPLLWLHLPASPSKVLLTYPSLLAMLIIKGRYTGRQLFGRDPHSIIIPYTQDQLTWLLQTSDEWAIALSSFTGDIDNHYPSDPVIQFAKLHQFIFPKITKCAPIPQATLVFTDGSSNGIAAYVIDNQPISIKSPYLSAQLVELYAILQVFTVLAHQPFNLYTDSAYIAQSVPLLETVPFIKSSTNATPLFSKLQQLILNRQHPFFIGHLRAHLNLPGPLAEGNALADAATQIFPIISDAGKRTADGSEFEKRTADGSEFESPKKKAKVE

SEQ ID NO: 7521 - protein, 2094 aa, synthetic construct
MPAAKRVKLDGGDKKYSIGLDIGTNSVGWAVITDEYKVPSKKFKVLGNTDRHSIKKNLIGALLFDSGETAEATRLKRTARRRYTRRKNRICYLQEIFSNEMAKVDDSFFHRLEESFLVEEDKKHERHPIFGNIVDEVAYHEKYPTIYHLRKKLVDSTDKADLRLIYLALAHMIKFRGHFLIEGDLNPDNSDVDKLFIQLVQTYNQLFEENPINASGVDAKAILSARLSKSRRLENLIAQLPGEKKNGLFGNLIALSLGLTPNFKSNFDLAEDAKLQLSKDTYDDDLDNLLAQIGDQYADLFLAAKNLSDAILLSDILRVNTEITKAPLSASMIKRYDEHHQDLTLLKALVRQQLPEKYKEIFFDQSKNGYAGYIDGGASQEEFYKFIKPILEKMDGTEELLVKLNREDLLRKQRTFDNGSIPHQIHLGELHAILRRQEDFYPFLKDNREKIEKILTFRIPYYVGPLARGNSRFAWMTRKSEETITPWNFEEVVDKGASAQSFIERMTNFDKNLPNEKVLPKHSLLYEYFTVYNELTKVKYVTEGMRKPAFLSGEQKKAIVDLLFKTNRKVTVKQLKEDYFKKIECFDSVEISGVEDRFNASLGTYHDLLKIIKDKDFLDNEENEDILEDIVLTLTLFEDREMIEERLKTYAHLFDDKVMKQLKRRRYTGWGRLSRKLINGIRDKQSGKTILDFLKSDGFANRNFMQLIHDDSLTFKEDIQKAQVSGQGDSLHEHIANLAGSPAIKKGILQTVKVVDELVKVMGRHKPENIVIEMARENQTTQKGQKNSRERMKRIEEGIKELGSQILKEHPVENTQLQNEKLYLYYLQNGRDMYVDQELDINRLSDYDVDHIVPQSFLKDDSIDNKVLTRSDKARGKSDNVPSEEVVKKMKNYWRQLLNAKLITQRKFDNLTKAERGGLSELDKAGFIKRQLVETRQITKHVAQILDSRMNTKYDENDKLIREVKVITLKSKLVSDFRKDFQFYKVREINNYHHAHDAYLNAVVGTALIKKYPKLESEFVYGDYKVYDVRKMIAKSEQEIGKATAKYFFYSNIMNFFKTEITLANGEIRKRPLIETNGETGEIVWDKGRDFATVRKVLSMPQVNIVKKTEVQTGGFSKESILPKRNSDKLIARKKDWDPKKYGGFDSPTVAYSVLVVAKVEKGKSKKLKSVKELLGITIMERSSFEKNPIDFLEAKGYKEVKKDLIIKLPKYSLFELENGRKRMLASAGELQKGNELALPSKYVNFLYLASHYEKLKGSPEDNEQKQLFVEQHKHYLDEIIEQISEFSKRVILADANLDKVLSAYNKHRDKPIREQAENIIHLFTLTNLGAPAAFKYFDTTIDRKRYTSTKEVLDATLIHQSITGLYETRIDLSQLGGDGGEAAAKPAPGGGGGVLNLEEEYRLHEKPVPSSIDPSWLQLFPTVWAERAGMGLANQVPPVVVELRSGASPVAVRQYPMSKEAREGIRPHIQRFLDLGVLVPCQSPWNTPLLPVKKPGTNDYRPVQDLREINKRVQDIHPTVPNPYNLLSSLPPSHTWYSVLDLKDAFFCLKLHPNSQPLFAFEWRDPEKGNTGQLTWTRLPQGFKNSPTLFNEALHRDLAPFRALNPQVVLLQYVDDLLVAAPTYRDCKEGTQKLLQELSKLGYRVSAKKAQLCQKEVTYLGYLLKEGKRWLTPARKATVMKIPPPTTPRQVREFLGKAGFCRLFIPGFASLAAPLYPLTKPSIPFIWTEEHQKAFDRIKEALLSAPALALPDLTKPFTLYVDERAGVARGVLTQTLGPWRRPVAYLSKKLDPVASGWPTCLKAVAAVALLLKDADKLTLGQNVTVIASHSLESIVRQPPDRWMTNARMTHYQSLLLNERVSFAPPAVLNPATLLPVESEATPVHRCSEILAEETGTRRDLKDQPLPGVPAWYTDGSSFIAEGKRRAGAAIVDGKRTVWASSLPEGTSAQKAELVALTQALRLAEGKDINIYTDSRYAFATAHIHGAIYKQRGWLTSAGKDIKNKEEILALLEAIHLPKRVAIIHCPGHQKGNDPVATGNRRADEAAKQAALSTRVLAETTKPAGKRTADGSEFEKRTADGSEFESPKKKAKVE

SEQ ID NO: 7522 - protein, 2096 aa, synthetic construct
MPAAKRVKLDGGDKKYSIGLDIGTNSVGWAVITDEYKVPSKKFKVLGNTDRHSIKKNLIGALLFDSGETAEATRLKRTARRRYTRRKNRICYLQEIFSNEMAKVDDSFFHRLEESFLVEEDKKHERHPIFGNIVDEVAYHEKYPTIYHLRKKLVDSTDKADLRLIYLALAHMIKFRGHFLIEGDLNPDNSDVDKLFIQLVQTYNQLFEENPINASGVDAKAILSARLSKSRRLENLIAQLPGEKKNGLFGNLIALSLGLTPNFKSNFDLAEDAKLQLSKDTYDDDLDNLLAQIGDQYADLFLAAKNLSDAILLSDILRVNTEITKAPLSASMIKRYDEHHQDLTLLKALVRQQLPEKYKEIFFDQSKNGYAGYIDGGASQEEFYKFIKPILEKMDGTEELLVKLNREDLLRKQRTFDNGSIPHQIHLGELHAILRRQEDFYPFLKDNREKIEKILTFRIPYYVGPLARGNSRFAWMTRKSEETITPWNFEEVVDKGASAQSFIERMTNFDKNLPNEKVLPKHSLLYEYFTVYNELTKVKYVTEGMRKPAFLSGEQKKAIVDLLFKTNRKVTVKQLKEDYFKKIECFDSVEISGVEDRFNASLGTYHDLLKIIKDKDFLDNEENEDILEDIVLTLTLFEDREMIEERLKTYAHLFDDKVMKQLKRRRYTGWGRLSRKLINGIRDKQSGKTILDFLKSDGFANRNFMQLIHDDSLTFKEDIQKAQVSGQGDSLHEHIANLAGSPAIKKGILQTVKVVDELVKVMGRHKPENIVIEMARENQTTQKGQKNSRERMKRIEEGIKELGSQILKEHPVENTQLQNEKLYLYYLQNGRDMYVDQELDINRLSDYDVDHIVPQSFLKDDSIDNKVLTRSDKARGKSDNVPSEEVVKKMKNYWRQLLNAKLITQRKFDNLTKAERGGLSELDKAGFIKRQLVETRQITKHVAQILDSRMNTKYDENDKLIREVKVITLKSKLVSDFRKDFQFYKVREINNYHHAHDAYLNAVVGTALIKKYPKLESEFVYGDYKVYDVRKMIAKSEQEIGKATAKYFFYSNIMNFFKTEITLANGEIRKRPLIETNGETGEIVWDKGRDFATVRKVLSMPQVNIVKKTEVQTGGFSKESILPKRNSDKLIARKKDWDPKKYGGFDSPTVAYSVLVVAKVEKGKSKKLKSVKELLGITIMERSSFEKNPIDFLEAKGYKEVKKDLIIKLPKYSLFELENGRKRMLASAGELQKGNELALPSKYVNFLYLASHYEKLKGSPEDNEQKQLFVEQHKHYLDEIIEQISEFSKRVILADANLDKVLSAYNKHRDKPIREQAENIIHLFTLTNLGAPAAFKYFDTTIDRKRYTSTKEVLDATLIHQSITGLYETRIDLSQLGGDGGEAAAKPAPGGGGGTLNIEDEYRLHETSKEPDVPLGSTWLSDFPQAWAETGGMGLAVRQAPLIIPLKATSTPVSIKQYPMSQEARLGIKPHIQRLLDQGILVPCQSPWNTPLLPVKKPGTNDYRPVQDLREVNKRVEDIHPTVPNPYNLLSGLPPSHQWYTVLDLKDAFFCLRLHPTSQPLFAFEWRDPEMGISGQLTWTRLPQGFKNSPTLFNEALHRDLADFRIQHPDLILLQYVDDLLLAATSEQDCQRGTRALLQTLGNLGYRASAKKAQICQKQVKYLGYLLKEGQRWLTEARKETVMGQPTPKTPRQLREFLGTAGFCRLWIPGFAEMAAPLYPLTKPGTLFNWGPDQQKAYQEIKQALLTAPALGLPDLTKPFELFVDEKQGYAKGVLTQKLGPWRRPVAYLSKKLDPVAAGWPPCLRMVAAIAVLTKDAGKLTMGQPLVILAPHAVEALVKQPPDRWLSNARMTHYQAMLLDTDRVQFGPVVALNPATLLPLPEKEAPHDCLEILAETHGTRPDLTDQPIPDADYTWYTDGSSFLQEGQRRAGAAVTTETEVIWARALPAGTSAQRAELIALTQALKMAEGKKLNVYTDSRYAFATAHVHGEIYRRRGWLTSEGREIKNKNEILALLKALFLPKRLSIIHCPGHQKGNSAEARGNRMADQAAREAAMKAVLETSTLLAGKRTADGSEFEKRTADGSEFESPKKKAKVE

SEQ ID NO: 7523 - protein, 2096 aa, synthetic construct
MPAAKRVKLDGGDKKYSIGLDIGTNSVGWAVITDEYKVPSKKFKVLGNTDRHSIKKNLIGALLFDSGETAEATRLKRTARRRYTRRKNRICYLQEIFSNEMAKVDDSFFHRLEESFLVEEDKKHERHPIFGNIVDEVAYHEKYPTIYHLRKKLVDSTDKADLRLIYLALAHMIKFRGHFLIEGDLNPDNSDVDKLFIQLVQTYNQLFEENPINASGVDAKAILSARLSKSRRLENLIAQLPGEKKNGLFGNLIALSLGLTPNFKSNFDLAEDAKLQLSKDTYDDDLDNLLAQIGDQYADLFLAAKNLSDAILLSDILRVNTEITKAPLSASMIKRYDEHHQDLTLLKALVRQQLPEKYKEIFFDQSKNGYAGYIDGGASQEEFYKFIKPILEKMDGTEELLVKLNREDLLRKQRTFDNGSIPHQIHLGELHAILRRQEDFYPFLKDNREKIEKILTFRIPYYVGPLARGNSRFAWMTRKSEETITPWNFEEVVDKGASAQSFIERMTNFDKNLPNEKVLPKHSLLYEYFTVYNELTKVKYVTEGMRKPAFLSGEQKKAIVDLLFKTNRKVTVKQLKEDYFKKIECFDSVEISGVEDRFNASLGTYHDLLKIIKDKDFLDNEENEDILEDIVLTLTLFEDREMIEERLKTYAHLFDDKVMKQLKRRRYTGWGRLSRKLINGIRDKQSGKTILDFLKSDGFANRNFMQLIHDDSLTFKEDIQKAQVSGQGDSLHEHIANLAGSPAIKKGILQTVKVVDELVKVMGRHKPENIVIEMARENQTTQKGQKNSRERMKRIEEGIKELGSQILKEHPVENTQLQNEKLYLYYLQNGRDMYVDQELDINRLSDYDVDHIVPQSFLKDDSIDNKVLTRSDKARGKSDNVPSEEVVKKMKNYWRQLLNAKLITQRKFDNLTKAERGGLSELDKAGFIKRQLVETRQITKHVAQILDSRMNTKYDENDKLIREVKVITLKSKLVSDFRKDFQFYKVREINNYHHAHDAYLNAVVGTALIKKYPKLESEFVYGDYKVYDVRKMIAKSEQEIGKATAKYFFYSNIMNFFKTEITLANGEIRKRPLIETNGETGEIVWDKGRDFATVRKVLSMPQVNIVKKTEVQTGGFSKESILPKRNSDKLIARKKDWDPKKYGGFDSPTVAYSVLVVAKVEKGKSKKLKSVKELLGITIMERSSFEKNPIDFLEAKGYKEVKKDLIIKLPKYSLFELENGRKRMLASAGELQKGNELALPSKYVNFLYLASHYEKLKGSPEDNEQKQLFVEQHKHYLDEIIEQISEFSKRVILADANLDKVLSAYNKHRDKPIREQAENIIHLFTLTNLGAPAAFKYFDTTIDRKRYTSTKEVLDATLIHQSITGLYETRIDLSQLGGDGGEAAAKPAPGGGGGTLNIEDEYRLHETSKEPDVPLGSTWLSDFPQAWAETGGMGLAVRQAPLIIPLKATSTPVSIKQYPMSQEARLGIKPHIQRLLDQGILVPCQSPWNTPLLPVKKPGTNDYRPVQDLREVNKRVEDIHPTVPNPYNLLSGLPPSHQWYTVLDLKDAFFCLRLHPTSQPLFAFEWRDPEMGISGQLTWTRLPQGFKNSPTLFNEALHRDLADFRIQHPDLILLQYVDDLLLAATSEQDCQRGTRALLQTLGNLGYRASAKKAQICQKQVKYLGYLLKEGQRWLTEARKETVMGQPTPKTPRQLREFLGKAGFCRLFIPGFAEMAAPLYPLTKPGTLFNWGPDQQKAYQEIKQALLTAPALGLPDLTKPFELFVDEKQGYAKGVLTQKLGPWRRPVAYLSKKLDPVAAGWPPCLRMVAAIAVLTKDAGKLTMGQPLVILAPHAVEALVKQPPDRWLSNARMTHYQAMLLDTDRVQFGPVVALNPATLLPLPEKEAPHDCLEILAETHGTRPDLTDQPIPDADYTWYTDGSSFLQEGQRRAGAAVTTETEVIWARALPAGTSAQRAELIALTQALKMAEGKKLNVYTDSRYAFATAHVHGEIYRRRGWLTSEGREIKNKNEILALLKALFLPKRLSIIHCPGHQKGNSAEARGNRMADQAAREAAMKAVLETSTLLAGKRTADGSEFEKRTADGSEFESPKKKAKVE

SEQ ID NO: 7524 - protein, 2098 aa, synthetic construct
MPAAKRVKLDGGDKKYSIGLDIGTNSVGWAVITDEYKVPSKKFKVLGNTDRHSIKKNLIGALLFDSGETAEATRLKRTARRRYTRRKNRICYLQEIFSNEMAKVDDSFFHRLEESFLVEEDKKHERHPIFGNIVDEVAYHEKYPTIYHLRKKLVDSTDKADLRLIYLALAHMIKFRGHFLIEGDLNPDNSDVDKLFIQLVQTYNQLFEENPINASGVDAKAILSARLSKSRRLENLIAQLPGEKKNGLFGNLIALSLGLTPNFKSNFDLAEDAKLQLSKDTYDDDLDNLLAQIGDQYADLFLAAKNLSDAILLSDILRVNTEITKAPLSASMIKRYDEHHQDLTLLKALVRQQLPEKYKEIFFDQSKNGYAGYIDGGASQEEFYKFIKPILEKMDGTEELLVKLNREDLLRKQRTFDNGSIPHQIHLGELHAILRRQEDFYPFLKDNREKIEKILTFRIPYYVGPLARGNSRFAWMTRKSEETITPWNFEEVVDKGASAQSFIERMTNFDKNLPNEKVLPKHSLLYEYFTVYNELTKVKYVTEGMRKPAFLSGEQKKAIVDLLFKTNRKVTVKQLKEDYFKKIECFDSVEISGVEDRFNASLGTYHDLLKIIKDKDFLDNEENEDILEDIVLTLTLFEDREMIEERLKTYAHLFDDKVMKQLKRRRYTGWGRLSRKLINGIRDKQSGKTILDFLKSDGFANRNFMQLIHDDSLTFKEDIQKAQVSGQGDSLHEHIANLAGSPAIKKGILQTVKVVDELVKVMGRHKPENIVIEMARENQTTQKGQKNSRERMKRIEEGIKELGSQILKEHPVENTQLQNEKLYLYYLQNGRDMYVDQELDINRLSDYDVDHIVPQSFLKDDSIDNKVLTRSDKARGKSDNVPSEEVVKKMKNYWRQLLNAKLITQRKFDNLTKAERGGLSELDKAGFIKRQLVETRQITKHVAQILDSRMNTKYDENDKLIREVKVITLKSKLVSDFRKDFQFYKVREINNYHHAHDAYLNAVVGTALIKKYPKLESEFVYGDYKVYDVRKMIAKSEQEIGKATAKYFFYSNIMNFFKTEITLANGEIRKRPLIETNGETGEIVWDKGRDFATVRKVLSMPQVNIVKKTEVQTGGFSKESILPKRNSDKLIARKKDWDPKKYGGFDSPTVAYSVLVVAKVEKGKSKKLKSVKELLGITIMERSSFEKNPIDFLEAKGYKEVKKDLIIKLPKYSLFELENGRKRMLASAGELQKGNELALPSKYVNFLYLASHYEKLKGSPEDNEQKQLFVEQHKHYLDEIIEQISEFSKRVILADANLDKVLSAYNKHRDKPIREQAENIIHLFTLTNLGAPAAFKYFDTTIDRKRYTSTKEVLDATLIHQSITGLYETRIDLSQLGGDGGPAPGGGEAAAKGGTAPLEEEYRLFLEAPIQNVTLLEQWKREIPKVWAEINPPGLASTQAPIHVQLLSTALPVRVRQYPITLEAKRSLRETIRKFRAAGILRPVHSPWNTPLLPVRKSGTSEYRMVQDLREVNKRVETIHPTVPNPYTLLSLLPPDRIWYSVLDLKDAFFCIPLAPESQLIFAFEWADAEEGESGQLTWTRLPQGFKNSPTLFDEALNRDLQGFRLDHPSVSLLQYVDDLLIAADTQAACLSATRDLLMTLAELGYRVSGKKAQLCQEEVTYLGFKIHKGSRSLSNSRTQAILQIPVPKTKRQVREFLGTIGYCRLWIPGFAELAQPLYAATRGGNDPLVWGEKEEEAFQSLKLALTQPPALALPSLDKPFQLFVEETSGAAKGVLTQALGPWKRPVAYLSKRLDPVAAGWPRCLRAIAAAALLTREASKLTFGQDIEITSSHNLESLLRSPPDKWLTNARITQYQVLLLDPPRVRFKQTAALNPATLLPETDDTLPIHHCLDTLDSLTSTRPDLTDQPLAQAEATLFTDGSSYIRDGKRYAGAAVVTLDSVIWAEPLPIGTSAQKAELIALTKALEWSKDKSVNIYTDSRYAFATLHVHGMIYRERGLLTAGGKAIKNAPEILALLTAVWLPKRVAVMHCKGHQKDDAPTSTGNRRADEVAREVAIRPLSTQATISAGKRTADGSEFEKRTADGSEFESPKKKAKVE

SEQ ID NO: 7525 - protein, 2098 aa, synthetic construct
MPAAKRVKLDGGDKKYSIGLDIGTNSVGWAVITDEYKVPSKKFKVLGNTDRHSIKKNLIGALLFDSGETAEATRLKRTARRRYTRRKNRICYLQEIFSNEMAKVDDSFFHRLEESFLVEEDKKHERHPIFGNIVDEVAYHEKYPTIYHLRKKLVDSTDKADLRLIYLALAHMIKFRGHFLIEGDLNPDNSDVDKLFIQLVQTYNQLFEENPINASGVDAKAILSARLSKSRRLENLIAQLPGEKKNGLFGNLIALSLGLTPNFKSNFDLAEDAKLQLSKDTYDDDLDNLLAQIGDQYADLFLAAKNLSDAILLSDILRVNTEITKAPLSASMIKRYDEHHQDLTLLKALVRQQLPEKYKEIFFDQSKNGYAGYIDGGASQEEFYKFIKPILEKMDGTEELLVKLNREDLLRKQRTFDNGSIPHQIHLGELHAILRRQEDFYPFLKDNREKIEKILTFRIPYYVGPLARGNSRFAWMTRKSEETITPWNFEEVVDKGASAQSFIERMTNFDKNLPNEKVLPKHSLLYEYFTVYNELTKVKYVTEGMRKPAFLSGEQKKAIVDLLFKTNRKVTVKQLKEDYFKKIECFDSVEISGVEDRFNASLGTYHDLLKIIKDKDFLDNEENEDILEDIVLTLTLFEDREMIEERLKTYAHLFDDKVMKQLKRRRYTGWGRLSRKLINGIRDKQSGKTILDFLKSDGFANRNFMQLIHDDSLTFKEDIQKAQVSGQGDSLHEHIANLAGSPAIKKGILQTVKVVDELVKVMGRHKPENIVIEMARENQTTQKGQKNSRERMKRIEEGIKELGSQILKEHPVENTQLQNEKLYLYYLQNGRDMYVDQELDINRLSDYDVDHIVPQSFLKDDSIDNKVLTRSDKARGKSDNVPSEEVVKKMKNYWRQLLNAKLITQRKFDNLTKAERGGLSELDKAGFIKRQLVETRQITKHVAQILDSRMNTKYDENDKLIREVKVITLKSKLVSDFRKDFQFYKVREINNYHHAHDAYLNAVVGTALIKKYPKLESEFVYGDYKVYDVRKMIAKSEQEIGKATAKYFFYSNIMNFFKTEITLANGEIRKRPLIETNGETGEIVWDKGRDFATVRKVLSMPQVNIVKKTEVQTGGFSKESILPKRNSDKLIARKKDWDPKKYGGFDSPTVAYSVLVVAKVEKGKSKKLKSVKELLGITIMERSSFEKNPIDFLEAKGYKEVKKDLIIKLPKYSLFELENGRKRMLASAGELQKGNELALPSKYVNFLYLASHYEKLKGSPEDNEQKQLFVEQHKHYLDEIIEQISEFSKRVILADANLDKVLSAYNKHRDKPIREQAENIIHLFTLTNLGAPAAFKYFDTTIDRKRYTSTKEVLDATLIHQSITGLYETRIDLSQLGGDGGPAPGGGEAAAKGGTAPLEEEYRLFLEAPIQNVTLLEQWKREIPKVWAEINPPGLASTQAPIHVQLLSTALPVRVRQYPITLEAKRSLRETIRKFRAAGILRPVHSPWNTPLLPVRKSGTSEYRMVQDLREVNKRVETIHPTVPNPYTLLSLLPPDRIWYSVLDLKDAFFCIPLAPESQLIFAFEWADAEEGESGQLTWTRLPQGFKNSPTLFNEALNRDLQGFRLDHPSVSLLQYVDDLLIAADTQAACLSATRDLLMTLAELGYRVSGKKAQLCQEEVTYLGFKIHKGSRSLSNSRTQAILQIPVPKTKRQVREFLGTIGYCRLWIPGFAELAQPLYAATRPGNDPLVWGEKEEEAFQSLKLALTQPPALALPSLDKPFQLFVEETSGAAKGVLTQALGPWKRPVAYLSKRLDPVAAGWPRCLRAIAAAALLTREASKLTFGQDIEITSSHNLESLLRSPPDKWLTNARITQYQVLLLDPPRVRFKQTAALNPATLLPETDDTLPIHHCLDTLDSLTSTRPDLTDQPLAQAEATLFTDGSSYIRDGKRYAGAAVVTLDSVIWAEPLPIGTSAQKAELIALTKALEWSKDKSVNIYTDSRYAFATLHVHGMIYRERGWLTAGGKAIKNAPEILALLTAVWLPKRVAVMHCKGHQKDDAPTSTGNRRADEVAREVAIRPLSTQATISAGKRTADGSEFEKRTADGSEFESPKKKAKVE

SEQ ID NO: 7526 - protein, 2098 aa, synthetic construct
MPAAKRVKLDGGDKKYSIGLDIGTNSVGWAVITDEYKVPSKKFKVLGNTDRHSIKKNLIGALLFDSGETAEATRLKRTARRRYTRRKNRICYLQEIFSNEMAKVDDSFFHRLEESFLVEEDKKHERHPIFGNIVDEVAYHEKYPTIYHLRKKLVDSTDKADLRLIYLALAHMIKFRGHFLIEGDLNPDNSDVDKLFIQLVQTYNQLFEENPINASGVDAKAILSARLSKSRRLENLIAQLPGEKKNGLFGNLIALSLGLTPNFKSNFDLAEDAKLQLSKDTYDDDLDNLLAQIGDQYADLFLAAKNLSDAILLSDILRVNTEITKAPLSASMIKRYDEHHQDLTLLKALVRQQLPEKYKEIFFDQSKNGYAGYIDGGASQEEFYKFIKPILEKMDGTEELLVKLNREDLLRKQRTFDNGSIPHQIHLGELHAILRRQEDFYPFLKDNREKIEKILTFRIPYYVGPLARGNSRFAWMTRKSEETITPWNFEEVVDKGASAQSFIERMTNFDKNLPNEKVLPKHSLLYEYFTVYNELTKVKYVTEGMRKPAFLSGEQKKAIVDLLFKTNRKVTVKQLKEDYFKKIECFDSVEISGVEDRFNASLGTYHDLLKIIKDKDFLDNEENEDILEDIVLTLTLFEDREMIEERLKTYAHLFDDKVMKQLKRRRYTGWGRLSRKLINGIRDKQSGKTILDFLKSDGFANRNFMQLIHDDSLTFKEDIQKAQVSGQGDSLHEHIANLAGSPAIKKGILQTVKVVDELVKVMGRHKPENIVIEMARENQTTQKGQKNSRERMKRIEEGIKELGSQILKEHPVENTQLQNEKLYLYYLQNGRDMYVDQELDINRLSDYDVDHIVPQSFLKDDSIDNKVLTRSDKARGKSDNVPSEEVVKKMKNYWRQLLNAKLITQRKFDNLTKAERGGLSELDKAGFIKRQLVETRQITKHVAQILDSRMNTKYDENDKLIREVKVITLKSKLVSDFRKDFQFYKVREINNYHHAHDAYLNAVVGTALIKKYPKLESEFVYGDYKVYDVRKMIAKSEQEIGKATAKYFFYSNIMNFFKTEITLANGEIRKRPLIETNGETGEIVWDKGRDFATVRKVLSMPQVNIVKKTEVQTGGFSKESILPKRNSDKLIARKKDWDPKKYGGFDSPTVAYSVLVVAKVEKGKSKKLKSVKELLGITIMERSSFEKNPIDFLEAKGYKEVKKDLIIKLPKYSLFELENGRKRMLASAGELQKGNELALPSKYVNFLYLASHYEKLKGSPEDNEQKQLFVEQHKHYLDEIIEQISEFSKRVILADANLDKVLSAYNKHRDKPIREQAENIIHLFTLTNLGAPAAFKYFDTTIDRKRYTSTKEVLDATLIHQSITGLYETRIDLSQLGGDGGPAPGGGEAAAKGGTAPLEEEYRLFLEAPIQNVTLLEQWKREIPKVWAEINPPGLASTQAPIHVQLLSTALPVRVRQYPITLEAKRSLRETIRKFRAAGILRPVHSPWNTPLLPVRKSGTSEYRMVQDLREVNKRVETIHPTVPNPYTLLSLLPPDRIWYSVLDLKDAFFCIPLAPESQLIFAFEWADAEEGESGQLTWTRLPQGFKNSPTLFNEALNRDLQGFRLDHPSVSLLQYVDDLLIAADTQAACLSATRDLLMTLAELGYRVSGKKAQLCQEEVTYLGFKIHKGSRSLSNSRTQAILQIPVPKTKRQVREFLGKIGYCRLFIPGFAELAQPLYAATRPGNDPLVWGEKEEEAFQSLKLALTQPPALALPSLDKPFQLFVEETSGAAKGVLTQALGPWKRPVAYLSKRLDPVAAGWPRCLRAIAAAALLTREASKLTFGQDIEITSSHNLESLLRSPPDKWLTNARITQYQVLLLDPPRVRFKQTAALNPATLLPETDDTLPIHHCLDTLDSLTSTRPDLTDQPLAQAEATLFTDGSSYIRDGKRYAGAAVVTLDSVIWAEPLPIGTSAQKAELIALTKALEWSKDKSVNIYTDSRYAFATLHVHGMIYRERGWLTAGGKAIKNAPEILALLTAVWLPKRVAVMHCKGHQKDDAPTSTGNRRADEVAREVAIRPLSTQATISAGKRTADGSEFEKRTADGSEFESPKKKAKVE

SEQ ID NO: 7527 - protein, 2173 aa, synthetic construct
MPAAKRVKLDGGDKKYSIGLDIGTNSVGWAVITDEYKVPSKKFKVLGNTDRHSIKKNLIGALLFDSGETAEATRLKRTARRRYTRRKNRICYLQEIFSNEMAKVDDSFFHRLEESFLVEEDKKHERHPIFGNIVDEVAYHEKYPTIYHLRKKLVDSTDKADLRLIYLALAHMIKFRGHFLIEGDLNPDNSDVDKLFIQLVQTYNQLFEENPINASGVDAKAILSARLSKSRRLENLIAQLPGEKKNGLFGNLIALSLGLTPNFKSNFDLAEDAKLQLSKDTYDDDLDNLLAQIGDQYADLFLAAKNLSDAILLSDILRVNTEITKAPLSASMIKRYDEHHQDLTLLKALVRQQLPEKYKEIFFDQSKNGYAGYIDGGASQEEFYKFIKPILEKMDGTEELLVKLNREDLLRKQRTFDNGSIPHQIHLGELHAILRRQEDFYPFLKDNREKIEKILTFRIPYYVGPLARGNSRFAWMTRKSEETITPWNFEEVVDKGASAQSFIERMTNFDKNLPNEKVLPKHSLLYEYFTVYNELTKVKYVTEGMRKPAFLSGEQKKAIVDLLFKTNRKVTVKQLKEDYFKKIECFDSVEISGVEDRFNASLGTYHDLLKIIKDKDFLDNEENEDILEDIVLTLTLFEDREMIEERLKTYAHLFDDKVMKQLKRRRYTGWGRLSRKLINGIRDKQSGKTILDFLKSDGFANRNFMQLIHDDSLTFKEDIQKAQVSGQGDSLHEHIANLAGSPAIKKGILQTVKVVDELVKVMGRHKPENIVIEMARENQTTQKGQKNSRERMKRIEEGIKELGSQILKEHPVENTQLQNEKLYLYYLQNGRDMYVDQELDINRLSDYDVDHIVPQSFLKDDSIDNKVLTRSDKARGKSDNVPSEEVVKKMKNYWRQLLNAKLITQRKFDNLTKAERGGLSELDKAGFIKRQLVETRQITKHVAQILDSRMNTKYDENDKLIREVKVITLKSKLVSDFRKDFQFYKVREINNYHHAHDAYLNAVVGTALIKKYPKLESEFVYGDYKVYDVRKMIAKSEQEIGKATAKYFFYSNIMNFFKTEITLANGEIRKRPLIETNGETGEIVWDKGRDFATVRKVLSMPQVNIVKKTEVQTGGFSKESILPKRNSDKLIARKKDWDPKKYGGFDSPTVAYSVLVVAKVEKGKSKKLKSVKELLGITIMERSSFEKNPIDFLEAKGYKEVKKDLIIKLPKYSLFELENGRKRMLASAGELQKGNELALPSKYVNFLYLASHYEKLKGSPEDNEQKQLFVEQHKHYLDEIIEQISEFSKRVILADANLDKVLSAYNKHRDKPIREQAENIIHLFTLTNLGAPAAFKYFDTTIDRKRYTSTKEVLDATLIHQSITGLYETRIDLSQLGGDGGPAPGGGEAAAKGGMDLLKPLTVERKGVKIKGYWNSQADITCVPKDLLQGEEPVRQQNVTTIHGTQEGDVYYVNLKIDGRRINTEVIGTTLDYAIITPGDVPWILKKPLELTIKLDLEEQQGTLLNNSILSKKGKEELKQLFEKYSALWQSWENQVGHRRIRPHKIATGTVKPTPQKQYHINPKAKPDIQIVINDLLKQGVLIQKESTMNTPVYPVPKPNGRWRMVLDYRAVNKVTPLIAVQNQHSYGILGSLFKGRYKTTIDLSNGFWAHPIVPEDYWITAFTWQGKQYCWTVLPQGFLNSPGLFTGDVVDLLQGIPNVEVYVDDVYISHDSEKEHLEYLDILFNRLKEAGYIISLKKSNIANSIVDFLGFQITNEGRGLTDTFKEKLENITAPTTLKQLQSILGLLNFARNFIPDFTELIAPLYALIPKSTKNYVPWQIEHSTTLETLITKLNGAEYLQGRKGDKTLIMKVNASYTTGYIRYYNEGEKKPISYVSIVFSKTELKFTELEKLLTTVHKGLLKALDLSMGQNIHVYSPIVSMQNIQKTPQTAKKALASRWLSWLSYLEDPRIRFFYDPQMPALKDLPAVDTGKDNKKHPSNFQHIFYTDGSAITSPTKEGHLNAGMGIVYFINKDGNLQKQQEWSISLGNHTAQFAEIAAFEFALKKCLPLGGNILVVTDSNYVAKAYNEELDVWASNGFVNNRKKPLKHISKWKSVADLKRLRPDVVVTHEPGHQKLDSSPHAYGNNLADQLATQASFKVHAGKRTADGSEFEKRTADGSEFESPKKKAKVE

SEQ ID NO: 7528 - protein, 2095 aa, synthetic construct
MPAAKRVKLDGGDKKYSIGLDIGTNSVGWAVITDEYKVPSKKFKVLGNTDRHSIKKNLIGALLFDSGETAEATRLKRTARRRYTRRKNRICYLQEIFSNEMAKVDDSFFHRLEESFLVEEDKKHERHPIFGNIVDEVAYHEKYPTIYHLRKKLVDSTDKADLRLIYLALAHMIKFRGHFLIEGDLNPDNSDVDKLFIQLVQTYNQLFEENPINASGVDAKAILSARLSKSRRLENLIAQLPGEKKNGLFGNLIALSLGLTPNFKSNFDLAEDAKLQLSKDTYDDDLDNLLAQIGDQYADLFLAAKNLSDAILLSDILRVNTEITKAPLSASMIKRYDEHHQDLTLLKALVRQQLPEKYKEIFFDQSKNGYAGYIDGGASQEEFYKFIKPILEKMDGTEELLVKLNREDLLRKQRTFDNGSIPHQIHLGELHAILRRQEDFYPFLKDNREKIEKILTFRIPYYVGPLARGNSRFAWMTRKSEETITPWNFEEVVDKGASAQSFIERMTNFDKNLPNEKVLPKHSLLYEYFTVYNELTKVKYVTEGMRKPAFLSGEQKKAIVDLLFKTNRKVTVKQLKEDYFKKIECFDSVEISGVEDRFNASLGTYHDLLKIIKDKDFLDNEENEDILEDIVLTLTLFEDREMIEERLKTYAHLFDDKVMKQLKRRRYTGWGRLSRKLINGIRDKQSGKTILDFLKSDGFANRNFMQLIHDDSLTFKEDIQKAQVSGQGDSLHEHIANLAGSPAIKKGILQTVKVVDELVKVMGRHKPENIVIEMARENQTTQKGQKNSRERMKRIEEGIKELGSQILKEHPVENTQLQNEKLYLYYLQNGRDMYVDQELDINRLSDYDVDHIVPQSFLKDDSIDNKVLTRSDKARGKSDNVPSEEVVKKMKNYWRQLLNAKLITQRKFDNLTKAERGGLSELDKAGFIKRQLVETRQITKHVAQILDSRMNTKYDENDKLIREVKVITLKSKLVSDFRKDFQFYKVREINNYHHAHDAYLNAVVGTALIKKYPKLESEFVYGDYKVYDVRKMIAKSEQEIGKATAKYFFYSNIMNFFKTEITLANGEIRKRPLIETNGETGEIVWDKGRDFATVRKVLSMPQVNIVKKTEVQTGGFSKESILPKRNSDKLIARKKDWDPKKYGGFDSPTVAYSVLVVAKVEKGKSKKLKSVKELLGITIMERSSFEKNPIDFLEAKGYKEVKKDLIIKLPKYSLFELENGRKRMLASAGELQKGNELALPSKYVNFLYLASHYEKLKGSPEDNEQKQLFVEQHKHYLDEIIEQISEFSKRVILADANLDKVLSAYNKHRDKPIREQAENIIHLFTLTNLGAPAAFKYFDTTIDRKRYTSTKEVLDATLIHQSITGLYETRIDLSQLGGDGGPAPGGGEAAAKGGTLQLEEEYRLFEPESTQKQEMDIWLKNFPQAWAETGGMGTAHCQAPVLIQLKATATPISIRQYPMPHEAYQGIKPHIRRMLDQGILKPCQSPWNTPLLPVKKPGTEDYRPVQDLREVNKRVEDIHPTVPNPYNLLSTLPPSHPWYTVLDLKDAFFCLRLHSESQLLFAFEWRDPEIGLSGQLTWTRLPQGFKNSPTLFNEALHSDLADFRVRYPALVLLQYVDDLLLAAATRTECLEGTKALLETLGNKGYRASAKKAQICLQEVTYLGYSLKDGQRWLTKARKEAILSIPVPKNSRQVREFLGTAGYCRLWIPGFAELAAPLYPLTRPGTLFQWGTEQQLAFEDIKKALLSSPALGLPDITKPFELFIDENSGFAKGVLVQKLGPWKRPVAYLSKKLDTVASGWPPCLRMVAAIAILVKDAGKLTLGQPLTILTSHPVEALVRQPPNKWLSNARMTHYQAMLLDAERVHFGPTVSLNPATLLPLPSGGNHHDCLQILAETHGTRPDLTDQPLPDADLTWYTDGSSFIRNGEREAGAAVTTESEVIWAAPLPPGTSAQRAELIALTQALKMAEGKKLTVYTDSRYAFATTHVHGEIYRRRGWLTSEGKEIKNKNEILALLEALFLPKRLSIIHCPGHQKGDSPQAKGNRLADDTAKKAATETHSSLTVLPAGKRTADGSEFEKRTADGSEFESPKKKAKVE

SEQ ID NO: 7529 - protein, 2094 aa, synthetic construct
MPAAKRVKLDGGDKKYSIGLDIGTNSVGWAVITDEYKVPSKKFKVLGNTDRHSIKKNLIGALLFDSGETAEATRLKRTARRRYTRRKNRICYLQEIFSNEMAKVDDSFFHRLEESFLVEEDKKHERHPIFGNIVDEVAYHEKYPTIYHLRKKLVDSTDKADLRLIYLALAHMIKFRGHFLIEGDLNPDNSDVDKLFIQLVQTYNQLFEENPINASGVDAKAILSARLSKSRRLENLIAQLPGEKKNGLFGNLIALSLGLTPNFKSNFDLAEDAKLQLSKDTYDDDLDNLLAQIGDQYADLFLAAKNLSDAILLSDILRVNTEITKAPLSASMIKRYDEHHQDLTLLKALVRQQLPEKYKEIFFDQSKNGYAGYIDGGASQEEFYKFIKPILEKMDGTEELLVKLNREDLLRKQRTFDNGSIPHQIHLGELHAILRRQEDFYPFLKDNREKIEKILTFRIPYYVGPLARGNSRFAWMTRKSEETITPWNFEEVVDKGASAQSFIERMTNFDKNLPNEKVLPKHSLLYEYFTVYNELTKVKYVTEGMRKPAFLSGEQKKAIVDLLFKTNRKVTVKQLKEDYFKKIECFDSVEISGVEDRFNASLGTYHDLLKIIKDKDFLDNEENEDILEDIVLTLTLFEDREMIEERLKTYAHLFDDKVMKQLKRRRYTGWGRLSRKLINGIRDKQSGKTILDFLKSDGFANRNFMQLIHDDSLTFKEDIQKAQVSGQGDSLHEHIANLAGSPAIKKGILQTVKVVDELVKVMGRHKPENIVIEMARENQTTQKGQKNSRERMKRIEEGIKELGSQILKEHPVENTQLQNEKLYLYYLQNGRDMYVDQELDINRLSDYDVDHIVPQSFLKDDSIDNKVLTRSDKARGKSDNVPSEEVVKKMKNYWRQLLNAKLITQRKFDNLTKAERGGLSELDKAGFIKRQLVETRQITKHVAQILDSRMNTKYDENDKLIREVKVITLKSKLVSDFRKDFQFYKVREINNYHHAHDAYLNAVVGTALIKKYPKLESEFVYGDYKVYDVRKMIAKSEQEIGKATAKYFFYSNIMNFFKTEITLANGEIRKRPLIETNGETGEIVWDKGRDFATVRKVLSMPQVNIVKKTEVQTGGFSKESILPKRNSDKLIARKKDWDPKKYGGFDSPTVAYSVLVVAKVEKGKSKKLKSVKELLGITIMERSSFEKNPIDFLEAKGYKEVKKDLIIKLPKYSLFELENGRKRMLASAGELQKGNELALPSKYVNFLYLASHYEKLKGSPEDNEQKQLFVEQHKHYLDEIIEQISEFSKRVILADANLDKVLSAYNKHRDKPIREQAENIIHLFTLTNLGAPAAFKYFDTTIDRKRYTSTKEVLDATLIHQSITGLYETRIDLSQLGGDGGPAPGGGEAAAKGGVLNLEEEYRLHEKPVPSSIDPSWLQLFPTVWAERAGMGLANQVPPVVVELRSGASPVAVRQYPMSKEAREGIRPHIQKFLDLGVLVPCRSPWNTPLLPVKKPGTNDYRPVQDLREINKRVQDIHPTVPNPYNLLSSLPPSYTWYSVLDLKDAFFCLRLHPNSQPLFAFEWKDPEKGNTGQLTWTRLPQGFKNSPTLFNEALHRDLAPFRALNPQVVLLQYVDDLLVAAPTYEDCKKGTQKLLQELSKLGYRVSAKKAQLCQREVTYLGYLLKEGKRWLTPARKATVMKIPVPTTPRQVREFLGTAGFCRLWIPGFASLAAPLYPLTKPSIPFIWTEEHQQAFDHIKKALLSAPALALPDLTKPFTLYIDERAGVARGVLTQTLGPWRRPVAYLSKKLDPVASGWPTCLKAVAAVALLLKDADKLTLGQNVTVIASHSLESIVRQPPDRWMTNARMTHYQSLLLNERVSFAPPAVLNPATLLPVESEATPVHRCSEILAEETGTRRDLEDQPLPGVPTWYTDGSSFITEGKRRAGAPIVDGKRTVWASSLPEGTSAQKAELVALTQALRLAEGKNINIYTDSRYAFATAHIHGAIYKQRGWLTSAGKDIKNKEEILALLEAIHLPRRVAIIHCPGHQRGSNPVATGNRRADEAAKQAALSTRVLAGTTKPAGKRTADGSEFEKRTADGSEFESPKKKAKVE

SEQ ID NO: 7530 - protein, 2127 aa, synthetic construct
MPAAKRVKLDGGDKKYSIGLDIGTNSVGWAVITDEYKVPSKKFKVLGNTDRHSIKKNLIGALLFDSGETAEATRLKRTARRRYTRRKNRICYLQEIFSNEMAKVDDSFFHRLEESFLVEEDKKHERHPIFGNIVDEVAYHEKYPTIYHLRKKLVDSTDKADLRLIYLALAHMIKFRGHFLIEGDLNPDNSDVDKLFIQLVQTYNQLFEENPINASGVDAKAILSARLSKSRRLENLIAQLPGEKKNGLFGNLIALSLGLTPNFKSNFDLAEDAKLQLSKDTYDDDLDNLLAQIGDQYADLFLAAKNLSDAILLSDILRVNTEITKAPLSASMIKRYDEHHQDLTLLKALVRQQLPEKYKEIFFDQSKNGYAGYIDGGASQEEFYKFIKPILEKMDGTEELLVKLNREDLLRKQRTFDNGSIPHQIHLGELHAILRRQEDFYPFLKDNREKIEKILTFRIPYYVGPLARGNSRFAWMTRKSEETITPWNFEEVVDKGASAQSFIERMTNFDKNLPNEKVLPKHSLLYEYFTVYNELTKVKYVTEGMRKPAFLSGEQKKAIVDLLFKTNRKVTVKQLKEDYFKKIECFDSVEISGVEDRFNASLGTYHDLLKIIKDKDFLDNEENEDILEDIVLTLTLFEDREMIEERLKTYAHLFDDKVMKQLKRRRYTGWGRLSRKLINGIRDKQSGKTILDFLKSDGFANRNFMQLIHDDSLTFKEDIQKAQVSGQGDSLHEHIANLAGSPAIKKGILQTVKVVDELVKVMGRHKPENIVIEMARENQTTQKGQKNSRERMKRIEEGIKELGSQILKEHPVENTQLQNEKLYLYYLQNGRDMYVDQELDINRLSDYDVDHIVPQSFLKDDSIDNKVLTRSDKARGKSDNVPSEEVVKKMKNYWRQLLNAKLITQRKFDNLTKAERGGLSELDKAGFIKRQLVETRQITKHVAQILDSRMNTKYDENDKLIREVKVITLKSKLVSDFRKDFQFYKVREINNYHHAHDAYLNAVVGTALIKKYPKLESEFVYGDYKVYDVRKMIAKSEQEIGKATAKYFFYSNIMNFFKTEITLANGEIRKRPLIETNGETGEIVWDKGRDFATVRKVLSMPQVNIVKKTEVQTGGFSKESILPKRNSDKLIARKKDWDPKKYGGFDSPTVAYSVLVVAKVEKGKSKKLKSVKELLGITIMERSSFEKNPIDFLEAKGYKEVKKDLIIKLPKYSLFELENGRKRMLASAGELQKGNELALPSKYVNFLYLASHYEKLKGSPEDNEQKQLFVEQHKHYLDEIIEQISEFSKRVILADANLDKVLSAYNKHRDKPIREQAENIIHLFTLTNLGAPAAFKYFDTTIDRKRYTSTKEVLDATLIHQSITGLYETRIDLSQLGGDGGPAPGGGEAAAKGGLLGRDLLTKLKAQIQFSTEGPQVTWEDRPAMCLVLNLEEEYRLHEKPVPPSIDPSWLQLFPMVWAEKAGMGLANQVPPVVVELKSDASPVAVRQYPMSKEAREGIRPHIQRFLDLGILVPCQSPWNTPLLPVKKPGTNDYRPVQDLREVNKRVQDIHPTVPNPYNLLSSLPPSHTWYSVLDLKDAFFCLKLHPNSQPLFAFEWRDPEKGNTGQLTWTRLPQGFKNSPTLFNEALHRDLASFRALNPQVVMLQYVDDLLVAAPTYRDCKEGTRRLLQELSKLGYRVSAKKAQLCREEVTYLGYLLKGGKRWLTPARKATVMKIPTPTTPRQVREFLGTAGFCRLWIPGFASLAAPLYPLTRPKVPFTWTEAHQEAFGRIKEALLSAPALALPDLTKPFALYVDEKEGVARGVLTQTLGPWRRPVAYLSKKLDPVASGWPTCLKAIAAVALLLKDADKLTLGQNVLVIAPHNLESIVRQPPDRWMTNARMTHYQSLLLNERVSFAPPAILNPATLLPVESDDTPIHICSEILAEETGTRPDLRDQPLPGVPAWYTDGSSFIMDGRRQAGAAIVDNKRTVWASNLPEGTSAQKAELIALTQALRLAEGKSINIYTDSRYAFATAHVHGAIYKQRGWLTSAGKDIKNKEEILALLEAIHLPKRVAIIHCPGHQRGTDPVATGNRKADEAAKQAAQSTRILTETTKNAGKRTADGSEFEKRTADGSEFESPKKKAKVE

SEQ ID NO: 7531 - protein, 2127 aa, synthetic construct
MPAAKRVKLDGGDKKYSIGLDIGTNSVGWAVITDEYKVPSKKFKVLGNTDRHSIKKNLIGALLFDSGETAEATRLKRTARRRYTRRKNRICYLQEIFSNEMAKVDDSFFHRLEESFLVEEDKKHERHPIFGNIVDEVAYHEKYPTIYHLRKKLVDSTDKADLRLIYLALAHMIKFRGHFLIEGDLNPDNSDVDKLFIQLVQTYNQLFEENPINASGVDAKAILSARLSKSRRLENLIAQLPGEKKNGLFGNLIALSLGLTPNFKSNFDLAEDAKLQLSKDTYDDDLDNLLAQIGDQYADLFLAAKNLSDAILLSDILRVNTEITKAPLSASMIKRYDEHHQDLTLLKALVRQQLPEKYKEIFFDQSKNGYAGYIDGGASQEEFYKFIKPILEKMDGTEELLVKLNREDLLRKQRTFDNGSIPHQIHLGELHAILRRQEDFYPFLKDNREKIEKILTFRIPYYVGPLARGNSRFAWMTRKSEETITPWNFEEVVDKGASAQSFIERMTNFDKNLPNEKVLPKHSLLYEYFTVYNELTKVKYVTEGMRKPAFLSGEQKKAIVDLLFKTNRKVTVKQLKEDYFKKIECFDSVEISGVEDRFNASLGTYHDLLKIIKDKDFLDNEENEDILEDIVLTLTLFEDREMIEERLKTYAHLFDDKVMKQLKRRRYTGWGRLSRKLINGIRDKQSGKTILDFLKSDGFANRNFMQLIHDDSLTFKEDIQKAQVSGQGDSLHEHIANLAGSPAIKKGILQTVKVVDELVKVMGRHKPENIVIEMARENQTTQKGQKNSRERMKRIEEGIKELGSQILKEHPVENTQLQNEKLYLYYLQNGRDMYVDQELDINRLSDYDVDHIVPQSFLKDDSIDNKVLTRSDKARGKSDNVPSEEVVKKMKNYWRQLLNAKLITQRKFDNLTKAERGGLSELDKAGFIKRQLVETRQITKHVAQILDSRMNTKYDENDKLIREVKVITLKSKLVSDFRKDFQFYKVREINNYHHAHDAYLNAVVGTALIKKYPKLESEFVYGDYKVYDVRKMIAKSEQEIGKATAKYFFYSNIMNFFKTEITLANGEIRKRPLIETNGETGEIVWDKGRDFATVRKVLSMPQVNIVKKTEVQTGGFSKESILPKRNSDKLIARKKDWDPKKYGGFDSPTVAYSVLVVAKVEKGKSKKLKSVKELLGITIMERSSFEKNPIDFLEAKGYKEVKKDLIIKLPKYSLFELENGRKRMLASAGELQKGNELALPSKYVNFLYLASHYEKLKGSPEDNEQKQLFVEQHKHYLDEIIEQISEFSKRVILADANLDKVLSAYNKHRDKPIREQAENIIHLFTLTNLGAPAAFKYFDTTIDRKRYTSTKEVLDATLIHQSITGLYETRIDLSQLGGDGGPAPGGGEAAAKGGLLGRDLLTKLKAQIQFSTEGPQVTWEDRPAMCLVLNLEEEYRLHEKPVPPSIDPSWLQLFPMVWAEKAGMGLANQVPPVVVELKSDASPVAVRQYPMSKEAREGIRPHIQRFLDLGILVPCQSPWNTPLLPVKKPGTNDYRPVQDLREVNKRVQDIHPTVPNPYNLLSSLPPSHTWYSVLDLKDAFFCLKLHPNSQPLFAFEWRDPEKGNTGQLTWTRLPQGFKNSPTLFNEALHRDLASFRALNPQVVMLQYVDDLLVAAPTYRDCKEGTRRLLQELSKLGYRVSAKKAQLCREEVTYLGYLLKGGKRWLTPARKATVMKIPTPTTPRQVREFLGKAGFCRLFIPGFASLAAPLYPLTRPKVPFTWTEAHQEAFGRIKEALLSAPALALPDLTKPFALYVDEKEGVARGVLTQTLGPWRRPVAYLSKKLDPVASGWPTCLKAIAAVALLLKDADKLTLGQNVLVIAPHNLESIVRQPPDRWMTNARMTHYQSLLLNERVSFAPPAILNPATLLPVESDDTPIHICSEILAEETGTRPDLRDQPLPGVPAWYTDGSSFIMDGRRQAGAAIVDNKRTVWASNLPEGTSAQKAELIALTQALRLAEGKSINIYTDSRYAFATAHVHGAIYKQRGWLTSAGKDIKNKEEILALLEAIHLPKRVAIIHCPGHQRGTDPVATGNRKADEAAKQAAQSTRILTETTKNAGKRTADGSEFEKRTADGSEFESPKKKAKVE

SEQ ID NO: 7532 - protein, 2218 aa, synthetic construct
MPAAKRVKLDGGDKKYSIGLDIGTNSVGWAVITDEYKVPSKKFKVLGNTDRHSIKKNLIGALLFDSGETAEATRLKRTARRRYTRRKNRICYLQEIFSNEMAKVDDSFFHRLEESFLVEEDKKHERHPIFGNIVDEVAYHEKYPTIYHLRKKLVDSTDKADLRLIYLALAHMIKFRGHFLIEGDLNPDNSDVDKLFIQLVQTYNQLFEENPINASGVDAKAILSARLSKSRRLENLIAQLPGEKKNGLFGNLIALSLGLTPNFKSNFDLAEDAKLQLSKDTYDDDLDNLLAQIGDQYADLFLAAKNLSDAILLSDILRVNTEITKAPLSASMIKRYDEHHQDLTLLKALVRQQLPEKYKEIFFDQSKNGYAGYIDGGASQEEFYKFIKPILEKMDGTEELLVKLNREDLLRKQRTFDNGSIPHQIHLGELHAILRRQEDFYPFLKDNREKIEKILTFRIPYYVGPLARGNSRFAWMTRKSEETITPWNFEEVVDKGASAQSFIERMTNFDKNLPNEKVLPKHSLLYEYFTVYNELTKVKYVTEGMRKPAFLSGEQKKAIVDLLFKTNRKVTVKQLKEDYFKKIECFDSVEISGVEDRFNASLGTYHDLLKIIKDKDFLDNEENEDILEDIVLTLTLFEDREMIEERLKTYAHLFDDKVMKQLKRRRYTGWGRLSRKLINGIRDKQSGKTILDFLKSDGFANRNFMQLIHDDSLTFKEDIQKAQVSGQGDSLHEHIANLAGSPAIKKGILQTVKVVDELVKVMGRHKPENIVIEMARENQTTQKGQKNSRERMKRIEEGIKELGSQILKEHPVENTQLQNEKLYLYYLQNGRDMYVDQELDINRLSDYDVDHIVPQSFLKDDSIDNKVLTRSDKARGKSDNVPSEEVVKKMKNYWRQLLNAKLITQRKFDNLTKAERGGLSELDKAGFIKRQLVETRQITKHVAQILDSRMNTKYDENDKLIREVKVITLKSKLVSDFRKDFQFYKVREINNYHHAHDAYLNAVVGTALIKKYPKLESEFVYGDYKVYDVRKMIAKSEQEIGKATAKYFFYSNIMNFFKTEITLANGEIRKRPLIETNGETGEIVWDKGRDFATVRKVLSMPQVNIVKKTEVQTGGFSKESILPKRNSDKLIARKKDWDPKKYGGFDSPTVAYSVLVVAKVEKGKSKKLKSVKELLGITIMERSSFEKNPIDFLEAKGYKEVKKDLIIKLPKYSLFELENGRKRMLASAGELQKGNELALPSKYVNFLYLASHYEKLKGSPEDNEQKQLFVEQHKHYLDEIIEQISEFSKRVILADANLDKVLSAYNKHRDKPIREQAENIIHLFTLTNLGAPAAFKYFDTTIDRKRYTSTKEVLDATLIHQSITGLYETRIDLSQLGGDGGPAPGGGEAAAKGGTLGDQGSRGSDPLPEPRVTLTVEGIPTEFLVNTGAEHSVLTKPMGKMGSKRTVVAGATGSKVYPWTTKRLLKIGQKQVTHSFLVIPECPAPLLGRDLLTKLKAQIQFSTEGPQVTWEDRPAMCLVLNLEEEYRLHEKPVPPSIDPSWLQLFPMVWAEKAGMGLANQVPPVVVELKSDASPVAVRQYPMSKEAREGIRPHIQRFLDLGILVPCQSPWNTPLLPVKKPGTNDYRPVQDLREVNKRVQDIHPTVPNPYNLLSSLPPSHTWYSVLDLKDAFFCLKLHPNSQPLFAFEWRDPEKGNTGQLTWTRLPQGFKNSPTLFNEALHRDLASFRALNPQVVMLQYVDDLLVAAPTYRDCKEGTRRLLQELSKLGYRVSAKKAQLCREEVTYLGYLLKGGKRWLTPARKATVMKIPTPTTPRQVREFLGTAGFCRLWIPGFASLAAPLYPLTRPKVPFTWTEAHQEAFGRIKEALLSAPALALPDLTKPFALYVDEKEGVARGVLTQTLGPWRRPVAYLSKKLDPVASGWPTCLKAIAAVALLLKDADKLTLGQNVLVIAPHNLESIVRQPPDRWMTNARMTHYQSLLLNERVSFAPPAILNPATLLPVESDDTPIHICSEILAEETGTRPDLRDQPLPGVPAWYTDGSSFIMDGRRQAGAAIVDNKRTVWASNLPEGTSAQKAELIALTQALRLAEGKSINIYTDSRYAFATAHVHGAIYKQRGWLTSAGKDIKNKEEILALLEAIHLPKRVAIIHCPGHQRGTDPVATGNRKADEAAKQAAQSTRILTETTKNAGKRTADGSEFEKRTADGSEFESPKKKAKVE

SEQ ID NO: 7533 - protein, 2218 aa, synthetic construct
MPAAKRVKLDGGDKKYSIGLDIGTNSVGWAVITDEYKVPSKKFKVLGNTDRHSIKKNLIGALLFDSGETAEATRLKRTARRRYTRRKNRICYLQEIFSNEMAKVDDSFFHRLEESFLVEEDKKHERHPIFGNIVDEVAYHEKYPTIYHLRKKLVDSTDKADLRLIYLALAHMIKFRGHFLIEGDLNPDNSDVDKLFIQLVQTYNQLFEENPINASGVDAKAILSARLSKSRRLENLIAQLPGEKKNGLFGNLIALSLGLTPNFKSNFDLAEDAKLQLSKDTYDDDLDNLLAQIGDQYADLFLAAKNLSDAILLSDILRVNTEITKAPLSASMIKRYDEHHQDLTLLKALVRQQLPEKYKEIFFDQSKNGYAGYIDGGASQEEFYKFIKPILEKMDGTEELLVKLNREDLLRKQRTFDNGSIPHQIHLGELHAILRRQEDFYPFLKDNREKIEKILTFRIPYYVGPLARGNSRFAWMTRKSEETITPWNFEEVVDKGASAQSFIERMTNFDKNLPNEKVLPKHSLLYEYFTVYNELTKVKYVTEGMRKPAFLSGEQKKAIVDLLFKTNRKVTVKQLKEDYFKKIECFDSVEISGVEDRFNASLGTYHDLLKIIKDKDFLDNEENEDILEDIVLTLTLFEDREMIEERLKTYAHLFDDKVMKQLKRRRYTGWGRLSRKLINGIRDKQSGKTILDFLKSDGFANRNFMQLIHDDSLTFKEDIQKAQVSGQGDSLHEHIANLAGSPAIKKGILQTVKVVDELVKVMGRHKPENIVIEMARENQTTQKGQKNSRERMKRIEEGIKELGSQILKEHPVENTQLQNEKLYLYYLQNGRDMYVDQELDINRLSDYDVDHIVPQSFLKDDSIDNKVLTRSDKARGKSDNVPSEEVVKKMKNYWRQLLNAKLITQRKFDNLTKAERGGLSELDKAGFIKRQLVETRQITKHVAQILDSRMNTKYDENDKLIREVKVITLKSKLVSDFRKDFQFYKVREINNYHHAHDAYLNAVVGTALIKKYPKLESEFVYGDYKVYDVRKMIAKSEQEIGKATAKYFFYSNIMNFFKTEITLANGEIRKRPLIETNGETGEIVWDKGRDFATVRKVLSMPQVNIVKKTEVQTGGFSKESILPKRNSDKLIARKKDWDPKKYGGFDSPTVAYSVLVVAKVEKGKSKKLKSVKELLGITIMERSSFEKNPIDFLEAKGYKEVKKDLIIKLPKYSLFELENGRKRMLASAGELQKGNELALPSKYVNFLYLASHYEKLKGSPEDNEQKQLFVEQHKHYLDEIIEQISEFSKRVILADANLDKVLSAYNKHRDKPIREQAENIIHLFTLTNLGAPAAFKYFDTTIDRKRYTSTKEVLDATLIHQSITGLYETRIDLSQLGGDGGPAPGGGEAAAKGGTLGDQGSRGSDPLPEPRVTLTVEGIPTEFLVNTGAEHSVLTKPMGKMGSKRTVVAGATGSKVYPWTTKRLLKIGQKQVTHSFLVIPECPAPLLGRDLLTKLKAQIQFSTEGPQVTWEDRPAMCLVLNLEEEYRLHEKPVPPSIDPSWLQLFPMVWAEKAGMGLANQVPPVVVELKSDASPVAVRQYPMSKEAREGIRPHIQRFLDLGILVPCQSPWNTPLLPVKKPGTNDYRPVQDLREVNKRVQDIHPTVPNPYNLLSSLPPSHTWYSVLDLKDAFFCLKLHPNSQPLFAFEWRDPEKGNTGQLTWTRLPQGFKNSPTLFNEALHRDLASFRALNPQVVMLQYVDDLLVAAPTYRDCKEGTRRLLQELSKLGYRVSAKKAQLCREEVTYLGYLLKGGKRWLTPARKATVMKIPTPTTPRQVREFLGKAGFCRLFIPGFASLAAPLYPLTRPKVPFTWTEAHQEAFGRIKEALLSAPALALPDLTKPFALYVDEKEGVARGVLTQTLGPWRRPVAYLSKKLDPVASGWPTCLKAIAAVALLLKDADKLTLGQNVLVIAPHNLESIVRQPPDRWMTNARMTHYQSLLLNERVSFAPPAILNPATLLPVESDDTPIHICSEILAEETGTRPDLRDQPLPGVPAWYTDGSSFIMDGRRQAGAAIVDNKRTVWASNLPEGTSAQKAELIALTQALRLAEGKSINIYTDSRYAFATAHVHGAIYKQRGWLTSAGKDIKNKEEILALLEAIHLPKRVAIIHCPGHQRGTDPVATGNRKADEAAKQAAQSTRILTETTKNAGKRTADGSEFEKRTADGSEFESPKKKAKVE

SEQ ID NO: 7534 - protein, 2096 aa, synthetic construct
MPAAKRVKLDGGDKKYSIGLDIGTNSVGWAVITDEYKVPSKKFKVLGNTDRHSIKKNLIGALLFDSGETAEATRLKRTARRRYTRRKNRICYLQEIFSNEMAKVDDSFFHRLEESFLVEEDKKHERHPIFGNIVDEVAYHEKYPTIYHLRKKLVDSTDKADLRLIYLALAHMIKFRGHFLIEGDLNPDNSDVDKLFIQLVQTYNQLFEENPINASGVDAKAILSARLSKSRRLENLIAQLPGEKKNGLFGNLIALSLGLTPNFKSNFDLAEDAKLQLSKDTYDDDLDNLLAQIGDQYADLFLAAKNLSDAILLSDILRVNTEITKAPLSASMIKRYDEHHQDLTLLKALVRQQLPEKYKEIFFDQSKNGYAGYIDGGASQEEFYKFIKPILEKMDGTEELLVKLNREDLLRKQRTFDNGSIPHQIHLGELHAILRRQEDFYPFLKDNREKIEKILTFRIPYYVGPLARGNSRFAWMTRKSEETITPWNFEEVVDKGASAQSFIERMTNFDKNLPNEKVLPKHSLLYEYFTVYNELTKVKYVTEGMRKPAFLSGEQKKAIVDLLFKTNRKVTVKQLKEDYFKKIECFDSVEISGVEDRFNASLGTYHDLLKIIKDKDFLDNEENEDILEDIVLTLTLFEDREMIEERLKTYAHLFDDKVMKQLKRRRYTGWGRLSRKLINGIRDKQSGKTILDFLKSDGFANRNFMQLIHDDSLTFKEDIQKAQVSGQGDSLHEHIANLAGSPAIKKGILQTVKVVDELVKVMGRHKPENIVIEMARENQTTQKGQKNSRERMKRIEEGIKELGSQILKEHPVENTQLQNEKLYLYYLQNGRDMYVDQELDINRLSDYDVDHIVPQSFLKDDSIDNKVLTRSDKARGKSDNVPSEEVVKKMKNYWRQLLNAKLITQRKFDNLTKAERGGLSELDKAGFIKRQLVETRQITKHVAQILDSRMNTKYDENDKLIREVKVITLKSKLVSDFRKDFQFYKVREINNYHHAHDAYLNAVVGTALIKKYPKLESEFVYGDYKVYDVRKMIAKSEQEIGKATAKYFFYSNIMNFFKTEITLANGEIRKRPLIETNGETGEIVWDKGRDFATVRKVLSMPQVNIVKKTEVQTGGFSKESILPKRNSDKLIARKKDWDPKKYGGFDSPTVAYSVLVVAKVEKGKSKKLKSVKELLGITIMERSSFEKNPIDFLEAKGYKEVKKDLIIKLPKYSLFELENGRKRMLASAGELQKGNELALPSKYVNFLYLASHYEKLKGSPEDNEQKQLFVEQHKHYLDEIIEQISEFSKRVILADANLDKVLSAYNKHRDKPIREQAENIIHLFTLTNLGAPAAFKYFDTTIDRKRYTSTKEVLDATLIHQSITGLYETRIDLSQLGGDGGPAPGGGEAAAKGGTLNLEDEYRLYETSAEPEVSPGSTWLSDFPQAWAETGGMGLAVRQAPLIIPLKATSTPVSIKQYPMSQEAKLGIKPHIQRLLDQGILVPCQSPWNTPLLPVKKPGTNDYRPVQDLREVNKRVEDIHPTVPNPYNLLSGLPPSHRWYTVLDLKDAFFCLRLHPTSQPLFAFEWRDPGMGISGQLTWTRLPQGFKNSPTLFNEALHRDLADFRIQHPDLILLQYVDDILLAATSELDCQQGTRALLLTLGNLGYRASAKKAQLCQKQVKYLGYLLKEGQRWLTEARKETVMGQPTPKTPRQLREFLGTAGFCRLWIPGFAEMAAPLYPLTKPGTLFNWGPDQQKAYQEIKQALLTAPALGLPDLTKPFELFVDEKQGYAKGVLTQKLGPWRRPVAYLSKKLDPVAAGWPPCLRMVAAIAVLRKDAGKLTMGQPLVILAPHAVEALVKQPPDRWLSNARMTHYQAMLLDTDRVQFGPVVALNPATLLPLPEEGAPHDCLEILAETHGTRPDLTDQPIPDADHTWYTDGSSFLQEGQRKAGAAVTTETEVIWARALPAGTSAQRAELIALTQALKMAEGKRLNVYTDSRYAFATAHIHGEIYRRRGWLTSEGREIKNKSEILALLKALFLPKRLSIIHCLGHQKGDSAEARGNRLADQAAREAAIKTPPDTSTLLAGKRTADGSEFEKRTADGSEFESPKKKAKVE

SEQ ID NO: 7535 - protein, 2096 aa, synthetic construct
MPAAKRVKLDGGDKKYSIGLDIGTNSVGWAVITDEYKVPSKKFKVLGNTDRHSIKKNLIGALLFDSGETAEATRLKRTARRRYTRRKNRICYLQEIFSNEMAKVDDSFFHRLEESFLVEEDKKHERHPIFGNIVDEVAYHEKYPTIYHLRKKLVDSTDKADLRLIYLALAHMIKFRGHFLIEGDLNPDNSDVDKLFIQLVQTYNQLFEENPINASGVDAKAILSARLSKSRRLENLIAQLPGEKKNGLFGNLIALSLGLTPNFKSNFDLAEDAKLQLSKDTYDDDLDNLLAQIGDQYADLFLAAKNLSDAILLSDILRVNTEITKAPLSASMIKRYDEHHQDLTLLKALVRQQLPEKYKEIFFDQSKNGYAGYIDGGASQEEFYKFIKPILEKMDGTEELLVKLNREDLLRKQRTFDNGSIPHQIHLGELHAILRRQEDFYPFLKDNREKIEKILTFRIPYYVGPLARGNSRFAWMTRKSEETITPWNFEEVVDKGASAQSFIERMTNFDKNLPNEKVLPKHSLLYEYFTVYNELTKVKYVTEGMRKPAFLSGEQKKAIVDLLFKTNRKVTVKQLKEDYFKKIECFDSVEISGVEDRFNASLGTYHDLLKIIKDKDFLDNEENEDILEDIVLTLTLFEDREMIEERLKTYAHLFDDKVMKQLKRRRYTGWGRLSRKLINGIRDKQSGKTILDFLKSDGFANRNFMQLIHDDSLTFKEDIQKAQVSGQGDSLHEHIANLAGSPAIKKGILQTVKVVDELVKVMGRHKPENIVIEMARENQTTQKGQKNSRERMKRIEEGIKELGSQILKEHPVENTQLQNEKLYLYYLQNGRDMYVDQELDINRLSDYDVDHIVPQSFLKDDSIDNKVLTRSDKARGKSDNVPSEEVVKKMKNYWRQLLNAKLITQRKFDNLTKAERGGLSELDKAGFIKRQLVETRQITKHVAQILDSRMNTKYDENDKLIREVKVITLKSKLVSDFRKDFQFYKVREINNYHHAHDAYLNAVVGTALIKKYPKLESEFVYGDYKVYDVRKMIAKSEQEIGKATAKYFFYSNIMNFFKTEITLANGEIRKRPLIETNGETGEIVWDKGRDFATVRKVLSMPQVNIVKKTEVQTGGFSKESILPKRNSDKLIARKKDWDPKKYGGFDSPTVAYSVLVVAKVEKGKSKKLKSVKELLGITIMERSSFEKNPIDFLEAKGYKEVKKDLIIKLPKYSLFELENGRKRMLASAGELQKGNELALPSKYVNFLYLASHYEKLKGSPEDNEQKQLFVEQHKHYLDEIIEQISEFSKRVILADANLDKVLSAYNKHRDKPIREQAENIIHLFTLTNLGAPAAFKYFDTTIDRKRYTSTKEVLDATLIHQSITGLYETRIDLSQLGGDGGPAPGGGEAAAKGGTLGIEDEYRLHETSTEPDVSLGSTWLSDFPQAWAETGGMGLAVRQAPLIIPLKATSTPVSIQQYPMSHEARLGIKPHIQRLLDQGILVPCQSPWNTPLLPVKKPGTNDYRPVQDLREVNKRVEDIHPTVPNPYNLLSGLPPSHQWYTVLDLKDAFFCLRLHPTSQPLFAFEWRDPGMGISGQLTWTRLPQGFKNSPTLFNEALHRDLADFRIQHPDLILLQYVDDILLAATSELDCQQGTRALLQTLGDLGYRASAKKAQICQKQVKYLGYLLREGQRWLTEARKETVMGQPVPKTPRQLREFLGTAGFCRLWIPGFAEMAAPLYPLTKPGTLFSWGPDQQKAYQEIKQALLTAPALGLPDLTKPFELFVDEKQGYAKGVLTQKLGPWRRPVAYLSKKLDPVAAGWPPCLRMVAAIAVLTKDAGKLTMGQPLVILAPHAVEALVKQPPDRWLSNARMTHYQAMLLDTDRVQFGPVVALNPATLLPLPEEGAPHDCLEILAETHGTRPDLTDQPIPDADHTWYTDGSSFLQEGQRKAGAAVTTETEVIWAGALPAGTSAQRAELIALTQALKMAEGKRLNVYTDSRYAFATAHIHGEIYRRRGWLTSEGREIKNKSEILALLKALFLPKRLSIIHCLGHQKGDSAEARGNRLADQAAREAAIKTPPDTSTLLAGKRTADGSEFEKRTADGSEFESPKKKAKVE

SEQ ID NO: 7536 - protein, 2096 aa, synthetic construct
MPAAKRVKLDGGDKKYSIGLDIGTNSVGWAVITDEYKVPSKKFKVLGNTDRHSIKKNLIGALLFDSGETAEATRLKRTARRRYTRRKNRICYLQEIFSNEMAKVDDSFFHRLEESFLVEEDKKHERHPIFGNIVDEVAYHEKYPTIYHLRKKLVDSTDKADLRLIYLALAHMIKFRGHFLIEGDLNPDNSDVDKLFIQLVQTYNQLFEENPINASGVDAKAILSARLSKSRRLENLIAQLPGEKKNGLFGNLIALSLGLTPNFKSNFDLAEDAKLQLSKDTYDDDLDNLLAQIGDQYADLFLAAKNLSDAILLSDILRVNTEITKAPLSASMIKRYDEHHQDLTLLKALVRQQLPEKYKEIFFDQSKNGYAGYIDGGASQEEFYKFIKPILEKMDGTEELLVKLNREDLLRKQRTFDNGSIPHQIHLGELHAILRRQEDFYPFLKDNREKIEKILTFRIPYYVGPLARGNSRFAWMTRKSEETITPWNFEEVVDKGASAQSFIERMTNFDKNLPNEKVLPKHSLLYEYFTVYNELTKVKYVTEGMRKPAFLSGEQKKAIVDLLFKTNRKVTVKQLKEDYFKKIECFDSVEISGVEDRFNASLGTYHDLLKIIKDKDFLDNEENEDILEDIVLTLTLFEDREMIEERLKTYAHLFDDKVMKQLKRRRYTGWGRLSRKLINGIRDKQSGKTILDFLKSDGFANRNFMQLIHDDSLTFKEDIQKAQVSGQGDSLHEHIANLAGSPAIKKGILQTVKVVDELVKVMGRHKPENIVIEMARENQTTQKGQKNSRERMKRIEEGIKELGSQILKEHPVENTQLQNEKLYLYYLQNGRDMYVDQELDINRLSDYDVDHIVPQSFLKDDSIDNKVLTRSDKARGKSDNVPSEEVVKKMKNYWRQLLNAKLITQRKFDNLTKAERGGLSELDKAGFIKRQLVETRQITKHVAQILDSRMNTKYDENDKLIREVKVITLKSKLVSDFRKDFQFYKVREINNYHHAHDAYLNAVVGTALIKKYPKLESEFVYGDYKVYDVRKMIAKSEQEIGKATAKYFFYSNIMNFFKTEITLANGEIRKRPLIETNGETGEIVWDKGRDFATVRKVLSMPQVNIVKKTEVQTGGFSKESILPKRNSDKLIARKKDWDPKKYGGFDSPTVAYSVLVVAKVEKGKSKKLKSVKELLGITIMERSSFEKNPIDFLEAKGYKEVKKDLIIKLPKYSLFELENGRKRMLASAGELQKGNELALPSKYVNFLYLASHYEKLKGSPEDNEQKQLFVEQHKHYLDEIIEQISEFSKRVILADANLDKVLSAYNKHRDKPIREQAENIIHLFTLTNLGAPAAFKYFDTTIDRKRYTSTKEVLDATLIHQSITGLYETRIDLSQLGGDGGPAPGGGEAAAKGGTLNIEDEYRLHETSKEPDVSLGSTWLSDFPQAWAETGGMGLAVRQAPLIIPLKATSTPVSIKQYPMSQEARLGIKPHIQRLLDQGILVPCQSPWNTPLLPVKKPGTNDYRPVQDLREVNKRVEDIHPTVPNPYNLLSGLPPSHQWYTVLDLKDAFFCLRLHPTSQPLFAFEWRDPEMGISGQLTWTRLPQGFKNSPTLFNEALHRDLAGFRIQHPDLILLQYVDDLLLAATSELDCQQGTRALLQTLGDLGYRASAKKAQICQKQVKYLGYLLKEGQRWLTEARKETVMGQPIPKTPRQLREFLGTAGFCRLWIPGFAEMAAPLYPLTKPGTLFNWGPDQQKAFQEIKQALLTAPALGLPDLTKPFELFVDEKQGYAKGVLTQKLGPWRRPVAYLSKKLDPVAAGWPPCLRMVAAIAVLTKDAGKLTMGQPLVILAPHAVEALVKQPPDRWLSNARMTHYQALLLDTDRVQFGPVVALNPATLLPLPEEGLQHDCLDILAEAHGTRSDLMDQPLPDADHTWYTDGSSFLQEGQRKAGAAVTTETEVIWARALPAGTSAQRAELIALTQALKMAEGKKLNVYTDSRYAFATAHIHGEIYRRRGWLTSEGKEIKNKDEILALLKALFLPKRLSIIHCPGHQKGNSAEARGNRMADQAAREVATRETPETSTLLAGKRTADGSEFEKRTADGSEFESPKKKAKVE

SEQ ID NO: 7537 - protein, 2096 aa, synthetic construct
MPAAKRVKLDGGDKKYSIGLDIGTNSVGWAVITDEYKVPSKKFKVLGNTDRHSIKKNLIGALLFDSGETAEATRLKRTARRRYTRRKNRICYLQEIFSNEMAKVDDSFFHRLEESFLVEEDKKHERHPIFGNIVDEVAYHEKYPTIYHLRKKLVDSTDKADLRLIYLALAHMIKFRGHFLIEGDLNPDNSDVDKLFIQLVQTYNQLFEENPINASGVDAKAILSARLSKSRRLENLIAQLPGEKKNGLFGNLIALSLGLTPNFKSNFDLAEDAKLQLSKDTYDDDLDNLLAQIGDQYADLFLAAKNLSDAILLSDILRVNTEITKAPLSASMIKRYDEHHQDLTLLKALVRQQLPEKYKEIFFDQSKNGYAGYIDGGASQEEFYKFIKPILEKMDGTEELLVKLNREDLLRKQRTFDNGSIPHQIHLGELHAILRRQEDFYPFLKDNREKIEKILTFRIPYYVGPLARGNSRFAWMTRKSEETITPWNFEEVVDKGASAQSFIERMTNFDKNLPNEKVLPKHSLLYEYFTVYNELTKVKYVTEGMRKPAFLSGEQKKAIVDLLFKTNRKVTVKQLKEDYFKKIECFDSVEISGVEDRFNASLGTYHDLLKIIKDKDFLDNEENEDILEDIVLTLTLFEDREMIEERLKTYAHLFDDKVMKQLKRRRYTGWGRLSRKLINGIRDKQSGKTILDFLKSDGFANRNFMQLIHDDSLTFKEDIQKAQVSGQGDSLHEHIANLAGSPAIKKGILQTVKVVDELVKVMGRHKPENIVIEMARENQTTQKGQKNSRERMKRIEEGIKELGSQILKEHPVENTQLQNEKLYLYYLQNGRDMYVDQELDINRLSDYDVDHIVPQSFLKDDSIDNKVLTRSDKARGKSDNVPSEEVVKKMKNYWRQLLNAKLITQRKFDNLTKAERGGLSELDKAGFIKRQLVETRQITKHVAQILDSRMNTKYDENDKLIREVKVITLKSKLVSDFRKDFQFYKVREINNYHHAHDAYLNAVVGTALIKKYPKLESEFVYGDYKVYDVRKMIAKSEQEIGKATAKYFFYSNIMNFFKTEITLANGEIRKRPLIETNGETGEIVWDKGRDFATVRKVLSMPQVNIVKKTEVQTGGFSKESILPKRNSDKLIARKKDWDPKKYGGFDSPTVAYSVLVVAKVEKGKSKKLKSVKELLGITIMERSSFEKNPIDFLEAKGYKEVKKDLIIKLPKYSLFELENGRKRMLASAGELQKGNELALPSKYVNFLYLASHYEKLKGSPEDNEQKQLFVEQHKHYLDEIIEQISEFSKRVILADANLDKVLSAYNKHRDKPIREQAENIIHLFTLTNLGAPAAFKYFDTTIDRKRYTSTKEVLDATLIHQSITGLYETRIDLSQLGGDGGPAPGGGEAAAKGGTLNIEDEHRLHETSKEPDVSLGSTWLSDFPQAWAETGGMGLAVRQAPLIIPLKATSTPVSIKQYPMSQEARLGIKPHIQRLLDQGILVPCQSPWNTPLLPVKKPGTNDYRPVQDLREVNKRVEDIHPTVPNPYNLLSGLPPSHQWYTVLDLKDAFFCLRLHPTSQPLFAFEWRDPEMGISGQLTWTRLPQGFKNSPTLFNEALHRDLADFRIQHPDLILLQYVDDLLLAATSELDCQQGTRALLQTLGNLGYRASAKKAQICQKQVKYLGYLLKEGQRWLTEARKETVMGQPTPKTPRQLREFLGTAGFCRLWIPGFAEMAAPLYPLTKPGTLFNWGPDQQKAYQEIKQALLTAPALGLPDLTKPFELFVDEKQGYAKGVLTQKLGPWRRPVAYLSKKLDPVAAGWPPCLRMVAAIAVLTKDAGKLTMGQPLVILAPHAVEALVKQPPDRWLSNARMTHYQALLLDTDRVQFGPVVALNPATLLPLPEEGLQHNCLDILAEAHGTRPDLTDQPLPDADHTWYTDGSSLLQEGQRKAGAAVTTETEVIWAKALPAGTSAQRAELIALTQALKMAEGKKLNVYTDSRYAFATAHIHGEIYRRRGWLTSEGKEIKNKDEILALLKALFLPKRLSIIHCPGHQKGHSAEARGNRMADQAARKAAITETPDTSTLLAGKRTADGSEFEKRTADGSEFESPKKKAKVE

SEQ ID NO: 7538 - protein, 2096 aa, synthetic construct
MPAAKRVKLDGGDKKYSIGLDIGTNSVGWAVITDEYKVPSKKFKVLGNTDRHSIKKNLIGALLFDSGETAEATRLKRTARRRYTRRKNRICYLQEIFSNEMAKVDDSFFHRLEESFLVEEDKKHERHPIFGNIVDEVAYHEKYPTIYHLRKKLVDSTDKADLRLIYLALAHMIKFRGHFLIEGDLNPDNSDVDKLFIQLVQTYNQLFEENPINASGVDAKAILSARLSKSRRLENLIAQLPGEKKNGLFGNLIALSLGLTPNFKSNFDLAEDAKLQLSKDTYDDDLDNLLAQIGDQYADLFLAAKNLSDAILLSDILRVNTEITKAPLSASMIKRYDEHHQDLTLLKALVRQQLPEKYKEIFFDQSKNGYAGYIDGGASQEEFYKFIKPILEKMDGTEELLVKLNREDLLRKQRTFDNGSIPHQIHLGELHAILRRQEDFYPFLKDNREKIEKILTFRIPYYVGPLARGNSRFAWMTRKSEETITPWNFEEVVDKGASAQSFIERMTNFDKNLPNEKVLPKHSLLYEYFTVYNELTKVKYVTEGMRKPAFLSGEQKKAIVDLLFKTNRKVTVKQLKEDYFKKIECFDSVEISGVEDRFNASLGTYHDLLKIIKDKDFLDNEENEDILEDIVLTLTLFEDREMIEERLKTYAHLFDDKVMKQLKRRRYTGWGRLSRKLINGIRDKQSGKTILDFLKSDGFANRNFMQLIHDDSLTFKEDIQKAQVSGQGDSLHEHIANLAGSPAIKKGILQTVKVVDELVKVMGRHKPENIVIEMARENQTTQKGQKNSRERMKRIEEGIKELGSQILKEHPVENTQLQNEKLYLYYLQNGRDMYVDQELDINRLSDYDVDHIVPQSFLKDDSIDNKVLTRSDKARGKSDNVPSEEVVKKMKNYWRQLLNAKLITQRKFDNLTKAERGGLSELDKAGFIKRQLVETRQITKHVAQILDSRMNTKYDENDKLIREVKVITLKSKLVSDFRKDFQFYKVREINNYHHAHDAYLNAVVGTALIKKYPKLESEFVYGDYKVYDVRKMIAKSEQEIGKATAKYFFYSNIMNFFKTEITLANGEIRKRPLIETNGETGEIVWDKGRDFATVRKVLSMPQVNIVKKTEVQTGGFSKESILPKRNSDKLIARKKDWDPKKYGGFDSPTVAYSVLVVAKVEKGKSKKLKSVKELLGITIMERSSFEKNPIDFLEAKGYKEVKKDLIIKLPKYSLFELENGRKRMLASAGELQKGNELALPSKYVNFLYLASHYEKLKGSPEDNEQKQLFVEQHKHYLDEIIEQISEFSKRVILADANLDKVLSAYNKHRDKPIREQAENIIHLFTLTNLGAPAAFKYFDTTIDRKRYTSTKEVLDATLIHQSITGLYETRIDLSQLGGDGGPAPGGGEAAAKGGTLNIEDEHRLHETSKEPDVSLGSTWLSDFPQAWAETGGMGLAVRQAPLIIPLKATSTPVSIKQYPMSQEARLGIKPHIQRLLDQGILVPCQSPWNTPLLPVKKPGTNDYRPVQDLREVNKRVEDIHPTVPNPYNLLSGLPPSHQWYTVLDLKDAFFCLRLHPTSQPLFAFEWRDPEMGISGQLTWTRLPQGFKNSPTLFDEALHRDLADFRIQHPDLILLQYVDDLLLAATSELDCQQGTRALLQTLGNLGYRASAKKAQICQKQVKYLGYLLKEGQRWLTEARKETVMGQPTPKTPRQLREFLGTAGFCRLWIPGFAEMAAPLYPLTKTGTLFNWGPDQQKAYQEIKQALLTAPALGLPDLTKPFELFVDEKQGYAKGVLTQKLGPWRRPVAYLSKKLDPVAAGWPPCLRMVAAIAVLTKDAGKLTMGQPLVILAPHAVEALVKQPPDRWLSNARMTHYQALLLDTDRVQFGPVVALNPATLLPLPEEGLQHNCLDILAEAHGTRPDLTDQPLPDADHTWYTDGSSLLQEGQRKAGAAVTTETEVIWAKALPAGTSAQRAELIALTQALKMAEGKKLNVYTDSRYAFATAHIHGEIYRRRGLLTSEGKEIKNKDEILALLKALFLPKRLSIIHCPGHQKGHSAEARGNRMADQAARKAAITETPDTSTLLAGKRTADGSEFEKRTADGSEFESPKKKAKVE

SEQ ID NO: 7539 - protein, 2096 aa, synthetic construct; identical to SEQ ID NO: 7537

SEQ ID NO: 7540 - protein, 2090 aa, synthetic construct
MPAAKRVKLDGGDKKYSIGLDIGTNSVGWAVITDEYKVPSKKFKVLGNTDRHSIKKNLIGALLFDSGETAEATRLKRTARRRYTRRKNRICYLQEIFSNEMAKVDDSFFHRLEESFLVEEDKKHERHPIFGNIVDEVAYHEKYPTIYHLRKKLVDSTDKADLRLIYLALAHMIKFRGHFLIEGDLNPDNSDVDKLFIQLVQTYNQLFEENPINASGVDAKAILSARLSKSRRLENLIAQLPGEKKNGLFGNLIALSLGLTPNFKSNFDLAEDAKLQLSKDTYDDDLDNLLAQIGDQYADLFLAAKNLSDAILLSDILRVNTEITKAPLSASMIKRYDEHHQDLTLLKALVRQQLPEKYKEIFFDQSKNGYAGYIDGGASQEEFYKFIKPILEKMDGTEELLVKLNREDLLRKQRTFDNGSIPHQIHLGELHAILRRQEDFYPFLKDNREKIEKILTFRIPYYVGPLARGNSRFAWMTRKSEETITPWNFEEVVDKGASAQSFIERMTNFDKNLPNEKVLPKHSLLYEYFTVYNELTKVKYVTEGMRKPAFLSGEQKKAIVDLLFKTNRKVTVKQLKEDYFKKIECFDSVEISGVEDRFNASLGTYHDLLKIIKDKDFLDNEENEDILEDIVLTLTLFEDREMIEERLKTYAHLFDDKVMKQLKRRRYTGWGRLSRKLINGIRDKQSGKTILDFLKSDGFANRNFMQLIHDDSLTFKEDIQKAQVSGQGDSLHEHIANLAGSPAIKKGILQTVKVVDELVKVMGRHKPENIVIEMARENQTTQKGQKNSRERMKRIEEGIKELGSQILKEHPVENTQLQNEKLYLYYLQNGRDMYVDQELDINRLSDYDVDHIVPQSFLKDDSIDNKVLTRSDKARGKSDNVPSEEVVKKMKNYWRQLLNAKLITQRKFDNLTKAERGGLSELDKAGFIKRQLVETRQITKHVAQILDSRMNTKYDENDKLIREVKVITLKSKLVSDFRKDFQFYKVREINNYHHAHDAYLNAVVGTALIKKYPKLESEFVYGDYKVYDVRKMIAKSEQEIGKATAKYFFYSNIMNFFKTEITLANGEIRKRPLIETNGETGEIVWDKGRDFATVRKVLSMPQVNIVKKTEVQTGGFSKESILPKRNSDKLIARKKDWDPKKYGGFDSPTVAYSVLVVAKVEKGKSKKLKSVKELLGITIMERSSFEKNPIDFLEAKGYKEVKKDLIIKLPKYSLFELENGRKRMLASAGELQKGNELALPSKYVNFLYLASHYEKLKGSPEDNEQKQLFVEQHKHYLDEIIEQISEFSKRVILADANLDKVLSAYNKHRDKPIREQAENIIHLFTLTNLGAPAAFKYFDTTIDRKRYTSTKEVLDATLIHQSITGLYETRIDLSQLGGDGGPAPGGGEAAAKGGTLQLDDEYRLYSPLVKPDQNIQFWLEQFPQAWAETAGMGLAKQVPPQVIQLKASATPVSVRQYPLSKEAQEGIRPHVQRLIQQGILVPVQSPWNTPLLPVRKPGTNDYRPVQDLREVNKRVQDIHPTVPNPYNLLCALPPQRSWYTVLDLKDAFFCLRLHPTSQPLFAFEWRDPGTGRTGQLTWTRLPQGFKNSPTIFDEALHRDLANFRIQHPQVTLLQYVDDLLLAGATKQDCLEGTKALLLELSDLGYRASAKKAQICRREVTYLGYSLRDGQRWLTEARKKTVVQIPAPTTAKQVREFLGTAGFCRLWIPGFATLAAPLYPLTKEKGEFSWAPEHQKAFDAIKKALLSAPALALPDVTKPFTLYVDERKGVARGVLTQTLGPWRRPVAYLSKKLDPVASGWPVCLKAIAAVAILVKDADKLTLGQNITVIAPHALENIVRQPPDRWMTNARMTHYQSLLLTERVTFAPPAALNPATLLPEETDEPVTHDCHQLLIEETGVRKDLTDIPLTGEVLTWFTDGSSYVVEGKRMAGAAVVDGTRTIWASSLPEGTSAQKAELMALTQALRLAEGKSINIYTDSRYAFATAHVHGAIYKQRGLLTSAGREIKNKEEILSLLEALHLPKRLAIIHCPGHQKAKDPISRGNQMADRVAKQAAQGVNLLAGKRTADGSEFEKRTADGSEFESPKKKAKVE

SEQ ID NO: 7541 - protein, 2090 aa, synthetic construct; identical to SEQ ID NO: 7540

SEQ ID NO: 7542 - protein, 2176 aa, synthetic construct
MPAAKRVKLDGGDKKYSIGLDIGTNSVGWAVITDEYKVPSKKFKVLGNTDRHSIKKNLIGALLFDSGETAEATRLKRTARRRYTRRKNRICYLQEIFSNEMAKVDDSFFHRLEESFLVEEDKKHERHPIFGNIVDEVAYHEKYPTIYHLRKKLVDSTDKADLRLIYLALAHMIKFRGHFLIEGDLNPDNSDVDKLFIQLVQTYNQLFEENPINASGVDAKAILSARLSKSRRLENLIAQLPGEKKNGLFGNLIALSLGLTPNFKSNFDLAEDAKLQLSKDTYDDDLDNLLAQIGDQYADLFLAAKNLSDAILLSDILRVNTEITKAPLSASMIKRYDEHHQDLTLLKALVRQQLPEKYKEIFFDQSKNGYAGYIDGGASQEEFYKFIKPILEKMDGTEELLVKLNREDLLRKQRTFDNGSIPHQIHLGELHAILRRQEDFYPFLKDNREKIEKILTFRIPYYVGPLARGNSRFAWMTRKSEETITPWNFEEVVDKGASAQSFIERMTNFDKNLPNEKVLPKHSLLYEYFTVYNELTKVKYVTEGMRKPAFLSGEQKKAIVDLLFKTNRKVTVKQLKEDYFKKIECFDSVEISGVEDRFNASLGTYHDLLKIIKDKDFLDNEENEDILEDIVLTLTLFEDREMIEERLKTYAHLFDDKVMKQLKRRRYTGWGRLSRKLINGIRDKQSGKTILDFLKSDGFANRNFMQLIHDDSLTFKEDIQKAQVSGQGDSLHEHIANLAGSPAIKKGILQTVKVVDELVKVMGRHKPENIVIEMARENQTTQKGQKNSRERMKRIEEGIKELGSQILKEHPVENTQLQNEKLYLYYLQNGRDMYVDQELDINRLSDYDVDHIVPQSFLKDDSIDNKVLTRSDKARGKSDNVPSEEVVKKMKNYWRQLLNAKLITQRKFDNLTKAERGGLSELDKAGFIKRQLVETRQITKHVAQILDSRMNTKYDENDKLIREVKVITLKSKLVSDFRKDFQFYKVREINNYHHAHDAYLNAVVGTALIKKYPKLESEFVYGDYKVYDVRKMIAKSEQEIGKATAKYFFYSNIMNFFKTEITLANGEIRKRPLIETNGETGEIVWDKGRDFATVRKVLSMPQVNIVKKTEVQTGGFSKESILPKRNSDKLIARKKDWDPKKYGGFDSPTVAYSVLVVAKVEKGKSKKLKSVKELLGITIMERSSFEKNPIDFLEAKGYKEVKKDLIIKLPKYSLFELENGRKRMLASAGELQKGNELALPSKYVNFLYLASHYEKLKGSPEDNEQKQLFVEQHKHYLDEIIEQISEFSKRVILADANLDKVLSAYNKHRDKPIREQAENIIHLFTLTNLGAPAAFKYFDTTIDRKRYTSTKEVLDATLIHQSITGLYETRIDLSQLGGDGGPAPGGGEAAAKGGMDPLQLLQPLEAEIKGTKLKAHWNSGATITCVPEAFLEDERPIQTMLIKTIHGEKQQDVYYLTFKVQGRKVEAEVLASPYDYILLNPSDVPWLMKKPLQLTVLVPLHEYQERLLQQTALPKEQKELLQKLFLKYDALWQHWENQVGHRRIKPHNIATGTLAPRPQKQYPINPKAKPSIQIVIDDLLKQGVLIQQNSTMNTPVYPVPKPDGKWRMVLDYREVNKTIPLIAAQNQHSAGILSSIYRGKYKTTLDLTNGFWAHPITPESYWLTAFTWQGKQYCWTRLPQGFLNSPALFNADVVDLLKEIPNVQAYVDDIYISHDDPQEHLEQLEKIFSILLNAGYVVSLKKSEIAQREVEFLGFNITKEGRGLTDTFKQKLLNITPPKDLKQLQSILGLLNFARNFIPNYSELVKPLYTIVAPANGKFISWTEDNSNQLQHIISVLNQADNLEERNPETRLIIKVNSSPSAGYIRYYNEGSKRPIMYVNYIFSKAEAKFTQTEKLLTTMHKGLIKAMDLAMGQEILVYSPIVSMTKIQRTPLPERKALPVRWITWMTYLEDPRIQFHYDKSLPELQQIPNVTEDVIAKTKHPSEFAMVFYTDGSAIKHPDVNKSHSAGMGIAQVQFIPEYKIVHQWSIPLGDHTAQLAEIAAVEFACKKALKISGPVLIVTDSFYVAESANKELPYWKSNGFLNNKKKPLRHVSKWKSIAECLQLKPDIIIMHEKGHQQPMTTLHTEGNNLADKLATQGSYVVHAGKRTADGSEFEKRTADGSEFESPKKKAKVE

SEQ ID NO: 7543 - protein, 2087 aa, synthetic construct
MPAAKRVKLDGGDKKYSIGLDIGTNSVGWAVITDEYKVPSKKFKVLGNTDRHSIKKNLIGALLFDSGETAEATRLKRTARRRYTRRKNRICYLQEIFSNEMAKVDDSFFHRLEESFLVEEDKKHERHPIFGNIVDEVAYHEKYPTIYHLRKKLVDSTDKADLRLIYLALAHMIKFRGHFLIEGDLNPDNSDVDKLFIQLVQTYNQLFEENPINASGVDAKAILSARLSKSRRLENLIAQLPGEKKNGLFGNLIALSLGLTPNFKSNFDLAEDAKLQLSKDTYDDDLDNLLAQIGDQYADLFLAAKNLSDAILLSDILRVNTEITKAPLSASMIKRYDEHHQDLTLLKALVRQQLPEKYKEIFFDQSKNGYAGYIDGGASQEEFYKFIKPILEKMDGTEELLVKLNREDLLRKQRTFDNGSIPHQIHLGELHAILRRQEDFYPFLKDNREKIEKILTFRIPYYVGPLARGNSRFAWMTRKSEETITPWNFEEVVDKGASAQSFIERMTNFDKNLPNEKVLPKHSLLYEYFTVYNELTKVKYVTEGMRKPAFLSGEQKKAIVDLLFKTNRKVTVKQLKEDYFKKIECFDSVEISGVEDRFNASLGTYHDLLKIIKDKDFLDNEENEDILEDIVLTLTLFEDREMIEERLKTYAHLFDDKVMKQLKRRRYTGWGRLSRKLINGIRDKQSGKTILDFLKSDGFANRNFMQLIHDDSLTFKEDIQKAQVSGQGDSLHEHIANLAGSPAIKKGILQTVKVVDELVKVMGRHKPENIVIEMARENQTTQKGQKNSRERMKRIEEGIKELGSQILKEHPVENTQLQNEKLYLYYLQNGRDMYVDQELDINRLSDYDVDHIVPQSFLKDDSIDNKVLTRSDKARGKSDNVPSEEVVKKMKNYWRQLLNAKLITQRKFDNLTKAERGGLSELDKAGFIKRQLVETRQITKHVAQILDSRMNTKYDENDKLIREVKVITLKSKLVSDFRKDFQFYKVREINNYHHAHDAYLNAVVGTALIKKYPKLESEFVYGDYKVYDVRKMIAKSEQEIGKATAKYFFYSNIMNFFKTEITLANGEIRKRPLIETNGETGEIVWDKGRDFATVRKVLSMPQVNIVKKTEVQTGGFSKESILPKRNSDKLIARKKDWDPKKYGGFDSPTVAYSVLVVAKVEKGKSKKLKSVKELLGITIMERSSFEKNPIDFLEAKGYKEVKKDLIIKLPKYSLFELENGRKRMLASAGELQKGNELALPSKYVNFLYLASHYEKLKGSPEDNEQKQLFVEQHKHYLDEIIEQISEFSKRVILADANLDKVLSAYNKHRDKPIREQAENIIHLFTLTNLGAPAAFKYFDTTIDRKRYTSTKEVLDATLIHQSITGLYETRIDLSQLGGDGGPAPGGGEAAAKGGIPWLMKKPLQLTTLVPLQEYEERLLKQTMLTGSYKEKLQSLFLKYDALWQHWENQVGHRRIKPHHIATGTVNPRPQKQYPINPKAKASIQTVINDLLKQGVLIQQNSIMNTPVYPVPKPDGKWRMVLDYREVNKTIPLIAAQNQHSAGILSSIFRGKYKTTLDLSNGFWAHSITPESYWLTAFTWLGQQYCWTRLPQGFLNSPALFNADVVDLLKEVPNVQVYVDDIYISHDDPREHLEQLEKVFSLLLNAGYVVSLKKSEIAQHEVEFLGFNITKEGRGLTETFKQKLLNITPPRDLKQLQSILGKLNFARNFIPNFSELVKPLYNIIATAPGKYITWTTDNSQQLQNIISMLNSAENLEERNPEVRLIMKVNTSPSAGYIRFYNEFAKRPIMYLNYVYTKAEVKFTNTEKLLTTIHKGLIKALDLGMGQEILVYSPIVSMTKIQKTPLPERKALPIRWITWMSYLEDPRIQFHYDKTLPELQQVPTVTDDIIAKIKHPSEFSMVFYTDGSAIKHPNVNKSHNAGMGIAQVQFKPEFTVINTWSIPLGDHTAQLAEVAAVEFACKKALKIDGPVLIVTDSFYVAESVNKELPYWQSNGFFNNKKKPLKHVSKWKSIADCIQLKPDIIIIHEKGHQPTASTFHTEGNNLADKLATQGSYVVNAGKRTADGSEFEKRTADGSEFESPKKKAKVE

SEQ ID NO: 7544 - protein, 2094 aa, synthetic construct
MPAAKRVKLDGGDKKYSIGLDIGTNSVGWAVITDEYKVPSKKFKVLGNTDRHSIKKNLIGALLFDSGETAEATRLKRTARRRYTRRKNRICYLQEIFSNEMAKVDDSFFHRLEESFLVEEDKKHERHPIFGNIVDEVAYHEKYPTIYHLRKKLVDSTDKADLRLIYLALAHMIKFRGHFLIEGDLNPDNSDVDKLFIQLVQTYNQLFEENPINASGVDAKAILSARLSKSRRLENLIAQLPGEKKNGLFGNLIALSLGLTPNFKSNFDLAEDAKLQLSKDTYDDDLDNLLAQIGDQYADLFLAAKNLSDAILLSDILRVNTEITKAPLSASMIKRYDEHHQDLTLLKALVRQQLPEKYKEIFFDQSKNGYAGYIDGGASQEEFYKFIKPILEKMDGTEELLVKLNREDLLRKQRTFDNGSIPHQIHLGELHAILRRQEDFYPFLKDNREKIEKILTFRIPYYVGPLARGNSRFAWMTRKSEETITPWNFEEVVDKGASAQSFIERMTNFDKNLPNEKVLPKHSLLYEYFTVYNELTKVKYVTEGMRKPAFLSGEQKKAIVDLLFKTNRKVTVKQLKEDYFKKIECFDSVEISGVEDRFNASLGTYHDLLKIIKDKDFLDNEENEDILEDIVLTLTLFEDREMIEERLKTYAHLFDDKVMKQLKRRRYTGWGRLSRKLINGIRDKQSGKTILDFLKSDGFANRNFMQLIHDDSLTFKEDIQKAQVSGQGDSLHEHIANLAGSPAIKKGILQTVKVVDELVKVMGRHKPENIVIEMARENQTTQKGQKNSRERMKRIEEGIKELGSQILKEHPVENTQLQNEKLYLYYLQNGRDMYVDQELDINRLSDYDVDHIVPQSFLKDDSIDNKVLTRSDKARGKSDNVPSEEVVKKMKNYWRQLLNAKLITQRKFDNLTKAERGGLSELDKAGFIKRQLVETRQITKHVAQILDSRMNTKYDENDKLIREVKVITLKSKLVSDFRKDFQFYKVREINNYHHAHDAYLNAVVGTALIKKYPKLESEFVYGDYKVYDVRKMIAKSEQEIGKATAKYFFYSNIMNFFKTEITLANGEIRKRPLIETNGETGEIVWDKGRDFATVRKVLSMPQVNIVKKTEVQTGGFSKESILPKRNSDKLIARKKDWDPKKYGGFDSPTVAYSVLVVAKVEKGKSKKLKSVKELLGITIMERSSFEKNPIDFLEAKGYKEVKKDLIIKLPKYSLFELENGRKRMLASAGELQKGNELALPSKYVNFLYLASHYEKLKGSPEDNEQKQLFVEQHKHYLDEIIEQISEFSKRVILADANLDKVLSAYNKHRDKPIREQAENIIHLFTLTNLGAPAAFKYFDTTIDRKRYTSTKEVLDATLIHQSITGLYETRIDLSQLGGDGGPAPGGGEAAAKGGVLNLEEEYRLHEKPVPSSIDPSWLQLFPTVWAERAGMGLANQVPPVVVELRSGASPVAVRQYPMSKEAREGIRPHIQRFLDLGVLVPCQSPWNTPLLPVKKPGTNDYRPVQDLREINKRVQDIHPTVPNPYNLLSSLPPSHTWYSVLDLKDAFFCLKLHPNSQPLFAFEWRDPEKGNTGQLTWTRLPQGFKNSPTLFNEALHRDLAPFRALNPQVVLLQYVDDLLVAAPTYRDCKEGTQKLLQELSKLGYRVSAKKAQLCQKEVTYLGYLLKEGKRWLTPARKATVMKIPPPTTPRQVREFLGTAGFCRLWIPGFASLAAPLYPLTKPSIPFIWTEEHQKAFDRIKEALLSAPALALPDLTKPFTLYVDERAGVARGVLTQTLGPWRRPVAYLSKKLDPVASGWPTCLKAVAAVALLLKDADKLTLGQNVTVIASHSLESIVRQPPDRWMTNARMTHYQSLLLNERVSFAPPAVLNPATLLPVESEATPVHRCSEILAEETGTRRDLKDQPLPGVPAWYTDGSSFIAEGKRRAGAAIVDGKRTVWASSLPEGTSAQKAELVALTQALRLAEGKDINIYTDSRYAFATAHIHGAIYKQRGWLTSAGKDIKNKEEILALLEAIHLPKRVAIIHCPGHQKGNDPVATGNRRADEAAKQAALSTRVLAETTKPAGKRTADGSEFEKRTADGSEFESPKKKAKVE

SEQ ID NO: 7545 - protein, 2094 aa, synthetic construct
MPAAKRVKLDGGDKKYSIGLDIGTNSVGWAVITDEYKVPSKKFKVLGNTDRHSIKKNLIGALLFDSGETAEATRLKRTARRRYTRRKNRICYLQEIFSNEMAKVDDSFFHRLEESFLVEEDKKHERHPIFGNIVDEVAYHEKYPTIYHLRKKLVDSTDKADLRLIYLALAHMIKFRGHFLIEGDLNPDNSDVDKLFIQLVQTYNQLFEENPINASGVDAKAILSARLSKSRRLENLIAQLPGEKKNGLFGNLIALSLGLTPNFKSNFDLAEDAKLQLSKDTYDDDLDNLLAQIGDQYADLFLAAKNLSDAILLSDILRVNTEITKAPLSASMIKRYDEHHQDLTLLKALVRQQLPEKYKEIFFDQSKNGYAGYIDGGASQEEFYKFIKPILEKMDGTEELLVKLNREDLLRKQRTFDNGSIPHQIHLGELHAILRRQEDFYPFLKDNREKIEKILTFRIPYYVGPLARGNSRFAWMTRKSEETITPWNFEEVVDKGASAQSFIERMTNFDKNLPNEKVLPKHSLLYEYFTVYNELTKVKYVTEGMRKPAFLSGEQKKAIVDLLFKTNRKVTVKQLKEDYFKKIECFDSVEISGVEDRFNASLGTYHDLLKIIKDKDFLDNEENEDILEDIVLTLTLFEDREMIEERLKTYAHLFDDKVMKQLKRRRYTGWGRLSRKLINGIRDKQSGKTILDFLKSDGFANRNFMQLIHDDSLTFKEDIQKAQVSGQGDSLHEHIANLAGSPAIKKGILQTVKVVDELVKVMGRHKPENIVIEMARENQTTQKGQKNSRERMKRIEEGIKELGSQILKEHPVENTQLQNEKLYLYYLQNGRDMYVDQELDINRLSDYDVDHIVPQSFLKDDSIDNKVLTRSDKARGKSDNVPSEEVVKKMKNYWRQLLNAKLITQRKFDNLTKAERGGLSELDKAGFIKRQLVETRQITKHVAQILDSRMNTKYDENDKLIREVKVITLKSKLVSDFRKDFQFYKVREINNYHHAHDAYLNAVVGTALIKKYPKLESEFVYGDYKVYDVRKMIAKSEQEIGKATAKYFFYSNIMNFFKTEITLANGEIRKRPLIETNGETGEIVWDKGRDFATVRKVLSMPQVNIVKKTEVQTGGFSKESILPKRNSDKLIARKKDWDPKKYGGFDSPTVAYSVLVVAKVEKGKSKKLKSVKELLGITIMERSSFEKNPIDFLEAKGYKEVKKDLIIKLPKYSLFELENGRKRMLASAGELQKGNELALPSKYVNFLYLASHYEKLKGSPEDNEQKQLFVEQHKHYLDEIIEQISEFSKRVILADANLDKVLSAYNKHRDKPIREQAENIIHLFTLTNLGAPAAFKYFDTTIDRKRYTSTKEVLDATLIHQSITGLYETRIDLSQLGGDGGPAPGGGEAAAKGGVLNLEEEYRLHEKPVPSSIDPSWLQLFPTVWAERAGMGLANQVPPVVVELRSGASPVAVRQYPMSKEAREGIRPHIQRFLDLGVLVPCQSPWNTPLLPVKKPGTNDYRPVQDLREINKRVQDIHPTVPNPYNLLSSLPPSHTWYSVLDLKDAFFCLKLHPNSQPLFAFEWRDPEKGNTGQLTWTRLPQGFKNSPTLFNEALHRDLAPFRALNPQVVLLQYVDDLLVAAPTYRDCKEGTQKLLQELSKLGYRVSAKKAQLCQKEVTYLGYLLKEGKRWLTPARKATVMKIPPPTTPRQVREFLGKAGFCRLFIPGFASLAAPLYPLTKPSIPFIWTEEHQKAFDRIKEALLSAPALALPDLTKPFTLYVDERAGVARGVLTQTLGPWRRPVAYLSKKLDPVASGWPTCLKAVAAVALLLKDADKLTLGQNVTVIASHSLESIVRQPPDRWMTNARMTHYQSLLLNERVSFAPPAVLNPATLLPVESEATPVHRCSEILAEETGTRRDLKDQPLPGVPAWYTDGSSFIAEGKRRAGAAIVDGKRTVWASSLPEGTSAQKAELVALTQALRLAEGKDINIYTDSRYAFATAHIHGAIYKQRGWLTSAGKDIKNKEEILALLEAIHLPKRVAIIHCPGHQKGNDPVATGNRRADEAAKQAALSTRVLAETTKPAGKRTADGSEFEKRTADGSEFESPKKKAKVE

SEQ ID NO: 7546 - protein, 2096 aa, synthetic construct
MPAAKRVKLDGGDKKYSIGLDIGTNSVGWAVITDEYKVPSKKFKVLGNTDRHSIKKNLIGALLFDSGETAEATRLKRTARRRYTRRKNRICYLQEIFSNEMAKVDDSFFHRLEESFLVEEDKKHERHPIFGNIVDEVAYHEKYPTIYHLRKKLVDSTDKADLRLIYLALAHMIKFRGHFLIEGDLNPDNSDVDKLFIQLVQTYNQLFEENPINASGVDAKAILSARLSKSRRLENLIAQLPGEKKNGLFGNLIALSLGLTPNFKSNFDLAEDAKLQLSKDTYDDDLDNLLAQIGDQYADLFLAAKNLSDAILLSDILRVNTEITKAPLSASMIKRYDEHHQDLTLLKALVRQQLPEKYKEIFFDQSKNGYAGYIDGGASQEEFYKFIKPILEKMDGTEELLVKLNREDLLRKQRTFDNGSIPHQIHLGELHAILRRQEDFYPFLKDNREKIEKILTFRIPYYVGPLARGNSRFAWMTRKSEETITPWNFEEVVDKGASAQSFIERMTNFDKNLPNEKVLPKHSLLYEYFTVYNELTKVKYVTEGMRKPAFLSGEQKKAIVDLLFKTNRKVTVKQLKEDYFKKIECFDSVEISGVEDRFNASLGTYHDLLKIIKDKDFLDNEENEDILEDIVLTLTLFEDREMIEERLKTYAHLFDDKVMKQLKRRRYTGWGRLSRKLINGIRDKQSGKTILDFLKSDGFANRNFMQLIHDDSLTFKEDIQKAQVSGQGDSLHEHIANLAGSPAIKKGILQTVKVVDELVKVMGRHKPENIVIEMARENQTTQKGQKNSRERMKRIEEGIKELGSQILKEHPVENTQLQNEKLYLYYLQNGRDMYVDQELDINRLSDYDVDHIVPQSFLKDDSIDNKVLTRSDKARGKSDNVPSEEVVKKMKNYWRQLLNAKLITQRKFDNLTKAERGGLSELDKAGFIKRQLVETRQITKHVAQILDSRMNTKYDENDKLIREVKVITLKSKLVSDFRKDFQFYKVREINNYHHAHDAYLNAVVGTALIKKYPKLESEFVYGDYKVYDVRKMIAKSEQEIGKATAKYFFYSNIMNFFKTEITLANGEIRKRPLIETNGETGEIVWDKGRDFATVRKVLSMPQVNIVKKTEVQTGGFSKESILPKRNSDKLIARKKDWDPKKYGGFDSPTVAYSVLVVAKVEKGKSKKLKSVKELLGITIMERSSFEKNPIDFLEAKGYKEVKKDLIIKLPKYSLFELENGRKRMLASAGELQKGNELALPSKYVNFLYLASHYEKLKGSPEDNEQKQLFVEQHKHYLDEIIEQISEFSKRVILADANLDKVLSAYNKHRDKPIREQAENIIHLFTLTNLGAPAAFKYFDTTIDRKRYTSTKEVLDATLIHQSITGLYETRIDLSQLGGDGGPAPGGGEAAAKGGTLNIEDEYRLHETSKEPDVPLGSTWLSDFPQAWAETGGMGLAVRQAPLIIPLKATSTPVSIKQYPMSQEARLGIKPHIQRLLDQGILVPCQSPWNTPLLPVKKPGTNDYRPVQDLREVNKRVEDIHPTVPNPYNLLSGLPPSHQWYTVLDLKDAFFCLRLHPTSQPLFAFEWRDPEMGISGQLTWTRLPQGFKNSPTLFNEALHRDLADFRIQHPDLILLQYVDDLLLAATSEQDCQRGTRALLQTLGNLGYRASAKKAQICQKQVKYLGYLLKEGQRWLTEARKETVMGQPTPKTPRQLREFLGTAGFCRLWIPGFAEMAAPLYPLTKPGTLFNWGPDQQKAYQEIKQALLTAPALGLPDLTKPFELFVDEKQGYAKGVLTQKLGPWRRPVAYLSKKLDPVAAGWPPCLRMVAAIAVLTKDAGKLTMGQPLVILAPHAVEALVKQPPDRWLSNARMTHYQAMLLDTDRVQFGPVVALNPATLLPLPEKEAPHDCLEILAETHGTRPDLTDQPIPDADYTWYTDGSSFLQEGQRRAGAAVTTETEVIWARALPAGTSAQRAELIALTQALKMAEGKKLNVYTDSRYAFATAHVHGEIYRRRGWLTSEGREIKNKNEILALLKALFLPKRLSIIHCPGHQKGNSAEARGNRMADQAAREAAMKAVLETSTLLAGKRTADGSEFEKRTADGSEFESPKKKAKVE

SEQ ID NO: 7547 - protein, 2096 aa, synthetic construct
MPAAKRVKLDGGDKKYSIGLDIGTNSVGWAVITDEYKVPSKKFKVLGNTDRHSIKKNLIGALLFDSGETAEATRLKRTARRRYTRRKNRICYLQEIFSNEMAKVDDSFFHRLEESFLVEEDKKHERHPIFGNIVDEVAYHEKYPTIYHLRKKLVDSTDKADLRLIYLALAHMIKFRGHFLIEGDLNPDNSDVDKLFIQLVQTYNQLFEENPINASGVDAKAILSARLSKSRRLENLIAQLPGEKKNGLFGNLIALSLGLTPNFKSNFDLAEDAKLQLSKDTYDDDLDNLLAQIGDQYADLFLAAKNLSDAILLSDILRVNTEITKAPLSASMIKRYDEHHQDLTLLKALVRQQLPEKYKEIFFDQSKNGYAGYIDGGASQEEFYKFIKPILEKMDGTEELLVKLNREDLLRKQRTFDNGSIPHQIHLGELHAILRRQEDFYPFLKDNREKIEKILTFRIPYYVGPLARGNSRFAWMTRKSEETITPWNFEEVVDKGASAQSFIERMTNFDKNLPNEKVLPKHSLLYEYFTVYNELTKVKYVTEGMRKPAFLSGEQKKAIVDLLFKTNRKVTVKQLKEDYFKKIECFDSVEISGVEDRFNASLGTYHDLLKIIKDKDFLDNEENEDILEDIVLTLTLFEDREMIEERLKTYAHLFDDKVMKQLKRRRYTGWGRLSRKLINGIRDKQSGKTILDFLKSDGFANRNFMQLIHDDSLTFKEDIQKAQVSGQGDSLHEHIANLAGSPAIKKGILQTVKVVDELVKVMGRHKPENIVIEMARENQTTQKGQKNSRERMKRIEEGIKELGSQILKEHPVENTQLQNEKLYLYYLQNGRDMYVDQELDINRLSDYDVDHIVPQSFLKDDSIDNKVLTRSDKARGKSDNVPSEEVVKKMKNYWRQLLNAKLITQRKFDNLTKAERGGLSELDKAGFIKRQLVETRQITKHVAQILDSRMNTKYDENDKLIREVKVITLKSKLVSDFRKDFQFYKVREINNYHHAHDAYLNAVVGTALIKKYPKLESEFVYGDYKVYDVRKMIAKSEQEIGKATAKYFFYSNIMNFFKTEITLANGEIRKRPLIETNGETGEIVWDKGRDFATVRKVLSMPQVNIVKKTEVQTGGFSKESILPKRNSDKLIARKKDWDPKKYGGFDSPTVAYSVLVVAKVEKGKSKKLKSVKELLGITIMERSSFEKNPIDFLEAKGYKEVKKDLIIKLPKYSLFELENGRKRMLASAGELQKGNELALPSKYVNFLYLASHYEKLKGSPEDNEQKQLFVEQHKHYLDEIIEQISEFSKRVILADANLDKVLSAYNKHRDKPIREQAENIIHLFTLTNLGAPAAFKYFDTTIDRKRYTSTKEVLDATLIHQSITGLYETRIDLSQLGGDGGPAPGGGEAAAKGGTLNIEDEYRLHETSKEPDVPLGSTWLSDFPQAWAETGGMGLAVRQAPLIIPLKATSTPVSIKQYPMSQEARLGIKPHIQRLLDQGILVPCQSPWNTPLLPVKKPGTNDYRPVQDLREVNKRVEDIHPTVPNPYNLLSGLPPSHQWYTVLDLKDAFFCLRLHPTSQPLFAFEWRDPEMGISGQLTWTRLPQGFKNSPTLFNEALHRDLADFRIQHPDLILLQYVDDLLLAATSEQDCQRGTRALLQTLGNLGYRASAKKAQICQKQVKYLGYLLKEGQRWLTEARKETVMGQPTPKTPRQLREFLGKAGFCRLFIPGFAEMAAPLYPLTKPGTLFNWGPDQQKAYQEIKQALLTAPALGLPDLTKPFELFVDEKQGYAKGVLTQKLGPWRRPVAYLSKKLDPVAAGWPPCLRMVAAIAVLTKDAGKLTMGQPLVILAPHAVEALVKQPPDRWLSNARMTHYQAMLLDTDRVQFGPVVALNPATLLPLPEKEAPHDCLEILAETHGTRPDLTDQPIPDADYTWYTDGSSFLQEGQRRAGAAVTTETEVIWARALPAGTSAQRAELIALTQALKMAEGKKLNVYTDSRYAFATAHVHGEIYRRRGWLTSEGREIKNKNEILALLKALFLPKRLSIIHCPGHQKGNSAEARGNRMADQAAREAAMKAVLETSTLLAGKRTADGSEFEKRTADGSEFESPKKKAKVE

SEQ ID NO: 7548 - protein, 2173 aa, synthetic construct
MPAAKRVKLDGGDKKYSIGLDIGTNSVGWAVITDEYKVPSKKFKVLGNTDRHSIKKNLIGALLFDSGETAEATRLKRTARRRYTRRKNRICYLQEIFSNEMAKVDDSFFHRLEESFLVEEDKKHERHPIFGNIVDEVAYHEKYPTIYHLRKKLVDSTDKADLRLIYLALAHMIKFRGHFLIEGDLNPDNSDVDKLFIQLVQTYNQLFEENPINASGVDAKAILSARLSKSRRLENLIAQLPGEKKNGLFGNLIALSLGLTPNFKSNFDLAEDAKLQLSKDTYDDDLDNLLAQIGDQYADLFLAAKNLSDAILLSDILRVNTEITKAPLSASMIKRYDEHHQDLTLLKALVRQQLPEKYKEIFFDQSKNGYAGYIDGGASQEEFYKFIKPILEKMDGTEELLVKLNREDLLRKQRTFDNGSIPHQIHLGELHAILRRQEDFYPFLKDNREKIEKILTFRIPYYVGPLARGNSRFAWMTRKSEETITPWNFEEVVDKGASAQSFIERMTNFDKNLPNEKVLPKHSLLYEYFTVYNELTKVKYVTEGMRKPAFLSGEQKKAIVDLLFKTNRKVTVKQLKEDYFKKIECFDSVEISGVEDRFNASLGTYHDLLKIIKDKDFLDNEENEDILEDIVLTLTLFEDREMIEERLKTYAHLFDDKVMKQLKRRRYTGWGRLSRKLINGIRDKQSGKTILDFLKSDGFANRNFMQLIHDDSLTFKEDIQKAQVSGQGDSLHEHIANLAGSPAIKKGILQTVKVVDELVKVMGRHKPENIVIEMARENQTTQKGQKNSRERMKRIEEGIKELGSQILKEHPVENTQLQNEKLYLYYLQNGRDMYVDQELDINRLSDYDVDHIVPQSFLKDDSIDNKVLTRSDKARGKSDNVPSEEVVKKMKNYWRQLLNAKLITQRKFDNLTKAERGGLSELDKAGFIKRQLVETRQITKHVAQILDSRMNTKYDENDKLIREVKVITLKSKLVSDFRKDFQFYKVREINNYHHAHDAYLNAVVGTALIKKYPKLESEFVYGDYKVYDVRKMIAKSEQEIGKATAKYFFYSNIMNFFKTEITLANGEIRKRPLIETNGETGEIVWDKGRDFATVRKVLSMPQVNIVKKTEVQTGGFSKESILPKRNSDKLIARKKDWDPKKYGGFDSPTVAYSVLVVAKVEKGKSKKLKSVKELLGITIMERSSFEKNPIDFLEAKGYKEVKKDLIIKLPKYSLFELENGRKRMLASAGELQKGNELALPSKYVNFLYLASHYEKLKGSPEDNEQKQLFVEQHKHYLDEIIEQISEFSKRVILADANLDKVLSAYNKHRDKPIREQAENIIHLFTLTNLGAPAAFKYFDTTIDRKRYTSTKEVLDATLIHQSITGLYETRIDLSQLGGDGGPAPEAAAKGGGGGMDLLKPLTVERKGVKIKGYWNSQADITCVPKDLLQGEEPVRQQNVTTIHGTQEGDVYYVNLKIDGRRINTEVIGTTLDYAIITPGDVPWILKKPLELTIKLDLEEQQGTLLNNSILSKKGKEELKQLFEKYSALWQSWENQVGHRRIRPHKIATGTVKPTPQKQYHINPKAKPDIQIVINDLLKQGVLIQKESTMNTPVYPVPKPNGRWRMVLDYRAVNKVTPLIAVQNQHSYGILGSLFKGRYKTTIDLSNGFWAHPIVPEDYWITAFTWQGKQYCWTVLPQGFLNSPGLFTGDVVDLLQGIPNVEVYVDDVYISHDSEKEHLEYLDILFNRLKEAGYIISLKKSNIANSIVDFLGFQITNEGRGLTDTFKEKLENITAPTTLKQLQSILGLLNFARNFIPDFTELIAPLYALIPKSTKNYVPWQIEHSTTLETLITKLNGAEYLQGRKGDKTLIMKVNASYTTGYIRYYNEGEKKPISYVSIVFSKTELKFTELEKLLTTVHKGLLKALDLSMGQNIHVYSPIVSMQNIQKTPQTAKKALASRWLSWLSYLEDPRIRFFYDPQMPALKDLPAVDTGKDNKKHPSNFQHIFYTDGSAITSPTKEGHLNAGMGIVYFINKDGNLQKQQEWSISLGNHTAQFAEIAAFEFALKKCLPLGGNILVVTDSNYVAKAYNEELDVWASNGFVNNRKKPLKHISKWKSVADLKRLRPDVVVTHEPGHQKLDSSPHAYGNNLADQLATQASFKVHAGKRTADGSEFEKRTADGSEFESPKKKAKVE

SEQ ID NO: 7549 - protein, 2087 aa, synthetic construct
MPAAKRVKLDGGDKKYSIGLDIGTNSVGWAVITDEYKVPSKKFKVLGNTDRHSIKKNLIGALLFDSGETAEATRLKRTARRRYTRRKNRICYLQEIFSNEMAKVDDSFFHRLEESFLVEEDKKHERHPIFGNIVDEVAYHEKYPTIYHLRKKLVDSTDKADLRLIYLALAHMIKFRGHFLIEGDLNPDNSDVDKLFIQLVQTYNQLFEENPINASGVDAKAILSARLSKSRRLENLIAQLPGEKKNGLFGNLIALSLGLTPNFKSNFDLAEDAKLQLSKDTYDDDLDNLLAQIGDQYADLFLAAKNLSDAILLSDILRVNTEITKAPLSASMIKRYDEHHQDLTLLKALVRQQLPEKYKEIFFDQSKNGYAGYIDGGASQEEFYKFIKPILEKMDGTEELLVKLNREDLLRKQRTFDNGSIPHQIHLGELHAILRRQEDFYPFLKDNREKIEKILTFRIPYYVGPLARGNSRFAWMTRKSEETITPWNFEEVVDKGASAQSFIERMTNFDKNLPNEKVLPKHSLLYEYFTVYNELTKVKYVTEGMRKPAFLSGEQKKAIVDLLFKTNRKVTVKQLKEDYFKKIECFDSVEISGVEDRFNASLGTYHDLLKIIKDKDFLDNEENEDILEDIVLTLTLFEDREMIEERLKTYAHLFDDKVMKQLKRRRYTGWGRLSRKLINGIRDKQSGKTILDFLKSDGFANRNFMQLIHDDSLTFKEDIQKAQVSGQGDSLHEHIANLAGSPAIKKGILQTVKVVDELVKVMGRHKPENIVIEMARENQTTQKGQKNSRERMKRIEEGIKELGSQILKEHPVENTQLQNEKLYLYYLQNGRDMYVDQELDINRLSDYDVDHIVPQSFLKDDSIDNKVLTRSDKARGKSDNVPSEEVVKKMKNYWRQLLNAKLITQRKFDNLTKAERGGLSELDKAGFIKRQLVETRQITKHVAQILDSRMNTKYDENDKLIREVKVITLKSKLVSDFRKDFQFYKVREINNYHHAHDAYLNAVVGTALIKKYPKLESEFVYGDYKVYDVRKMIAKSEQEIGKATAKYFFYSNIMNFFKTEITLANGEIRKRPLIETNGETGEIVWDKGRDFATVRKVLSMPQVNIVKKTEVQTGGFSKESILPKRNSDKLIARKKDWDPKKYGGFDSPTVAYSVLVVAKVEKGKSKKLKSVKELLGITIMERSSFEKNPIDFLEAKGYKEVKKDLIIKLPKYSLFELENGRKRMLASAGELQKGNELALPSKYVNFLYLASHYEKLKGSPEDNEQKQLFVEQHKHYLDEIIEQISEFSKRVILADANLDKVLSAYNKHRDKPIREQAENIIHLFTLTNLGAPAAFKYFDTTIDRKRYTSTKEVLDATLIHQSITGLYETRIDLSQLGGDGGPAPEAAAKGGGGGVPWILKKPLELTIKLDLEEQQGTLLNNSILSKKGKEELKQLFEKYSALWQSWENQVGHRRIRPHKIATGTVKPTPQKQYHINPKAKPDIQIVINDLLKQGVLIQKESTMNTPVYPVPKPNGRWRMVLDYRAVNKVTPLIAVQNQHSYGILGSLFKGRYKTTIDLSNGFWAHPIVPEDYWITAFTWQGKQYCWTVLPQGFLNSPGLFTGDVVDLLQGIPNVEVYVDDVYISHDSEKEHLEYLDILFNRLKEAGYIISLKKSNIANSIVDFLGFQITNEGRGLTDTFKEKLENITAPTTLKQLQSILGLLNFARNFIPDFTELIAPLYALIPKSTKNYVPWQIEHSTTLETLITKLNGAEYLQGRKGDKTLIMKVNASYTTGYIRYYNEGEKKPISYVSIVFSKTELKFTELEKLLTTVHKGLLKALDLSMGQNIHVYSPIVSMQNIQKTPQTAKKALASRWLSWLSYLEDPRIRFFYDPQMPALKDLPAVDTGKDNKKHPSNFQHIFYTDGSAITSPTKEGHLNAGMGIVYFINKDGNLQKQQEWSISLGNHTAQFAEIAAFEFALKKCLPLGGNILVVTDSNYVAKAYNEELDVWASNGFVNNRKKPLKHISKWKSVADLKRLRPDVVVTHEPGHQKLDSSPHAYGNNLADQLATQASFKVHAGKRTADGSEFEKRTADGSEFESPKKKAKVE

SEQ ID NO: 7550 - protein, 2095 aa, synthetic construct
MPAAKRVKLDGGDKKYSIGLDIGTNSVGWAVITDEYKVPSKKFKVLGNTDRHSIKKNLIGALLFDSGETAEATRLKRTARRRYTRRKNRICYLQEIFSNEMAKVDDSFFHRLEESFLVEEDKKHERHPIFGNIVDEVAYHEKYPTIYHLRKKLVDSTDKADLRLIYLALAHMIKFRGHFLIEGDLNPDNSDVDKLFIQLVQTYNQLFEENPINASGVDAKAILSARLSKSRRLENLIAQLPGEKKNGLFGNLIALSLGLTPNFKSNFDLAEDAKLQLSKDTYDDDLDNLLAQIGDQYADLFLAAKNLSDAILLSDILRVNTEITKAPLSASMIKRYDEHHQDLTLLKALVRQQLPEKYKEIFFDQSKNGYAGYIDGGASQEEFYKFIKPILEKMDGTEELLVKLNREDLLRKQRTFDNGSIPHQIHLGELHAILRRQEDFYPFLKDNREKIEKILTFRIPYYVGPLARGNSRFAWMTRKSEETITPWNFEEVVDKGASAQSFIERMTNFDKNLPNEKVLPKHSLLYEYFTVYNELTKVKYVTEGMRKPAFLSGEQKKAIVDLLFKTNRKVTVKQLKEDYFKKIECFDSVEISGVEDRFNASLGTYHDLLKIIKDKDFLDNEENEDILEDIVLTLTLFEDREMIEERLKTYAHLFDDKVMKQLKRRRYTGWGRLSRKLINGIRDKQSGKTILDFLKSDGFANRNFMQLIHDDSLTFKEDIQKAQVSGQGDSLHEHIANLAGSPAIKKGILQTVKVVDELVKVMGRHKPENIVIEMARENQTTQKGQKNSRERMKRIEEGIKELGSQILKEHPVENTQLQNEKLYLYYLQNGRDMYVDQELDINRLSDYDVDHIVPQSFLKDDSIDNKVLTRSDKARGKSDNVPSEEVVKKMKNYWRQLLNAKLITQRKFDNLTKAERGGLSELDKAGFIKRQLVETRQITKHVAQILDSRMNTKYDENDKLIREVKVITLKSKLVSDFRKDFQFYKVREINNYHHAHDAYLNAVVGTALIKKYPKLESEFVYGDYKVYDVRKMIAKSEQEIGKATAKYFFYSNIMNFFKTEITLANGEIRKRPLIETNGETGEIVWDKGRDFATVRKVLSMPQVNIVKKTEVQTGGFSKESILPKRNSDKLIARKKDWDPKKYGGFDSPTVAYSVLVVAKVEKGKSKKLKSVKELLGITIMERSSFEKNPIDFLEAKGYKEVKKDLIIKLPKYSLFELENGRKRMLASAGELQKGNELALPSKYVNFLYLASHYEKLKGSPEDNEQKQLFVEQHKHYLDEIIEQISEFSKRVILADANLDKVLSAYNKHRDKPIREQAENIIHLFTLTNLGAPAAFKYFDTTIDRKRYTSTKEVLDATLIHQSITGLYETRIDLSQLGGDGGPAPEAAAKGGGGGTLQLEEEYRLFEPESTQKQEMDIWLKNFPQAWAETGGMGTAHCQAPVLIQLKATATPISIRQYPMPHEAYQGIKPHIRRMLDQGILKPCQSPWNTPLLPVKKPGTEDYRPVQDLREVNKRVEDIHPTVPNPYNLLSTLPPSHPWYTVLDLKDAFFCLRLHSESQLLFAFEWRDPEIGLSGQLTWTRLPQGFKNSPTLFNEALHSDLADFRVRYPALVLLQYVDDLLLAAATRTECLEGTKALLETLGNKGYRASAKKAQICLQEVTYLGYSLKDGQRWLTKARKEAILSIPVPKNSRQVREFLGTAGYCRLWIPGFAELAAPLYPLTRPGTLFQWGTEQQLAFEDIKKALLSSPALGLPDITKPFELFIDENSGFAKGVLVQKLGPWKRPVAYLSKKLDTVASGWPPCLRMVAAIAILVKDAGKLTLGQPLTILTSHPVEALVRQPPNKWLSNARMTHYQAMLLDAERVHFGPTVSLNPATLLPLPSGGNHHDCLQILAETHGTRPDLTDQPLPDADLTWYTDGSSFIRNGEREAGAAVTTESEVIWAAPLPPGTSAQRAELIALTQALKMAEGKKLTVYTDSRYAFATTHVHGEIYRRRGWLTSEGKEIKNKNEILALLEALFLPKRLSIIHCPGHQKGDSPQAKGNRLADDTAKKAATETHSSLTVLPAGKRTADGSEFEKRTADGSEFESPKKKAKVE

SEQ ID NO: 7551 - protein, 2087 aa, synthetic construct
MPAAKRVKLDGGDKKYSIGLDIGTNSVGWAVITDEYKVPSKKFKVLGNTDRHSIKKNLIGALLFDSGETAEATRLKRTARRRYTRRKNRICYLQEIFSNEMAKVDDSFFHRLEESFLVEEDKKHERHPIFGNIVDEVAYHEKYPTIYHLRKKLVDSTDKADLRLIYLALAHMIKFRGHFLIEGDLNPDNSDVDKLFIQLVQTYNQLFEENPINASGVDAKAILSARLSKSRRLENLIAQLPGEKKNGLFGNLIALSLGLTPNFKSNFDLAEDAKLQLSKDTYDDDLDNLLAQIGDQYADLFLAAKNLSDAILLSDILRVNTEITKAPLSASMIKRYDEHHQDLTLLKALVRQQLPEKYKEIFFDQSKNGYAGYIDGGASQEEFYKFIKPILEKMDGTEELLVKLNREDLLRKQRTFDNGSIPHQIHLGELHAILRRQEDFYPFLKDNREKIEKILTFRIPYYVGPLARGNSRFAWMTRKSEETITPWNFEEVVDKGASAQSFIERMTNFDKNLPNEKVLPKHSLLYEYFTVYNELTKVKYVTEGMRKPAFLSGEQKKAIVDLLFKTNRKVTVKQLKEDYFKKIECFDSVEISGVEDRFNASLGTYHDLLKIIKDKDFLDNEENEDILEDIVLTLTLFEDREMIEERLKTYAHLFDDKVMKQLKRRRYTGWGRLSRKLINGIRDKQSGKTILDFLKSDGFANRNFMQLIHDDSLTFKEDIQKAQVSGQGDSLHEHIANLAGSPAIKKGILQTVKVVDELVKVMGRHKPENIVIEMARENQTTQKGQKNSRERMKRIEEGIKELGSQILKEHPVENTQLQNEKLYLYYLQNGRDMYVDQELDINRLSDYDVDHIVPQSFLKDDSIDNKVLTRSDKARGKSDNVPSEEVVKKMKNYWRQLLNAKLITQRKFDNLTKAERGGLSELDKAGFIKRQLVETRQITKHVAQILDSRMNTKYDENDKLIREVKVITLKSKLVSDFRKDFQFYKVREINNYHHAHDAYLNAVVGTALIKKYPKLESEFVYGDYKVYDVRKMIAKSEQEIGKATAKYFFYSNIMNFFKTEITLANGEIRKRPLIETNGETGEIVWDKGRDFATVRKVLSMPQVNIVKKTEVQTGGFSKESILPKRNSDKLIARKKDWDPKKYGGFDSPTVAYSVLVVAKVEKGKSKKLKSVKELLGITIMERSSFEKNPIDFLEAKGYKEVKKDLIIKLPKYSLFELENGRKRMLASAGELQKGNELALPSKYVNFLYLASHYEKLKGSPEDNEQKQLFVEQHKHYLDEIIEQISEFSKRVILADANLDKVLSAYNKHRDKPIREQAENIIHLFTLTNLGAPAAFKYFDTTIDRKRYTSTKEVLDATLIHQSITGLYETRIDLSQLGGDGGPAPEAAAKGGGGGVPWLTQQPLQLTILVPLQEYQEKILSKTALPEDQKQQLKTLFVKYDNLWQHWENQVGHRKIRPHNIATGDYPPRPQKQYPINPKAKPSIQIVIDDLLKQGVLTPQNSTMNTPVYPVPKPDGRWRMVLDYREVNKTIPLTAAQNQHSAGILATIVRQKYKTTLDLANGFWAHPITPESYWLTAFTWQGKQYCWTRLPQGFLNSPALFNADVVDLLKEIPNVQVYVDDIYLSHDDPKEHVQQLEKVFQILLQAGYVVSLKKSEIGQKTVEFLGFNITKEGRGLTDTFKTKLLNITPPKDLKQLQSILGKLNFARNFIPNFAELVQPLYNLIAPAKGKYIEWSEENTKQLNMVIEALNTASNLEERLPEQRLVIKVNTSPSAGYVRYYNETGKKPIMYLNYVFSKAELKFSMLEKLLTTMHKALIKAMDLAMGQEILVYSPIVSMTKIQKTPLPERKALPIRWITWMTYLEDPRIQFHYDKTLPELKHIPDVYTSSQSPVKHPSQYEGVFYTDGSAIKSPDPTKSNNAGMGIVHATYKPEYQVLNQWSIPLGNHTAQMAEIAAVEFACKKALKIPGPVLVITDSFYVAESANKELPYWKSNGFVNNKKKPLKHISKWKSIAECLSMKPDITIQHEKGISLQIPVFILKGNALADKLATQGSYVVNAGKRTADGSEFEKRTADGSEFESPKKKAKVE

SEQ ID NO: 7552 - protein, 2176 aa, synthetic construct
MPAAKRVKLDGGDKKYSIGLDIGTNSVGWAVITDEYKVPSKKFKVLGNTDRHSIKKNLIGALLFDSGETAEATRLKRTARRRYTRRKNRICYLQEIFSNEMAKVDDSFFHRLEESFLVEEDKKHERHPIFGNIVDEVAYHEKYPTIYHLRKKLVDSTDKADLRLIYLALAHMIKFRGHFLIEGDLNPDNSDVDKLFIQLVQTYNQLFEENPINASGVDAKAILSARLSKSRRLENLIAQLPGEKKNGLFGNLIALSLGLTPNFKSNFDLAEDAKLQLSKDTYDDDLDNLLAQIGDQYADLFLAAKNLSDAILLSDILRVNTEITKAPLSASMIKRYDEHHQDLTLLKALVRQQLPEKYKEIFFDQSKNGYAGYIDGGASQEEFYKFIKPILEKMDGTEELLVKLNREDLLRKQRTFDNGSIPHQIHLGELHAILRRQEDFYPFLKDNREKIEKILTFRIPYYVGPLARGNSRFAWMTRKSEETITPWNFEEVVDKGASAQSFIERMTNFDKNLPNEKVLPKHSLLYEYFTVYNELTKVKYVTEGMRKPAFLSGEQKKAIVDLLFKTNRKVTVKQLKEDYFKKIECFDSVEISGVEDRFNASLGTYHDLLKIIKDKDFLDNEENEDILEDIVLTLTLFEDREMIEERLKTYAHLFDDKVMKQLKRRRYTGWGRLSRKLINGIRDKQSGKTILDFLKSDGFANRNFMQLIHDDSLTFKEDIQKAQVSGQGDSLHEHIANLAGSPAIKKGILQTVKVVDELVKVMGRHKPENIVIEMARENQTTQKGQKNSRERMKRIEEGIKELGSQILKEHPVENTQLQNEKLYLYYLQNGRDMYVDQELDINRLSDYDVDHIVPQSFLKDDSIDNKVLTRSDKARGKSDNVPSEEVVKKMKNYWRQLLNAKLITQRKFDNLTKAERGGLSELDKAGFIKRQLVETRQITKHVAQILDSRMNTKYDENDKLIREVKVITLKSKLVSDFRKDFQFYKVREINNYHHAHDAYLNAVVGTALIKKYPKLESEFVYGDYKVYDVRKMIAKSEQEIGKATAKYFFYSNIMNFFKTEITLANGEIRKRPLIETNGETGEIVWDKGRDFATVRKVLSMPQVNIVKKTEVQTGGFSKESILPKRNSDKLIARKKDWDPKKYGGFDSPTVAYSVLVVAKVEKGKSKKLKSVKELLGITIMERSSFEKNPIDFLEAKGYKEVKKDLIIKLPKYSLFELENGRKRMLASAGELQKGNELALPSKYVNFLYLASHYEKLKGSPEDNEQKQLFVEQHKHYLDEIIEQISEFSKRVILADANLDKVLSAYNKHRDKPIREQAENIIHLFTLTNLGAPAAFKYFDTTIDRKRYTSTKEVLDATLIHQSITGLYETRIDLSQLGGDGGPAPEAAAKGGGGGMNPLQLLQPLPAEIKGTKLLAHWNSGATITCIPESFLEDEQPIKKTLIKTIHGEKQQNVYYVTFKVKGRKVEAEVIASPYEYILLSPTDVPWLTQQPLQLTILVPLQEYQEKILSKTALPEDQKQQLKTLFVKYDNLWQHWENQVGHRKIRPHNIATGDYPPRPQKQYPINPKAKPSIQIVIDDLLKQGVLTPQNSTMNTPVYPVPKPDGRWRMVLDYREVNKTIPLTAAQNQHSAGILATIVRQKYKTTLDLANGFWAHPITPESYWLTAFTWQGKQYCWTRLPQGFLNSPALFNADVVDLLKEIPNVQVYVDDIYLSHDDPKEHVQQLEKVFQILLQAGYVVSLKKSEIGQKTVEFLGFNITKEGRGLTDTFKTKLLNITPPKDLKQLQSILGLLNFARNFIPNFAELVQPLYNLIAPAKGKYIEWSEENTKQLNMVIEALNTASNLEERLPEQRLVIKVNTSPSAGYVRYYNETGKKPIMYLNYVFSKAELKFSMLEKLLTTMHKALIKAMDLAMGQEILVYSPIVSMTKIQKTPLPERKALPIRWITWMTYLEDPRIQFHYDKTLPELKHIPDVYTSSQSPVKHPSQYEGVFYTDGSAIKSPDPTKSNNAGMGIVHATYKPEYQVLNQWSIPLGNHTAQMAEIAAVEFACKKALKIPGPVLVITDSFYVAESANKELPYWKSNGFVNNKKKPLKHISKWKSIAECLSMKPDITIQHEKGISLQIPVFILKGNALADKLATQGSYVVNAGKRTADGSEFEKRTADGSEFESPKKKAKVE

SEQ ID NO: 7553 - protein, 2176 aa, synthetic construct
MPAAKRVKLDGGDKKYSIGLDIGTNSVGWAVITDEYKVPSKKFKVLGNTDRHSIKKNLIGALLFDSGETAEATRLKRTARRRYTRRKNRICYLQEIFSNEMAKVDDSFFHRLEESFLVEEDKKHERHPIFGNIVDEVAYHEKYPTIYHLRKKLVDSTDKADLRLIYLALAHMIKFRGHFLIEGDLNPDNSDVDKLFIQLVQTYNQLFEENPINASGVDAKAILSARLSKSRRLENLIAQLPGEKKNGLFGNLIALSLGLTPNFKSNFDLAEDAKLQLSKDTYDDDLDNLLAQIGDQYADLFLAAKNLSDAILLSDILRVNTEITKAPLSASMIKRYDEHHQDLTLLKALVRQQLPEKYKEIFFDQSKNGYAGYIDGGASQEEFYKFIKPILEKMDGTEELLVKLNREDLLRKQRTFDNGSIPHQIHLGELHAILRRQEDFYPFLKDNREKIEKILTFRIPYYVGPLARGNSRFAWMTRKSEETITPWNFEEVVDKGASAQSFIERMTNFDKNLPNEKVLPKHSLLYEYFTVYNELTKVKYVTEGMRKPAFLSGEQKKAIVDLLFKTNRKVTVKQLKEDYFKKIECFDSVEISGVEDRFNASLGTYHDLLKIIKDKDFLDNEENEDILEDIVLTLTLFEDREMIEERLKTYAHLFDDKVMKQLKRRRYTGWGRLSRKLINGIRDKQSGKTILDFLKSDGFANRNFMQLIHDDSLTFKEDIQKAQVSGQGDSLHEHIANLAGSPAIKKGILQTVKVVDELVKVMGRHKPENIVIEMARENQTTQKGQKNSRERMKRIEEGIKELGSQILKEHPVENTQLQNEKLYLYYLQNGRDMYVDQELDINRLSDYDVDHIVPQSFLKDDSIDNKVLTRSDKARGKSDNVPSEEVVKKMKNYWRQLLNAKLITQRKFDNLTKAERGGLSELDKAGFIKRQLVETRQITKHVAQILDSRMNTKYDENDKLIREVKVITLKSKLVSDFRKDFQFYKVREINNYHHAHDAYLNAVVGTALIKKYPKLESEFVYGDYKVYDVRKMIAKSEQEIGKATAKYFFYSNIMNFFKTEITLANGEIRKRPLIETNGETGEIVWDKGRDFATVRKVLSMPQVNIVKKTEVQTGGFSKESILPKRNSDKLIARKKDWDPKKYGGFDSPTVAYSVLVVAKVEKGKSKKLKSVKELLGITIMERSSFEKNPIDFLEAKGYKEVKKDLIIKLPKYSLFELENGRKRMLASAGELQKGNELALPSKYVNFLYLASHYEKLKGSPEDNEQKQLFVEQHKHYLDEIIEQISEFSKRVILADANLDKVLSAYNKHRDKPIREQAENIIHLFTLTNLGAPAAFKYFDTTIDRKRYTSTKEVLDATLIHQSITGLYETRIDLSQLGGDGGPAPEAAAKGGGGGMNPLQLLQPLPAEIKGTKLLAHWNSGATITCIPESFLEDEQPIKKTLIKTIHGEKQQNVYYVTFKVKGRKVEAEVIASPYEYILLSPTDVPWLTQQPLQLTILVPLQEYQEKILSKTALPEDQKQQLKTLFVKYDNLWQHWENQVGHRKIRPHNIATGDYPPRPQKQYPINPKAKPSIQIVIDDLLKQGVLTPQNSTMNTPVYPVPKPDGRWRMVLDYREVNKTIPLTAAQNQHSAGILATIVRQKYKTTLDLANGFWAHPITPESYWLTAFTWQGKQYCWTRLPQGFLNSPALFNADVVDLLKEIPNVQVYVDDIYLSHDDPKEHVQQLEKVFQILLQAGYVVSLKKSEIGQKTVEFLGFNITKEGRGLTDTFKTKLLNITPPKDLKQLQSILGKLNFARNFIPNFAELVQPLYNLIAPAKGKYIEWSEENTKQLNMVIEALNTASNLEERLPEQRLVIKVNTSPSAGYVRYYNETGKKPIMYLNYVFSKAELKFSMLEKLLTTMHKALIKAMDLAMGQEILVYSPIVSMTKIQKTPLPERKALPIRWITWMTYLEDPRIQFHYDKTLPELKHIPDVYTSSQSPVKHPSQYEGVFYTDGSAIKSPDPTKSNNAGMGIVHATYKPEYQVLNQWSIPLGNHTAQMAEIAAVEFACKKALKIPGPVLVITDSFYVAESANKELPYWKSNGFVNNKKKPLKHISKWKSIAECLSMKPDITIQHEKGISLQIPVFILKGNALADKLATQGSYVVNAGKRTADGSEFEKRTADGSEFESPKKKAKVE

SEQ ID NO: 7554 - protein, 2094 aa, synthetic construct
MPAAKRVKLDGGDKKYSIGLDIGTNSVGWAVITDEYKVPSKKFKVLGNTDRHSIKKNLIGALLFDSGETAEATRLKRTARRRYTRRKNRICYLQEIFSNEMAKVDDSFFHRLEESFLVEEDKKHERHPIFGNIVDEVAYHEKYPTIYHLRKKLVDSTDKADLRLIYLALAHMIKFRGHFLIEGDLNPDNSDVDKLFIQLVQTYNQLFEENPINASGVDAKAILSARLSKSRRLENLIAQLPGEKKNGLFGNLIALSLGLTPNFKSNFDLAEDAKLQLSKDTYDDDLDNLLAQIGDQYADLFLAAKNLSDAILLSDILRVNTEITKAPLSASMIKRYDEHHQDLTLLKALVRQQLPEKYKEIFFDQSKNGYAGYIDGGASQEEFYKFIKPILEKMDGTEELLVKLNREDLLRKQRTFDNGSIPHQIHLGELHAILRRQEDFYPFLKDNREKIEKILTFRIPYYVGPLARGNSRFAWMTRKSEETITPWNFEEVVDKGASAQSFIERMTNFDKNLPNEKVLPKHSLLYEYFTVYNELTKVKYVTEGMRKPAFLSGEQKKAIVDLLFKTNRKVTVKQLKEDYFKKIECFDSVEISGVEDRFNASLGTYHDLLKIIKDKDFLDNEENEDILEDIVLTLTLFEDREMIEERLKTYAHLFDDKVMKQLKRRRYTGWGRLSRKLINGIRDKQSGKTILDFLKSDGFANRNFMQLIHDDSLTFKEDIQKAQVSGQGDSLHEHIANLAGSPAIKKGILQTVKVVDELVKVMGRHKPENIVIEMARENQTTQKGQKNSRERMKRIEEGIKELGSQILKEHPVENTQLQNEKLYLYYLQNGRDMYVDQELDINRLSDYDVDHIVPQSFLKDDSIDNKVLTRSDKARGKSDNVPSEEVVKKMKNYWRQLLNAKLITQRKFDNLTKAERGGLSELDKAGFIKRQLVETRQITKHVAQILDSRMNTKYDENDKLIREVKVITLKSKLVSDFRKDFQFYKVREINNYHHAHDAYLNAVVGTALIKKYPKLESEFVYGDYKVYDVRKMIAKSEQEIGKATAKYFFYSNIMNFFKTEITLANGEIRKRPLIETNGETGEIVWDKGRDFATVRKVLSMPQVNIVKKTEVQTGGFSKESILPKRNSDKLIARKKDWDPKKYGGFDSPTVAYSVLVVAKVEKGKSKKLKSVKELLGITIMERSSFEKNPIDFLEAKGYKEVKKDLIIKLPKYSLFELENGRKRMLASAGELQKGNELALPSKYVNFLYLASHYEKLKGSPEDNEQKQLFVEQHKHYLDEIIEQISEFSKRVILADANLDKVLSAYNKHRDKPIREQAENIIHLFTLTNLGAPAAFKYFDTTIDRKRYTSTKEVLDATLIHQSITGLYETRIDLSQLGGDGGPAPEAAAKGGGGGVLNLEEEYRLHEKPVPSSIDPSWLQLFPTVWAERAGMGLANQVPPVVVELRSGASPVAVRQYPMSKEAREGIRPHIQKFLDLGVLVPCRSPWNTPLLPVKKPGTNDYRPVQDLREINKRVQDIHPTVPNPYNLLSSLPPSYTWYSVLDLKDAFFCLRLHPNSQPLFAFEWKDPEKGNTGQLTWTRLPQGFKNSPTLFNEALHRDLAPFRALNPQVVLLQYVDDLLVAAPTYEDCKKGTQKLLQELSKLGYRVSAKKAQLCQREVTYLGYLLKEGKRWLTPARKATVMKIPVPTTPRQVREFLGKAGFCRLFIPGFASLAAPLYPLTKPSIPFIWTEEHQQAFDHIKKALLSAPALALPDLTKPFTLYIDERAGVARGVLTQTLGPWRRPVAYLSKKLDPVASGWPTCLKAVAAVALLLKDADKLTLGQNVTVIASHSLESIVRQPPDRWMTNARMTHYQSLLLNERVSFAPPAVLNPATLLPVESEATPVHRCSEILAEETGTRRDLEDQPLPGVPTWYTDGSSFITEGKRRAGAPIVDGKRTVWASSLPEGTSAQKAELVALTQALRLAEGKNINIYTDSRYAFATAHIHGAIYKQRGWLTSAGKDIKNKEEILALLEAIHLPRRVAIIHCPGHQRGSNPVATGNRRADEAAKQAALSTRVLAGTTKPAGKRTADGSEFEKRTADGSEFESPKKKAKVE

SEQ ID NO: 7555 - protein, 2127 aa, synthetic construct; identical to SEQ ID NO: 4537

SEQ ID NO: 7556 - protein, 2218 aa, synthetic construct
MPAAKRVKLDGGDKKYSIGLDIGTNSVGWAVITDEYKVPSKKFKVLGNTDRHSIKKNLIGALLFDSGETAEATRLKRTARRRYTRRKNRICYLQEIFSNEMAKVDDSFFHRLEESFLVEEDKKHERHPIFGNIVDEVAYHEKYPTIYHLRKKLVDSTDKADLRLIYLALAHMIKFRGHFLIEGDLNPDNSDVDKLFIQLVQTYNQLFEENPINASGVDAKAILSARLSKSRRLENLIAQLPGEKKNGLFGNLIALSLGLTPNFKSNFDLAEDAKLQLSKDTYDDDLDNLLAQIGDQYADLFLAAKNLSDAILLSDILRVNTEITKAPLSASMIKRYDEHHQDLTLLKALVRQQLPEKYKEIFFDQSKNGYAGYIDGGASQEEFYKFIKPILEKMDGTEELLVKLNREDLLRKQRTFDNGSIPHQIHLGELHAILRRQEDFYPFLKDNREKIEKILTFRIPYYVGPLARGNSRFAWMTRKSEETITPWNFEEVVDKGASAQSFIERMTNFDKNLPNEKVLPKHSLLYEYFTVYNELTKVKYVTEGMRKPAFLSGEQKKAIVDLLFKTNRKVTVKQLKEDYFKKIECFDSVEISGVEDRFNASLGTYHDLLKIIKDKDFLDNEENEDILEDIVLTLTLFEDREMIEERLKTYAHLFDDKVMKQLKRRRYTGWGRLSRKLINGIRDKQSGKTILDFLKSDGFANRNFMQLIHDDSLTFKEDIQKAQVSGQGDSLHEHIANLAGSPAIKKGILQTVKVVDELVKVMGRHKPENIVIEMARENQTTQKGQKNSRERMKRIEEGIKELGSQILKEHPVENTQLQNEKLYLYYLQNGRDMYVDQELDINRLSDYDVDHIVPQSFLKDDSIDNKVLTRSDKARGKSDNVPSEEVVKKMKNYWRQLLNAKLITQRKFDNLTKAERGGLSELDKAGFIKRQLVETRQITKHVAQILDSRMNTKYDENDKLIREVKVITLKSKLVSDFRKDFQFYKVREINNYHHAHDAYLNAVVGTALIKKYPKLESEFVYGDYKVYDVRKMIAKSEQEIGKATAKYFFYSNIMNFFKTEITLANGEIRKRPLIETNGETGEIVWDKGRDFATVRKVLSMPQVNIVKKTEVQTGGFSKESILPKRNSDKLIARKKDWDPKKYGGFDSPTVAYSVLVVAKVEKGKSKKLKSVKELLGITIMERSSFEKNPIDFLEAKGYKEVKKDLIIKLPKYSLFELENGRKRMLASAGELQKGNELALPSKYVNFLYLASHYEKLKGSPEDNEQKQLFVEQHKHYLDEIIEQISEFSKRVILADANLDKVLSAYNKHRDKPIREQAENIIHLFTLTNLGAPAAFKYFDTTIDRKRYTSTKEVLDATLIHQSITGLYETRIDLSQLGGDGGPAPEAAAKGGGGGTLGDQGSRGSDPLPEPRVTLTVEGIPTEFLVNTGAEHSVLTKPMGKMGSKRTVVAGATGSKVYPWTTKRLLKIGQKQVTHSFLVIPECPAPLLGRDLLTKLKAQIQFSTEGPQVTWEDRPAMCLVLNLEEEYRLHEKPVPPSIDPSWLQLFPMVWAEKAGMGLANQVPPVVVELKSDASPVAVRQYPMSKEAREGIRPHIQRFLDLGILVPCQSPWNTPLLPVKKPGTNDYRPVQDLREVNKRVQDIHPTVPNPYNLLSSLPPSHTWYSVLDLKDAFFCLKLHPNSQPLFAFEWRDPEKGNTGQLTWTRLPQGFKNSPTLFNEALHRDLASFRALNPQVVMLQYVDDLLVAAPTYRDCKEGTRRLLQELSKLGYRVSAKKAQLCREEVTYLGYLLKGGKRWLTPARKATVMKIPTPTTPRQVREFLGTAGFCRLWIPGFASLAAPLYPLTRPKVPFTWTEAHQEAFGRIKEALLSAPALALPDLTKPFALYVDEKEGVARGVLTQTLGPWRRPVAYLSKKLDPVASGWPTCLKAIAAVALLLKDADKLTLGQNVLVIAPHNLESIVRQPPDRWMTNARMTHYQSLLLNERVSFAPPAILNPATLLPVESDDTPIHICSEILAEETGTRPDLRDQPLPGVPAWYTDGSSFIMDGRRQAGAAIVDNKRTVWASNLPEGTSAQKAELIALTQALRLAEGKSINIYTDSRYAFATAHVHGAIYKQRGWLTSAGKDIKNKEEILALLEAIHLPKRVAIIHCPGHQRGTDPVATGNRKADEAAKQAAQSTRILTETTKNAGKRTADGSEFEKRTADGSEFESPKKKAKVE

SEQ ID NO: 7557 - protein, 2218 aa, synthetic construct
MPAAKRVKLDGGDKKYSIGLDIGTNSVGWAVITDEYKVPSKKFKVLGNTDRHSIKKNLIGALLFDSGETAEATRLKRTARRRYTRRKNRICYLQEIFSNEMAKVDDSFFHRLEESFLVEEDKKHERHPIFGNIVDEVAYHEKYPTIYHLRKKLVDSTDKADLRLIYLALAHMIKFRGHFLIEGDLNPDNSDVDKLFIQLVQTYNQLFEENPINASGVDAKAILSARLSKSRRLENLIAQLPGEKKNGLFGNLIALSLGLTPNFKSNFDLAEDAKLQLSKDTYDDDLDNLLAQIGDQYADLFLAAKNLSDAILLSDILRVNTEITKAPLSASMIKRYDEHHQDLTLLKALVRQQLPEKYKEIFFDQSKNGYAGYIDGGASQEEFYKFIKPILEKMDGTEELLVKLNREDLLRKQRTFDNGSIPHQIHLGELHAILRRQEDFYPFLKDNREKIEKILTFRIPYYVGPLARGNSRFAWMTRKSEETITPWNFEEVVDKGASAQSFIERMTNFDKNLPNEKVLPKHSLLYEYFTVYNELTKVKYVTEGMRKPAFLSGEQKKAIVDLLFKTNRKVTVKQLKEDYFKKIECFDSVEISGVEDRFNASLGTYHDLLKIIKDKDFLDNEENEDILEDIVLTLTLFEDREMIEERLKTYAHLFDDKVMKQLKRRRYTGWGRLSRKLINGIRDKQSGKTILDFLKSDGFANRNFMQLIHDDSLTFKEDIQKAQVSGQGDSLHEHIANLAGSPAIKKGILQTVKVVDELVKVMGRHKPENIVIEMARENQTTQKGQKNSRERMKRIEEGIKELGSQILKEHPVENTQLQNEKLYLYYLQNGRDMYVDQELDINRLSDYDVDHIVPQSFLKDDSIDNKVLTRSDKARGKSDNVPSEEVVKKMKNYWRQLLNAKLITQRKFDNLTKAERGGLSELDKAGFIKRQLVETRQITKHVAQILDSRMNTKYDENDKLIREVKVITLKSKLVSDFRKDFQFYKVREINNYHHAHDAYLNAVVGTALIKKYPKLESEFVYGDYKVYDVRKMIAKSEQEIGKATAKYFFYSNIMNFFKTEITLANGEIRKRPLIETNGETGEIVWDKGRDFATVRKVLSMPQVNIVKKTEVQTGGFSKESILPKRNSDKLIARKKDWDPKKYGGFDSPTVAYSVLVVAKVEKGKSKKLKSVKELLGITIMERSSFEKNPIDFLEAKGYKEVKKDLIIKLPKYSLFELENGRKRMLASAGELQKGNELALPSKYVNFLYLASHYEKLKGSPEDNEQKQLFVEQHKHYLDEIIEQISEFSKRVILADANLDKVLSAYNKHRDKPIREQAENIIHLFTLTNLGAPAAFKYFDTTIDRKRYTSTKEVLDATLIHQSITGLYETRIDLSQLGGDGGPAPEAAAKGGGGGTLGDQGSRGSDPLPEPRVTLTVEGIPTEFLVNTGAEHSVLTKPMGKMGSKRTVVAGATGSKVYPWTTKRLLKIGQKQVTHSFLVIPECPAPLLGRDLLTKLKAQIQFSTEGPQVTWEDRPAMCLVLNLEEEYRLHEKPVPPSIDPSWLQLFPMVWAEKAGMGLANQVPPVVVELKSDASPVAVRQYPMSKEAREGIRPHIQRFLDLGILVPCQSPWNTPLLPVKKPGTNDYRPVQDLREVNKRVQDIHPTVPNPYNLLSSLPPSHTWYSVLDLKDAFFCLKLHPNSQPLFAFEWRDPEKGNTGQLTWTRLPQGFKNSPTLFNEALHRDLASFRALNPQVVMLQYVDDLLVAAPTYRDCKEGTRRLLQELSKLGYRVSAKKAQLCREEVTYLGYLLKGGKRWLTPARKATVMKIPTPTTPRQVREFLGKAGFCRLFIPGFASLAAPLYPLTRPKVPFTWTEAHQEAFGRIKEALLSAPALALPDLTKPFALYVDEKEGVARGVLTQTLGPWRRPVAYLSKKLDPVASGWPTCLKAIAAVALLLKDADKLTLGQNVLVIAPHNLESIVRQPPDRWMTNARMTHYQSLLLNERVSFAPPAILNPATLLPVESDDTPIHICSEILAEETGTRPDLRDQPLPGVPAWYTDGSSFIMDGRRQAGAAIVDNKRTVWASNLPEGTSAQKAELIALTQALRLAEGKSINIYTDSRYAFATAHVHGAIYKQRGWLTSAGKDIKNKEEILALLEAIHLPKRVAIIHCPGHQRGTDPVATGNRKADEAAKQAAQSTRILTETTKNAGKRTADGSEFEKRTADGSEFESPKKKAKVE

SEQ ID NO: 7558 - protein, 2096 aa, synthetic construct
MPAAKRVKLDGGDKKYSIGLDIGTNSVGWAVITDEYKVPSKKFKVLGNTDRHSIKKNLIGALLFDSGETAEATRLKRTARRRYTRRKNRICYLQEIFSNEMAKVDDSFFHRLEESFLVEEDKKHERHPIFGNIVDEVAYHEKYPTIYHLRKKLVDSTDKADLRLIYLALAHMIKFRGHFLIEGDLNPDNSDVDKLFIQLVQTYNQLFEENPINASGVDAKAILSARLSKSRRLENLIAQLPGEKKNGLFGNLIALSLGLTPNFKSNFDLAEDAKLQLSKDTYDDDLDNLLAQIGDQYADLFLAAKNLSDAILLSDILRVNTEITKAPLSASMIKRYDEHHQDLTLLKALVRQQLPEKYKEIFFDQSKNGYAGYIDGGASQEEFYKFIKPILEKMDGTEELLVKLNREDLLRKQRTFDNGSIPHQIHLGELHAILRRQEDFYPFLKDNREKIEKILTFRIPYYVGPLARGNSRFAWMTRKSEETITPWNFEEVVDKGASAQSFIERMTNFDKNLPNEKVLPKHSLLYEYFTVYNELTKVKYVTEGMRKPAFLSGEQKKAIVDLLFKTNRKVTVKQLKEDYFKKIECFDSVEISGVEDRFNASLGTYHDLLKIIKDKDFLDNEENEDILEDIVLTLTLFEDREMIEERLKTYAHLFDDKVMKQLKRRRYTGWGRLSRKLINGIRDKQSGKTILDFLKSDGFANRNFMQLIHDDSLTFKEDIQKAQVSGQGDSLHEHIANLAGSPAIKKGILQTVKVVDELVKVMGRHKPENIVIEMARENQTTQKGQKNSRERMKRIEEGIKELGSQILKEHPVENTQLQNEKLYLYYLQNGRDMYVDQELDINRLSDYDVDHIVPQSFLKDDSIDNKVLTRSDKARGKSDNVPSEEVVKKMKNYWRQLLNAKLITQRKFDNLTKAERGGLSELDKAGFIKRQLVETRQITKHVAQILDSRMNTKYDENDKLIREVKVITLKSKLVSDFRKDFQFYKVREINNYHHAHDAYLNAVVGTALIKKYPKLESEFVYGDYKVYDVRKMIAKSEQEIGKATAKYFFYSNIMNFFKTEITLANGEIRKRPLIETNGETGEIVWDKGRDFATVRKVLSMPQVNIVKKTEVQTGGFSKESILPKRNSDKLIARKKDWDPKKYGGFDSPTVAYSVLVVAKVEKGKSKKLKSVKELLGITIMERSSFEKNPIDFLEAKGYKEVKKDLIIKLPKYSLFELENGRKRMLASAGELQKGNELALPSKYVNFLYLASHYEKLKGSPEDNEQKQLFVEQHKHYLDEIIEQISEFSKRVILADANLDKVLSAYNKHRDKPIREQAENIIHLFTLTNLGAPAAFKYFDTTIDRKRYTSTKEVLDATLIHQSITGLYETRIDLSQLGGDGGPAPEAAAKGGGGGTLNIEDEYRLHETSKGPDVPLGSTWLSDFPQAWAETGGMGLAVRQAPLIIPLKATSTPVSIKQYPMSQEARLGIKPHIQRLLDQGILVPCQSPWNTPLLPVKKPGTNDYRPVQDLREVNKRVEDIHPTVPNPYNLLSGLPPSHQWYTVLDLKDAFFCLRLHPTSQSLFAFEWRDPEMGISGQLTWTRLPQGFKNSPTLFNEALHRDLADFRIQHPDLILLQYVDDLLLAATSELDCQQGTRALLQTLGDLGYRASAKKAQICQKQVKYLGYLLKEGQRWLTEARKETVMGQPTPKTPRQLREFLGKAGFCRLFIPGFAEMAAPLYPLTKPGTLFEWGPDQQKAYQEIKQALLTAPALGLPDLTKPFELFVDEKQGYAKGVLTQKLGPWRRPVAYLSKKLDPVAAGWPPCLRMVAAIAVLTKDAGKLTMGQPLVILAPHAVEALVKQPPDRWLSNARMTHYQALLLDTDRVQFGPIVALNPATLLPLPEEGLQHDCLDILAEAHGTRPDLTDQPLPDADHTWYTDGSSFLQEGQRKAGAAVTTETEVVWAKALPAGTSAQRAELIALTQALKMAEGKKLNVYTDSRYAFATAHIHGEIYRRRGWLTSEGKEIKNKDEILALLKALFLPKRLSIIHCPGHQKGNRAEARGNRMADQAAREVATRETPETSTLLAGKRTADGSEFEKRTADGSEFESPKKKAKVE

SEQ ID NO: 7559 - protein, 2096 aa, synthetic construct
MPAAKRVKLDGGDKKYSIGLDIGTNSVGWAVITDEYKVPSKKFKVLGNTDRHSIKKNLIGALLFDSGETAEATRLKRTARRRYTRRKNRICYLQEIFSNEMAKVDDSFFHRLEESFLVEEDKKHERHPIFGNIVDEVAYHEKYPTIYHLRKKLVDSTDKADLRLIYLALAHMIKFRGHFLIEGDLNPDNSDVDKLFIQLVQTYNQLFEENPINASGVDAKAILSARLSKSRRLENLIAQLPGEKKNGLFGNLIALSLGLTPNFKSNFDLAEDAKLQLSKDTYDDDLDNLLAQIGDQYADLFLAAKNLSDAILLSDILRVNTEITKAPLSASMIKRYDEHHQDLTLLKALVRQQLPEKYKEIFFDQSKNGYAGYIDGGASQEEFYKFIKPILEKMDGTEELLVKLNREDLLRKQRTFDNGSIPHQIHLGELHAILRRQEDFYPFLKDNREKIEKILTFRIPYYVGPLARGNSRFAWMTRKSEETITPWNFEEVVDKGASAQSFIERMTNFDKNLPNEKVLPKHSLLYEYFTVYNELTKVKYVTEGMRKPAFLSGEQKKAIVDLLFKTNRKVTVKQLKEDYFKKIECFDSVEISGVEDRFNASLGTYHDLLKIIKDKDFLDNEENEDILEDIVLTLTLFEDREMIEERLKTYAHLFDDKVMKQLKRRRYTGWGRLSRKLINGIRDKQSGKTILDFLKSDGFANRNFMQLIHDDSLTFKEDIQKAQVSGQGDSLHEHIANLAGSPAIKKGILQTVKVVDELVKVMGRHKPENIVIEMARENQTTQKGQKNSRERMKRIEEGIKELGSQILKEHPVENTQLQNEKLYLYYLQNGRDMYVDQELDINRLSDYDVDHIVPQSFLKDDSIDNKVLTRSDKARGKSDNVPSEEVVKKMKNYWRQLLNAKLITQRKFDNLTKAERGGLSELDKAGFIKRQLVETRQITKHVAQILDSRMNTKYDENDKLIREVKVITLKSKLVSDFRKDFQFYKVREINNYHHAHDAYLNAVVGTALIKKYPKLESEFVYGDYKVYDVRKMIAKSEQEIGKATAKYFFYSNIMNFFKTEITLANGEIRKRPLIETNGETGEIVWDKGRDFATVRKVLSMPQVNIVKKTEVQTGGFSKESILPKRNSDKLIARKKDWDPKKYGGFDSPTVAYSVLVVAKVEKGKSKKLKSVKELLGITIMERSSFEKNPIDFLEAKGYKEVKKDLIIKLPKYSLFELENGRKRMLASAGELQKGNELALPSKYVNFLYLASHYEKLKGSPEDNEQKQLFVEQHKHYLDEIIEQISEFSKRVILADANLDKVLSAYNKHRDKPIREQAENIIHLFTLTNLGAPAAFKYFDTTIDRKRYTSTKEVLDATLIHQSITGLYETRIDLSQLGGDGGPAPEAAAKGGGGGTLNIEDEHRLHETSKEPDVSLGSTWLSDFPQAWAETGGMGLAVRQAPLIIPLKATSTPVSIKQYPMSQEARLGIKPHIQRLLDQGILVPCQSPWNTPLLPVKKPGTNDYRPVQDLREVNKRVEDIHPTVPNPYNLLSGLPPSHQWYTVLDLKDAFFCLRLHPTSQPLFAFEWRDPEMGISGQLTWTRLPQGFKNSPTLFDEALHRDLADFRIQHPDLILLQYVDDLLLAATSELDCQQGTRALLQTLGNLGYRASAKKAQICQKQVKYLGYLLKEGQRWLTEARKETVMGQPTPKTPRQLREFLGTAGFCRLWIPGFAEMAAPLYPLTKTGTLFNWGPDQQKAYQEIKQALLTAPALGLPDLTKPFELFVDEKQGYAKGVLTQKLGPWRRPVAYLSKKLDPVAAGWPPCLRMVAAIAVLTKDAGKLTMGQPLVILAPHAVEALVKQPPDRWLSNARMTHYQALLLDTDRVQFGPVVALNPATLLPLPEEGLQHNCLDILAEAHGTRPDLTDQPLPDADHTWYTDGSSLLQEGQRKAGAAVTTETEVIWAKALPAGTSAQRAELIALTQALKMAEGKKLNVYTDSRYAFATAHIHGEIYRRRGLLTSEGKEIKNKDEILALLKALFLPKRLSIIHCPGHQKGHSAEARGNRMADQAARKAAITETPDTSTLLAGKRTADGSEFEKRTADGSEFESPKKKAKVE

SEQ ID NO: 7560 - protein, 2096 aa, synthetic construct; identical to SEQ ID NO: 7559

SEQ ID NO: 7561 - protein, 2116 aa, synthetic construct
MPAAKRVKLDGGDKKYSIGLDIGTNSVGWAVITDEYKVPSKKFKVLGNTDRHSIKKNLIGALLFDSGETAEATRLKRTARRRYTRRKNRICYLQEIFSNEMAKVDDSFFHRLEESFLVEEDKKHERHPIFGNIVDEVAYHEKYPTIYHLRKKLVDSTDKADLRLIYLALAHMIKFRGHFLIEGDLNPDNSDVDKLFIQLVQTYNQLFEENPINASGVDAKAILSARLSKSRRLENLIAQLPGEKKNGLFGNLIALSLGLTPNFKSNFDLAEDAKLQLSKDTYDDDLDNLLAQIGDQYADLFLAAKNLSDAILLSDILRVNTEITKAPLSASMIKRYDEHHQDLTLLKALVRQQLPEKYKEIFFDQSKNGYAGYIDGGASQEEFYKFIKPILEKMDGTEELLVKLNREDLLRKQRTFDNGSIPHQIHLGELHAILRRQEDFYPFLKDNREKIEKILTFRIPYYVGPLARGNSRFAWMTRKSEETITPWNFEEVVDKGASAQSFIERMTNFDKNLPNEKVLPKHSLLYEYFTVYNELTKVKYVTEGMRKPAFLSGEQKKAIVDLLFKTNRKVTVKQLKEDYFKKIECFDSVEISGVEDRFNASLGTYHDLLKIIKDKDFLDNEENEDILEDIVLTLTLFEDREMIEERLKTYAHLFDDKVMKQLKRRRYTGWGRLSRKLINGIRDKQSGKTILDFLKSDGFANRNFMQLIHDDSLTFKEDIQKAQVSGQGDSLHEHIANLAGSPAIKKGILQTVKVVDELVKVMGRHKPENIVIEMARENQTTQKGQKNSRERMKRIEEGIKELGSQILKEHPVENTQLQNEKLYLYYLQNGRDMYVDQELDINRLSDYDVDHIVPQSFLKDDSIDNKVLTRSDKARGKSDNVPSEEVVKKMKNYWRQLLNAKLITQRKFDNLTKAERGGLSELDKAGFIKRQLVETRQITKHVAQILDSRMNTKYDENDKLIREVKVITLKSKLVSDFRKDFQFYKVREINNYHHAHDAYLNAVVGTALIKKYPKLESEFVYGDYKVYDVRKMIAKSEQEIGKATAKYFFYSNIMNFFKTEITLANGEIRKRPLIETNGETGEIVWDKGRDFATVRKVLSMPQVNIVKKTEVQTGGFSKESILPKRNSDKLIARKKDWDPKKYGGFDSPTVAYSVLVVAKVEKGKSKKLKSVKELLGITIMERSSFEKNPIDFLEAKGYKEVKKDLIIKLPKYSLFELENGRKRMLASAGELQKGNELALPSKYVNFLYLASHYEKLKGSPEDNEQKQLFVEQHKHYLDEIIEQISEFSKRVILADANLDKVLSAYNKHRDKPIREQAENIIHLFTLTNLGAPAAFKYFDTTIDRKRYTSTKEVLDATLIHQSITGLYETRIDLSQLGGDGGPAPEAAAKGGGGGVQEISDSRPMLHIYLNGRRFLGLLDTGADKTCIAGRDWPANWPIHQTESSLQGLGMACGVARSSQPLRWQHEDKSGIIHPFVIPTLPFTLWGRDIMKDIKVRLMTDSPDDSQDLMIGAIESNLFADQISWKSDQPVWLNQWPLKQEKLQALQQLVTEQLQLGHLEESNSPWNTPVFVIKKKSGKWRLLQDLRAVNATMHDMGALQPGLPSPVAVPKGWEIIIIDLQDCFFNIKLHPEDCKRFAFSVPSPNFKRPYQRFQWKVLPQGMKNSPTLCQKFVDKAILTVRDKYQDSYIVHYMDDILLAHPSRSIVDEILTSMIQALNKHGLVVSTEKIQKYDNLKYLGTHIQGDSVSYQKLQIRTDKLRTLNDFQKLLGNINWIRPFLKLTTGELKPLFEILNGDSNPISTRKLTPEACKALQLMNERLSTARVKRLDLSQPWSLCILKTEYTPTACLWQDGVVEWIHLPHISPKVITPYDIFCTQLIIKGRHRSKELFSKDPDYIVVPYTKVQFDLLLQEKEDWPISLLGFLGEVHFHLPKDPLLTFTLQTAIIFPHMTSTTPLEKGIVIFTDGSANGRSVTYIQGREPIIKENTQNTAQQAEIVAVITAFEEVSQPFNLYTDSKYVTGLFPEIETATLSPRTKIYTELKHLQRLIHKRQEKFYIGHIRGHTGLPGPLAQGNAYADSLTRILTAAGKRTADGSEFEKRTADGSEFESPKKKAKVE

SEQ ID NO: 7562 - protein, 2090 aa, synthetic construct
MPAAKRVKLDGGDKKYSIGLDIGTNSVGWAVITDEYKVPSKKFKVLGNTDRHSIKKNLIGALLFDSGETAEATRLKRTARRRYTRRKNRICYLQEIFSNEMAKVDDSFFHRLEESFLVEEDKKHERHPIFGNIVDEVAYHEKYPTIYHLRKKLVDSTDKADLRLIYLALAHMIKFRGHFLIEGDLNPDNSDVDKLFIQLVQTYNQLFEENPINASGVDAKAILSARLSKSRRLENLIAQLPGEKKNGLFGNLIALSLGLTPNFKSNFDLAEDAKLQLSKDTYDDDLDNLLAQIGDQYADLFLAAKNLSDAILLSDILRVNTEITKAPLSASMIKRYDEHHQDLTLLKALVRQQLPEKYKEIFFDQSKNGYAGYIDGGASQEEFYKFIKPILEKMDGTEELLVKLNREDLLRKQRTFDNGSIPHQIHLGELHAILRRQEDFYPFLKDNREKIEKILTFRIPYYVGPLARGNSRFAWMTRKSEETITPWNFEEVVDKGASAQSFIERMTNFDKNLPNEKVLPKHSLLYEYFTVYNELTKVKYVTEGMRKPAFLSGEQKKAIVDLLFKTNRKVTVKQLKEDYFKKIECFDSVEISGVEDRFNASLGTYHDLLKIIKDKDFLDNEENEDILEDIVLTLTLFEDREMIEERLKTYAHLFDDKVMKQLKRRRYTGWGRLSRKLINGIRDKQSGKTILDFLKSDGFANRNFMQLIHDDSLTFKEDIQKAQVSGQGDSLHEHIANLAGSPAIKKGILQTVKVVDELVKVMGRHKPENIVIEMARENQTTQKGQKNSRERMKRIEEGIKELGSQILKEHPVENTQLQNEKLYLYYLQNGRDMYVDQELDINRLSDYDVDHIVPQSFLKDDSIDNKVLTRSDKARGKSDNVPSEEVVKKMKNYWRQLLNAKLITQRKFDNLTKAERGGLSELDKAGFIKRQLVETRQITKHVAQILDSRMNTKYDENDKLIREVKVITLKSKLVSDFRKDFQFYKVREINNYHHAHDAYLNAVVGTALIKKYPKLESEFVYGDYKVYDVRKMIAKSEQEIGKATAKYFFYSNIMNFFKTEITLANGEIRKRPLIETNGETGEIVWDKGRDFATVRKVLSMPQVNIVKKTEVQTGGFSKESILPKRNSDKLIARKKDWDPKKYGGFDSPTVAYSVLVVAKVEKGKSKKLKSVKELLGITIMERSSFEKNPIDFLEAKGYKEVKKDLIIKLPKYSLFELENGRKRMLASAGELQKGNELALPSKYVNFLYLASHYEKLKGSPEDNEQKQLFVEQHKHYLDEIIEQISEFSKRVILADANLDKVLSAYNKHRDKPIREQAENIIHLFTLTNLGAPAAFKYFDTTIDRKRYTSTKEVLDATLIHQSITGLYETRIDLSQLGGDGGPAPEAAAKGGGGGTLQLDDEYRLYSPLVKPDQNIQFWLEQFPQAWAETAGMGLAKQVPPQVIQLKASATPVSVRQYPLSKEAQEGIRPHVQRLIQQGILVPVQSPWNTPLLPVRKPGTNDYRPVQDLREVNKRVQDIHPTVPNPYNLLCALPPQRSWYTVLDLKDAFFCLRLHPTSQPLFAFEWRDPGTGRTGQLTWTRLPQGFKNSPTIFDEALHRDLANFRIQHPQVTLLQYVDDLLLAGATKQDCLEGTKALLLELSDLGYRASAKKAQICRREVTYLGYSLRDGQRWLTEARKKTVVQIPAPTTAKQVREFLGTAGFCRLWIPGFATLAAPLYPLTKEKGEFSWAPEHQKAFDAIKKALLSAPALALPDVTKPFTLYVDERKGVARGVLTQTLGPWRRPVAYLSKKLDPVASGWPVCLKAIAAVAILVKDADKLTLGQNITVIAPHALENIVRQPPDRWMTNARMTHYQSLLLTERVTFAPPAALNPATLLPEETDEPVTHDCHQLLIEETGVRKDLTDIPLTGEVLTWFTDGSSYVVEGKRMAGAAVVDGTRTIWASSLPEGTSAQKAELMALTQALRLAEGKSINIYTDSRYAFATAHVHGAIYKQRGLLTSAGREIKNKEEILSLLEALHLPKRLAIIHCPGHQKAKDPISRGNQMADRVAKQAAQGVNLLAGKRTADGSEFEKRTADGSEFESPKKKAKVE

SEQ ID NO: 7563 - protein, 2176 aa, synthetic construct
MPAAKRVKLDGGDKKYSIGLDIGTNSVGWAVITDEYKVPSKKFKVLGNTDRHSIKKNLIGALLFDSGETAEATRLKRTARRRYTRRKNRICYLQEIFSNEMAKVDDSFFHRLEESFLVEEDKKHERHPIFGNIVDEVAYHEKYPTIYHLRKKLVDSTDKADLRLIYLALAHMIKFRGHFLIEGDLNPDNSDVDKLFIQLVQTYNQLFEENPINASGVDAKAILSARLSKSRRLENLIAQLPGEKKNGLFGNLIALSLGLTPNFKSNFDLAEDAKLQLSKDTYDDDLDNLLAQIGDQYADLFLAAKNLSDAILLSDILRVNTEITKAPLSASMIKRYDEHHQDLTLLKALVRQQLPEKYKEIFFDQSKNGYAGYIDGGASQEEFYKFIKPILEKMDGTEELLVKLNREDLLRKQRTFDNGSIPHQIHLGELHAILRRQEDFYPFLKDNREKIEKILTFRIPYYVGPLARGNSRFAWMTRKSEETITPWNFEEVVDKGASAQSFIERMTNFDKNLPNEKVLPKHSLLYEYFTVYNELTKVKYVTEGMRKPAFLSGEQKKAIVDLLFKTNRKVTVKQLKEDYFKKIECFDSVEISGVEDRFNASLGTYHDLLKIIKDKDFLDNEENEDILEDIVLTLTLFEDREMIEERLKTYAHLFDDKVMKQLKRRRYTGWGRLSRKLINGIRDKQSGKTILDFLKSDGFANRNFMQLIHDDSLTFKEDIQKAQVSGQGDSLHEHIANLAGSPAIKKGILQTVKVVDELVKVMGRHKPENIVIEMARENQTTQKGQKNSRERMKRIEEGIKELGSQILKEHPVENTQLQNEKLYLYYLQNGRDMYVDQELDINRLSDYDVDHIVPQSFLKDDSIDNKVLTRSDKARGKSDNVPSEEVVKKMKNYWRQLLNAKLITQRKFDNLTKAERGGLSELDKAGFIKRQLVETRQITKHVAQILDSRMNTKYDENDKLIREVKVITLKSKLVSDFRKDFQFYKVREINNYHHAHDAYLNAVVGTALIKKYPKLESEFVYGDYKVYDVRKMIAKSEQEIGKATAKYFFYSNIMNFFKTEITLANGEIRKRPLIETNGETGEIVWDKGRDFATVRKVLSMPQVNIVKKTEVQTGGFSKESILPKRNSDKLIARKKDWDPKKYGGFDSPTVAYSVLVVAKVEKGKSKKLKSVKELLGITIMERSSFEKNPIDFLEAKGYKEVKKDLIIKLPKYSLFELENGRKRMLASAGELQKGNELALPSKYVNFLYLASHYEKLKGSPEDNEQKQLFVEQHKHYLDEIIEQISEFSKRVILADANLDKVLSAYNKHRDKPIREQAENIIHLFTLTNLGAPAAFKYFDTTIDRKRYTSTKEVLDATLIHQSITGLYETRIDLSQLGGDGGPAPEAAAKGGGGGMDPLQLLQPLEAEIKGTKLKAHWNSGATITCVPEAFLEDERPIQTMLIKTIHGEKQQDVYYLTFKVQGRKVEAEVLASPYDYILLNPSDVPWLMKKPLQLTVLVPLHEYQERLLQQTALPKEQKELLQKLFLKYDALWQHWENQVGHRRIKPHNIATGTLAPRPQKQYPINPKAKPSIQIVIDDLLKQGVLIQQNSTMNTPVYPVPKPDGKWRMVLDYREVNKTIPLIAAQNQHSAGILSSIYRGKYKTTLDLTNGFWAHPITPESYWLTAFTWQGKQYCWTRLPQGFLNSPALFTADVVDLLKEIPNVQAYVDDIYISHDDPQEHLEQLEKIFSILLNAGYVVSLKKSEIAQREVEFLGFNITKEGRGLTDTFKQKLLNITPPKDLKQLQSILGLLNFARNFIPNYSELVKPLYTIVANANGKFISWTEDNSNQLQHIISVLNQADNLEERNPETRLIIKVNSSPSAGYIRYYNEGSKRPIMYVNYIFSKAEAKFTQTEKLLTTMHKGLIKAMDLAMGQEILVYSPIVSMTKIQRTPLPERKALPVRWITWMTYLEDPRIQFHYDKSLPELQQIPNVTEDVIAKTKHPSEFAMVFYTDGSAIKHPDVNKSHSAGMGIAQVQFIPEYKIVHQWSIPLGDHTAQLAEIAAVEFACKKALKISGPVLIVTDSFYVAESANKELPYWKSNGFLNNKKKPLRHVSKWKSIAECLQLKPDIIIMHEKGHQQPMTTLHTEGNNLADKLATQGSYVVHAGKRTADGSEFEKRTADGSEFESPKKKAKVE

SEQ ID NO: 7564 - protein, 2176 aa, synthetic construct
MPAAKRVKLDGGDKKYSIGLDIGTNSVGWAVITDEYKVPSKKFKVLGNTDRHSIKKNLIGALLFDSGETAEATRLKRTARRRYTRRKNRICYLQEIFSNEMAKVDDSFFHRLEESFLVEEDKKHERHPIFGNIVDEVAYHEKYPTIYHLRKKLVDSTDKADLRLIYLALAHMIKFRGHFLIEGDLNPDNSDVDKLFIQLVQTYNQLFEENPINASGVDAKAILSARLSKSRRLENLIAQLPGEKKNGLFGNLIALSLGLTPNFKSNFDLAEDAKLQLSKDTYDDDLDNLLAQIGDQYADLFLAAKNLSDAILLSDILRVNTEITKAPLSASMIKRYDEHHQDLTLLKALVRQQLPEKYKEIFFDQSKNGYAGYIDGGASQEEFYKFIKPILEKMDGTEELLVKLNREDLLRKQRTFDNGSIPHQIHLGELHAILRRQEDFYPFLKDNREKIEKILTFRIPYYVGPLARGNSRFAWMTRKSEETITPWNFEEVVDKGASAQSFIERMTNFDKNLPNEKVLPKHSLLYEYFTVYNELTKVKYVTEGMRKPAFLSGEQKKAIVDLLFKTNRKVTVKQLKEDYFKKIECFDSVEISGVEDRFNASLGTYHDLLKIIKDKDFLDNEENEDILEDIVLTLTLFEDREMIEERLKTYAHLFDDKVMKQLKRRRYTGWGRLSRKLINGIRDKQSGKTILDFLKSDGFANRNFMQLIHDDSLTFKEDIQKAQVSGQGDSLHEHIANLAGSPAIKKGILQTVKVVDELVKVMGRHKPENIVIEMARENQTTQKGQKNSRERMKRIEEGIKELGSQILKEHPVENTQLQNEKLYLYYLQNGRDMYVDQELDINRLSDYDVDHIVPQSFLKDDSIDNKVLTRSDKARGKSDNVPSEEVVKKMKNYWRQLLNAKLITQRKFDNLTKAERGGLSELDKAGFIKRQLVETRQITKHVAQILDSRMNTKYDENDKLIREVKVITLKSKLVSDFRKDFQFYKVREINNYHHAHDAYLNAVVGTALIKKYPKLESEFVYGDYKVYDVRKMIAKSEQEIGKATAKYFFYSNIMNFFKTEITLANGEIRKRPLIETNGETGEIVWDKGRDFATVRKVLSMPQVNIVKKTEVQTGGFSKESILPKRNSDKLIARKKDWDPKKYGGFDSPTVAYSVLVVAKVEKGKSKKLKSVKELLGITIMERSSFEKNPIDFLEAKGYKEVKKDLIIKLPKYSLFELENGRKRMLASAGELQKGNELALPSKYVNFLYLASHYEKLKGSPEDNEQKQLFVEQHKHYLDEIIEQISEFSKRVILADANLDKVLSAYNKHRDKPIREQAENIIHLFTLTNLGAPAAFKYFDTTIDRKRYTSTKEVLDATLIHQSITGLYETRIDLSQLGGDGGPAPEAAAKGGGGGMDPLQLLQPLEAEIKGTKLKAHWNSGATITCVPEAFLEDERPIQTMLIKTIHGEKQQDVYYLTFKVQGRKVEAEVLASPYDYILLNPSDVPWLMKKPLQLTVLVPLHEYQERLLQQTALPKEQKELLQKLFLKYDALWQHWENQVGHRRIKPHNIATGTLAPRPQKQYPINPKAKPSIQIVIDDLLKQGVLIQQNSTMNTPVYPVPKPDGKWRMVLDYREVNKTIPLIAAQNQHSAGILSSIYRGKYKTTLDLTNGFWAHPITPESYWLTAFTWQGKQYCWTRLPQGFLNSPALFNADVVDLLKEIPNVQAYVDDIYISHDDPQEHLEQLEKIFSILLNAGYVVSLKKSEIAQREVEFLGFNITKEGRGLTDTFKQKLLNITPPKDLKQLQSILGLLNFARNFIPNYSELVKPLYTIVAPANGKFISWTEDNSNQLQHIISVLNQADNLEERNPETRLIIKVNSSPSAGYIRYYNEGSKRPIMYVNYIFSKAEAKFTQTEKLLTTMHKGLIKAMDLAMGQEILVYSPIVSMTKIQRTPLPERKALPVRWITWMTYLEDPRIQFHYDKSLPELQQIPNVTEDVIAKTKHPSEFAMVFYTDGSAIKHPDVNKSHSAGMGIAQVQFIPEYKIVHQWSIPLGDHTAQLAEIAAVEFACKKALKISGPVLIVTDSFYVAESANKELPYWKSNGFLNNKKKPLRHVSKWKSIAECLQLKPDIIIMHEKGHQQPMTTLHTEGNNLADKLATQGSYVVHAGKRTADGSEFEKRTADGSEFESPKKKAKVE

SEQ ID NO: 7565 - protein, 2087 aa, synthetic construct
MPAAKRVKLDGGDKKYSIGLDIGTNSVGWAVITDEYKVPSKKFKVLGNTDRHSIKKNLIGALLFDSGETAEATRLKRTARRRYTRRKNRICYLQEIFSNEMAKVDDSFFHRLEESFLVEEDKKHERHPIFGNIVDEVAYHEKYPTIYHLRKKLVDSTDKADLRLIYLALAHMIKFRGHFLIEGDLNPDNSDVDKLFIQLVQTYNQLFEENPINASGVDAKAILSARLSKSRRLENLIAQLPGEKKNGLFGNLIALSLGLTPNFKSNFDLAEDAKLQLSKDTYDDDLDNLLAQIGDQYADLFLAAKNLSDAILLSDILRVNTEITKAPLSASMIKRYDEHHQDLTLLKALVRQQLPEKYKEIFFDQSKNGYAGYIDGGASQEEFYKFIKPILEKMDGTEELLVKLNREDLLRKQRTFDNGSIPHQIHLGELHAILRRQEDFYPFLKDNREKIEKILTFRIPYYVGPLARGNSRFAWMTRKSEETITPWNFEEVVDKGASAQSFIERMTNFDKNLPNEKVLPKHSLLYEYFTVYNELTKVKYVTEGMRKPAFLSGEQKKAIVDLLFKTNRKVTVKQLKEDYFKKIECFDSVEISGVEDRFNASLGTYHDLLKIIKDKDFLDNEENEDILEDIVLTLTLFEDREMIEERLKTYAHLFDDKVMKQLKRRRYTGWGRLSRKLINGIRDKQSGKTILDFLKSDGFANRNFMQLIHDDSLTFKEDIQKAQVSGQGDSLHEHIANLAGSPAIKKGILQTVKVVDELVKVMGRHKPENIVIEMARENQTTQKGQKNSRERMKRIEEGIKELGSQILKEHPVENTQLQNEKLYLYYLQNGRDMYVDQELDINRLSDYDVDHIVPQSFLKDDSIDNKVLTRSDKARGKSDNVPSEEVVKKMKNYWRQLLNAKLITQRKFDNLTKAERGGLSELDKAGFIKRQLVETRQITKHVAQILDSRMNTKYDENDKLIREVKVITLKSKLVSDFRKDFQFYKVREINNYHHAHDAYLNAVVGTALIKKYPKLESEFVYGDYKVYDVRKMIAKSEQEIGKATAKYFFYSNIMNFFKTEITLANGEIRKRPLIETNGETGEIVWDKGRDFATVRKVLSMPQVNIVKKTEVQTGGFSKESILPKRNSDKLIARKKDWDPKKYGGFDSPTVAYSVLVVAKVEKGKSKKLKSVKELLGITIMERSSFEKNPIDFLEAKGYKEVKKDLIIKLPKYSLFELENGRKRMLASAGELQKGNELALPSKYVNFLYLASHYEKLKGSPEDNEQKQLFVEQHKHYLDEIIEQISEFSKRVILADANLDKVLSAYNKHRDKPIREQAENIIHLFTLTNLGAPAAFKYFDTTIDRKRYTSTKEVLDATLIHQSITGLYETRIDLSQLGGDGGPAPEAAAKGGGGGIPWLMKKPLQLTTLVPLQEYEERLLKQTMLTGSYKEKLQSLFLKYDALWQHWENQVGHRRIKPHHIATGTVNPRPQKQYPINPKAKASIQTVINDLLKQGVLIQQNSIMNTPVYPVPKPDGKWRMVLDYREVNKTIPLIAAQNQHSAGILSSIFRGKYKTTLDLSNGFWAHSITPESYWLTAFTWLGQQYCWTRLPQGFLNSPALFTADVVDLLKEVPNVQVYVDDIYISHDDPREHLEQLEKVFSLLLNAGYVVSLKKSEIAQHEVEFLGFNITKEGRGLTETFKQKLLNITPPRDLKQLQSILGLLNFARNFIPNFSELVKPLYNIIATANGKYITWTTDNSQQLQNIISMLNSAENLEERNPEVRLIMKVNTSPSAGYIRFYNEFAKRPIMYLNYVYTKAEVKFTNTEKLLTTIHKGLIKALDLGMGQEILVYSPIVSMTKIQKTPLPERKALPIRWITWMSYLEDPRIQFHYDKTLPELQQVPTVTDDIIAKIKHPSEFSMVFYTDGSAIKHPNVNKSHNAGMGIAQVQFKPEFTVINTWSIPLGDHTAQLAEVAAVEFACKKALKIDGPVLIVTDSFYVAESVNKELPYWQSNGFFNNKKKPLKHVSKWKSIADCIQLKPDIIIIHEKGHQPTASTFHTEGNNLADKLATQGSYVVNAGKRTADGSEFEKRTADGSEFESPKKKAKVE

SEQ ID NO: 7566 - protein, 2096 aa, synthetic construct
MPAAKRVKLDGGDKKYSIGLDIGTNSVGWAVITDEYKVPSKKFKVLGNTDRHSIKKNLIGALLFDSGETAEATRLKRTARRRYTRRKNRICYLQEIFSNEMAKVDDSFFHRLEESFLVEEDKKHERHPIFGNIVDEVAYHEKYPTIYHLRKKLVDSTDKADLRLIYLALAHMIKFRGHFLIEGDLNPDNSDVDKLFIQLVQTYNQLFEENPINASGVDAKAILSARLSKSRRLENLIAQLPGEKKNGLFGNLIALSLGLTPNFKSNFDLAEDAKLQLSKDTYDDDLDNLLAQIGDQYADLFLAAKNLSDAILLSDILRVNTEITKAPLSASMIKRYDEHHQDLTLLKALVRQQLPEKYKEIFFDQSKNGYAGYIDGGASQEEFYKFIKPILEKMDGTEELLVKLNREDLLRKQRTFDNGSIPHQIHLGELHAILRRQEDFYPFLKDNREKIEKILTFRIPYYVGPLARGNSRFAWMTRKSEETITPWNFEEVVDKGASAQSFIERMTNFDKNLPNEKVLPKHSLLYEYFTVYNELTKVKYVTEGMRKPAFLSGEQKKAIVDLLFKTNRKVTVKQLKEDYFKKIECFDSVEISGVEDRFNASLGTYHDLLKIIKDKDFLDNEENEDILEDIVLTLTLFEDREMIEERLKTYAHLFDDKVMKQLKRRRYTGWGRLSRKLINGIRDKQSGKTILDFLKSDGFANRNFMQLIHDDSLTFKEDIQKAQVSGQGDSLHEHIANLAGSPAIKKGILQTVKVVDELVKVMGRHKPENIVIEMARENQTTQKGQKNSRERMKRIEEGIKELGSQILKEHPVENTQLQNEKLYLYYLQNGRDMYVDQELDINRLSDYDVDHIVPQSFLKDDSIDNKVLTRSDKARGKSDNVPSEEVVKKMKNYWRQLLNAKLITQRKFDNLTKAERGGLSELDKAGFIKRQLVETRQITKHVAQILDSRMNTKYDENDKLIREVKVITLKSKLVSDFRKDFQFYKVREINNYHHAHDAYLNAVVGTALIKKYPKLESEFVYGDYKVYDVRKMIAKSEQEIGKATAKYFFYSNIMNFFKTEITLANGEIRKRPLIETNGETGEIVWDKGRDFATVRKVLSMPQVNIVKKTEVQTGGFSKESILPKRNSDKLIARKKDWDPKKYGGFDSPTVAYSVLVVAKVEKGKSKKLKSVKELLGITIMERSSFEKNPIDFLEAKGYKEVKKDLIIKLPKYSLFELENGRKRMLASAGELQKGNELALPSKYVNFLYLASHYEKLKGSPEDNEQKQLFVEQHKHYLDEIIEQISEFSKRVILADANLDKVLSAYNKHRDKPIREQAENIIHLFTLTNLGAPAAFKYFDTTIDRKRYTSTKEVLDATLIHQSITGLYETRIDLSQLGGDGGPAPEAAAKGGGGGTLNIEDEYRLHETSKEPDVPLGSTWLSDFPQAWAETGGMGLAVRQAPLIIPLKATSTPVSIKQYPMSQEARLGIKPHIQRLLDQGILVPCQSPWNTPLLPVKKPGTNDYRPVQDLREVNKRVEDIHPTVPNPYNLLSGLPPSHQWYTVLDLKDAFFCLRLHPTSQPLFAFEWRDPEMGISGQLTWTRLPQGFKNSPTLFDEALHRDLADFRIQHPDLILLQYVDDLLLAATSEQDCQRGTRALLQTLGNLGYRASAKKAQICQKQVKYLGYLLKEGQRWLTEARKETVMGQPTPKTPRQLREFLGTAGFCRLWIPGFAEMAAPLYPLTKTGTLFNWGPDQQKAYQEIKQALLTAPALGLPDLTKPFELFVDEKQGYAKGVLTQKLGPWRRPVAYLSKKLDPVAAGWPPCLRMVAAIAVLTKDAGKLTMGQPLVILAPHAVEALVKQPPDRWLSNARMTHYQAMLLDTDRVQFGPVVALNPATLLPLPEKEAPHDCLEILAETHGTRPDLTDQPIPDADYTWYTDGSSFLQEGQRRAGAAVTTETEVIWARALPAGTSAQRAELIALTQALKMAEGKKLNVYTDSRYAFATAHVHGEIYRRRGLLTSEGREIKNKNEILALLKALFLPKRLSIIHCPGHQKGNSAEARGNRMADQAAREAAMKAVLETSTLLAGKRTADGSEFEKRTADGSEFESPKKKAKVE

SEQ ID NO: 7567 - protein, 2096 aa, synthetic construct
MPAAKRVKLDGGDKKYSIGLDIGTNSVGWAVITDEYKVPSKKFKVLGNTDRHSIKKNLIGALLFDSGETAEATRLKRTARRRYTRRKNRICYLQEIFSNEMAKVDDSFFHRLEESFLVEEDKKHERHPIFGNIVDEVAYHEKYPTIYHLRKKLVDSTDKADLRLIYLALAHMIKFRGHFLIEGDLNPDNSDVDKLFIQLVQTYNQLFEENPINASGVDAKAILSARLSKSRRLENLIAQLPGEKKNGLFGNLIALSLGLTPNFKSNFDLAEDAKLQLSKDTYDDDLDNLLAQIGDQYADLFLAAKNLSDAILLSDILRVNTEITKAPLSASMIKRYDEHHQDLTLLKALVRQQLPEKYKEIFFDQSKNGYAGYIDGGASQEEFYKFIKPILEKMDGTEELLVKLNREDLLRKQRTFDNGSIPHQIHLGELHAILRRQEDFYPFLKDNREKIEKILTFRIPYYVGPLARGNSRFAWMTRKSEETITPWNFEEVVDKGASAQSFIERMTNFDKNLPNEKVLPKHSLLYEYFTVYNELTKVKYVTEGMRKPAFLSGEQKKAIVDLLFKTNRKVTVKQLKEDYFKKIECFDSVEISGVEDRFNASLGTYHDLLKIIKDKDFLDNEENEDILEDIVLTLTLFEDREMIEERLKTYAHLFDDKVMKQLKRRRYTGWGRLSRKLINGIRDKQSGKTILDFLKSDGFANRNFMQLIHDDSLTFKEDIQKAQVSGQGDSLHEHIANLAGSPAIKKGILQTVKVVDELVKVMGRHKPENIVIEMARENQTTQKGQKNSRERMKRIEEGIKELGSQILKEHPVENTQLQNEKLYLYYLQNGRDMYVDQELDINRLSDYDVDHIVPQSFLKDDSIDNKVLTRSDKARGKSDNVPSEEVVKKMKNYWRQLLNAKLITQRKFDNLTKAERGGLSELDKAGFIKRQLVETRQITKHVAQILDSRMNTKYDENDKLIREVKVITLKSKLVSDFRKDFQFYKVREINNYHHAHDAYLNAVVGTALIKKYPKLESEFVYGDYKVYDVRKMIAKSEQEIGKATAKYFFYSNIMNFFKTEITLANGEIRKRPLIETNGETGEIVWDKGRDFATVRKVLSMPQVNIVKKTEVQTGGFSKESILPKRNSDKLIARKKDWDPKKYGGFDSPTVAYSVLVVAKVEKGKSKKLKSVKELLGITIMERSSFEKNPIDFLEAKGYKEVKKDLIIKLPKYSLFELENGRKRMLASAGELQKGNELALPSKYVNFLYLASHYEKLKGSPEDNEQKQLFVEQHKHYLDEIIEQISEFSKRVILADANLDKVLSAYNKHRDKPIREQAENIIHLFTLTNLGAPAAFKYFDTTIDRKRYTSTKEVLDATLIHQSITGLYETRIDLSQLGGDGGPAPEAAAKGGGGGTLNIEDEYRLHETSKEPDVPLGSTWLSDFPQAWAETGGMGLAVRQAPLIIPLKATSTPVSIKQYPMSQEARLGIKPHIQRLLDQGILVPCQSPWNTPLLPVKKPGTNDYRPVQDLREVNKRVEDIHPTVPNPYNLLSGLPPSHQWYTVLDLKDAFFCLRLHPTSQPLFAFEWRDPEMGISGQLTWTRLPQGFKNSPTLFNEALHRDLADFRIQHPDLILLQYVDDLLLAATSEQDCQRGTRALLQTLGNLGYRASAKKAQICQKQVKYLGYLLKEGQRWLTEARKETVMGQPTPKTPRQLREFLGTAGFCRLWIPGFAEMAAPLYPLTKPGTLFNWGPDQQKAYQEIKQALLTAPALGLPDLTKPFELFVDEKQGYAKGVLTQKLGPWRRPVAYLSKKLDPVAAGWPPCLRMVAAIAVLTKDAGKLTMGQPLVILAPHAVEALVKQPPDRWLSNARMTHYQAMLLDTDRVQFGPVVALNPATLLPLPEKEAPHDCLEILAETHGTRPDLTDQPIPDADYTWYTDGSSFLQEGQRRAGAAVTTETEVIWARALPAGTSAQRAELIALTQALKMAEGKKLNVYTDSRYAFATAHVHGEIYRRRGWLTSEGREIKNKNEILALLKALFLPKRLSIIHCPGHQKGNSAEARGNRMADQAAREAAMKAVLETSTLLAGKRTADGSEFEKRTADGSEFESPKKKAKVE

SEQ ID NO: 7568 - protein, 2096 aa, synthetic construct
MPAAKRVKLDGGDKKYSIGLDIGTNSVGWAVITDEYKVPSKKFKVLGNTDRHSIKKNLIGALLFDSGETAEATRLKRTARRRYTRRKNRICYLQEIFSNEMAKVDDSFFHRLEESFLVEEDKKHERHPIFGNIVDEVAYHEKYPTIYHLRKKLVDSTDKADLRLIYLALAHMIKFRGHFLIEGDLNPDNSDVDKLFIQLVQTYNQLFEENPINASGVDAKAILSARLSKSRRLENLIAQLPGEKKNGLFGNLIALSLGLTPNFKSNFDLAEDAKLQLSKDTYDDDLDNLLAQIGDQYADLFLAAKNLSDAILLSDILRVNTEITKAPLSASMIKRYDEHHQDLTLLKALVRQQLPEKYKEIFFDQSKNGYAGYIDGGASQEEFYKFIKPILEKMDGTEELLVKLNREDLLRKQRTFDNGSIPHQIHLGELHAILRRQEDFYPFLKDNREKIEKILTFRIPYYVGPLARGNSRFAWMTRKSEETITPWNFEEVVDKGASAQSFIERMTNFDKNLPNEKVLPKHSLLYEYFTVYNELTKVKYVTEGMRKPAFLSGEQKKAIVDLLFKTNRKVTVKQLKEDYFKKIECFDSVEISGVEDRFNASLGTYHDLLKIIKDKDFLDNEENEDILEDIVLTLTLFEDREMIEERLKTYAHLFDDKVMKQLKRRRYTGWGRLSRKLINGIRDKQSGKTILDFLKSDGFANRNFMQLIHDDSLTFKEDIQKAQVSGQGDSLHEHIANLAGSPAIKKGILQTVKVVDELVKVMGRHKPENIVIEMARENQTTQKGQKNSRERMKRIEEGIKELGSQILKEHPVENTQLQNEKLYLYYLQNGRDMYVDQELDINRLSDYDVDHIVPQSFLKDDSIDNKVLTRSDKARGKSDNVPSEEVVKKMKNYWRQLLNAKLITQRKFDNLTKAERGGLSELDKAGFIKRQLVETRQITKHVAQILDSRMNTKYDENDKLIREVKVITLKSKLVSDFRKDFQFYKVREINNYHHAHDAYLNAVVGTALIKKYPKLESEFVYGDYKVYDVRKMIAKSEQEIGKATAKYFFYSNIMNFFKTEITLANGEIRKRPLIETNGETGEIVWDKGRDFATVRKVLSMPQVNIVKKTEVQTGGFSKESILPKRNSDKLIARKKDWDPKKYGGFDSPTVAYSVLVVAKVEKGKSKKLKSVKELLGITIMERSSFEKNPIDFLEAKGYKEVKKDLIIKLPKYSLFELENGRKRMLASAGELQKGNELALPSKYVNFLYLASHYEKLKGSPEDNEQKQLFVEQHKHYLDEIIEQISEFSKRVILADANLDKVLSAYNKHRDKPIREQAENIIHLFTLTNLGAPAAFKYFDTTIDRKRYTSTKEVLDATLIHQSITGLYETRIDLSQLGGDGGPAPEAAAKGGGGGTLNIEDEYRLHETSKEPDVPLGSTWLSDFPQAWAETGGMGLAVRQAPLIIPLKATSTPVSIKQYPMSQEARLGIKPHIQRLLDQGILVPCQSPWNTPLLPVKKPGTNDYRPVQDLREVNKRVEDIHPTVPNPYNLLSGLPPSHQWYTVLDLKDAFFCLRLHPTSQPLFAFEWRDPEMGISGQLTWTRLPQGFKNSPTLFNEALHRDLADFRIQHPDLILLQYVDDLLLAATSEQDCQRGTRALLQTLGNLGYRASAKKAQICQKQVKYLGYLLKEGQRWLTEARKETVMGQPTPKTPRQLREFLGKAGFCRLFIPGFAEMAAPLYPLTKPGTLFNWGPDQQKAYQEIKQALLTAPALGLPDLTKPFELFVDEKQGYAKGVLTQKLGPWRRPVAYLSKKLDPVAAGWPPCLRMVAAIAVLTKDAGKLTMGQPLVILAPHAVEALVKQPPDRWLSNARMTHYQAMLLDTDRVQFGPVVALNPATLLPLPEKEAPHDCLEILAETHGTRPDLTDQPIPDADYTWYTDGSSFLQEGQRRAGAAVTTETEVIWARALPAGTSAQRAELIALTQALKMAEGKKLNVYTDSRYAFATAHVHGEIYRRRGWLTSEGREIKNKNEILALLKALFLPKRLSIIHCPGHQKGNSAEARGNRMADQAAREAAMKAVLETSTLLAGKRTADGSEFEKRTADGSEFESPKKKAKVE

SEQ ID NO: 7569 - protein, 2098 aa, synthetic construct
MPAAKRVKLDGGDKKYSIGLDIGTNSVGWAVITDEYKVPSKKFKVLGNTDRHSIKKNLIGALLFDSGETAEATRLKRTARRRYTRRKNRICYLQEIFSNEMAKVDDSFFHRLEESFLVEEDKKHERHPIFGNIVDEVAYHEKYPTIYHLRKKLVDSTDKADLRLIYLALAHMIKFRGHFLIEGDLNPDNSDVDKLFIQLVQTYNQLFEENPINASGVDAKAILSARLSKSRRLENLIAQLPGEKKNGLFGNLIALSLGLTPNFKSNFDLAEDAKLQLSKDTYDDDLDNLLAQIGDQYADLFLAAKNLSDAILLSDILRVNTEITKAPLSASMIKRYDEHHQDLTLLKALVRQQLPEKYKEIFFDQSKNGYAGYIDGGASQEEFYKFIKPILEKMDGTEELLVKLNREDLLRKQRTFDNGSIPHQIHLGELHAILRRQEDFYPFLKDNREKIEKILTFRIPYYVGPLARGNSRFAWMTRKSEETITPWNFEEVVDKGASAQSFIERMTNFDKNLPNEKVLPKHSLLYEYFTVYNELTKVKYVTEGMRKPAFLSGEQKKAIVDLLFKTNRKVTVKQLKEDYFKKIECFDSVEISGVEDRFNASLGTYHDLLKIIKDKDFLDNEENEDILEDIVLTLTLFEDREMIEERLKTYAHLFDDKVMKQLKRRRYTGWGRLSRKLINGIRDKQSGKTILDFLKSDGFANRNFMQLIHDDSLTFKEDIQKAQVSGQGDSLHEHIANLAGSPAIKKGILQTVKVVDELVKVMGRHKPENIVIEMARENQTTQKGQKNSRERMKRIEEGIKELGSQILKEHPVENTQLQNEKLYLYYLQNGRDMYVDQELDINRLSDYDVDHIVPQSFLKDDSIDNKVLTRSDKARGKSDNVPSEEVVKKMKNYWRQLLNAKLITQRKFDNLTKAERGGLSELDKAGFIKRQLVETRQITKHVAQILDSRMNTKYDENDKLIREVKVITLKSKLVSDFRKDFQFYKVREINNYHHAHDAYLNAVVGTALIKKYPKLESEFVYGDYKVYDVRKMIAKSEQEIGKATAKYFFYSNIMNFFKTEITLANGEIRKRPLIETNGETGEIVWDKGRDFATVRKVLSMPQVNIVKKTEVQTGGFSKESILPKRNSDKLIARKKDWDPKKYGGFDSPTVAYSVLVVAKVEKGKSKKLKSVKELLGITIMERSSFEKNPIDFLEAKGYKEVKKDLIIKLPKYSLFELENGRKRMLASAGELQKGNELALPSKYVNFLYLASHYEKLKGSPEDNEQKQLFVEQHKHYLDEIIEQISEFSKRVILADANLDKVLSAYNKHRDKPIREQAENIIHLFTLTNLGAPAAFKYFDTTIDRKRYTSTKEVLDATLIHQSITGLYETRIDLSQLGGDGGGSSEAAAKPAPGGTAPLEEEYRLFLEAPIQNVTLLEQWKREIPKVWAEINPPGLASTQAPIHVQLLSTALPVRVRQYPITLEAKRSLRETIRKFRAAGILRPVHSPWNTPLLPVRKSGTSEYRMVQDLREVNKRVETIHPTVPNPYTLLSLLPPDRIWYSVLDLKDAFFCIPLAPESQLIFAFEWADAEEGESGQLTWTRLPQGFKNSPTLFNEALNRDLQGFRLDHPSVSLLQYVDDLLIAADTQAACLSATRDLLMTLAELGYRVSGKKAQLCQEEVTYLGFKIHKGSRSLSNSRTQAILQIPVPKTKRQVREFLGTIGYCRLWIPGFAELAQPLYAATRPGNDPLVWGEKEEEAFQSLKLALTQPPALALPSLDKPFQLFVEETSGAAKGVLTQALGPWKRPVAYLSKRLDPVAAGWPRCLRAIAAAALLTREASKLTFGQDIEITSSHNLESLLRSPPDKWLTNARITQYQVLLLDPPRVRFKQTAALNPATLLPETDDTLPIHHCLDTLDSLTSTRPDLTDQPLAQAEATLFTDGSSYIRDGKRYAGAAVVTLDSVIWAEPLPIGTSAQKAELIALTKALEWSKDKSVNIYTDSRYAFATLHVHGMIYRERGWLTAGGKAIKNAPEILALLTAVWLPKRVAVMHCKGHQKDDAPTSTGNRRADEVAREVAIRPLSTQATISAGKRTADGSEFEKRTADGSEFESPKKKAKVE

SEQ ID NO: 7570 - protein, 2102 aa, synthetic construct
MPAAKRVKLDGGDKKYSIGLDIGTNSVGWAVITDEYKVPSKKFKVLGNTDRHSIKKNLIGALLFDSGETAEATRLKRTARRRYTRRKNRICYLQEIFSNEMAKVDDSFFHRLEESFLVEEDKKHERHPIFGNIVDEVAYHEKYPTIYHLRKKLVDSTDKADLRLIYLALAHMIKFRGHFLIEGDLNPDNSDVDKLFIQLVQTYNQLFEENPINASGVDAKAILSARLSKSRRLENLIAQLPGEKKNGLFGNLIALSLGLTPNFKSNFDLAEDAKLQLSKDTYDDDLDNLLAQIGDQYADLFLAAKNLSDAILLSDILRVNTEITKAPLSASMIKRYDEHHQDLTLLKALVRQQLPEKYKEIFFDQSKNGYAGYIDGGASQEEFYKFIKPILEKMDGTEELLVKLNREDLLRKQRTFDNGSIPHQIHLGELHAILRRQEDFYPFLKDNREKIEKILTFRIPYYVGPLARGNSRFAWMTRKSEETITPWNFEEVVDKGASAQSFIERMTNFDKNLPNEKVLPKHSLLYEYFTVYNELTKVKYVTEGMRKPAFLSGEQKKAIVDLLFKTNRKVTVKQLKEDYFKKIECFDSVEISGVEDRFNASLGTYHDLLKIIKDKDFLDNEENEDILEDIVLTLTLFEDREMIEERLKTYAHLFDDKVMKQLKRRRYTGWGRLSRKLINGIRDKQSGKTILDFLKSDGFANRNFMQLIHDDSLTFKEDIQKAQVSGQGDSLHEHIANLAGSPAIKKGILQTVKVVDELVKVMGRHKPENIVIEMARENQTTQKGQKNSRERMKRIEEGIKELGSQILKEHPVENTQLQNEKLYLYYLQNGRDMYVDQELDINRLSDYDVDHIVPQSFLKDDSIDNKVLTRSDKARGKSDNVPSEEVVKKMKNYWRQLLNAKLITQRKFDNLTKAERGGLSELDKAGFIKRQLVETRQITKHVAQILDSRMNTKYDENDKLIREVKVITLKSKLVSDFRKDFQFYKVREINNYHHAHDAYLNAVVGTALIKKYPKLESEFVYGDYKVYDVRKMIAKSEQEIGKATAKYFFYSNIMNFFKTEITLANGEIRKRPLIETNGETGEIVWDKGRDFATVRKVLSMPQVNIVKKTEVQTGGFSKESILPKRNSDKLIARKKDWDPKKYGGFDSPTVAYSVLVVAKVEKGKSKKLKSVKELLGITIMERSSFEKNPIDFLEAKGYKEVKKDLIIKLPKYSLFELENGRKRMLASAGELQKGNELALPSKYVNFLYLASHYEKLKGSPEDNEQKQLFVEQHKHYLDEIIEQISEFSKRVILADANLDKVLSAYNKHRDKPIREQAENIIHLFTLTNLGAPAAFKYFDTTIDRKRYTSTKEVLDATLIHQSITGLYETRIDLSQLGGDGGGSSEAAAKPAPGGTVSLQDEHRLFDIPVTTSLPDVWLQDFPQAWAETGGLGRAKCQAPIIIDLKPTAVPVSIKQYPMSLEAHMGIRQHIIKFLELGVLRPCRSPWNTPLLPVKKPGTQDYRPVQDLREINKRTVDIHPTVPNPYNLLSTLKPDYSWYTVLDLKDAFFCLPLAPQSQELFAFEWKDPERGISGQLTWTRLPQGFKNSPTLFNEALHRDLTDFRTQHPEVTLLQYVDDLLLAAPTKKACTQGTRHLLQELGEKGYRASAKKAQICQTKVTYLGYILSEGKRWLTPGRIETVARIPPPRNPREVREFLGTAGFCRLWIPGFAELAAPLYALTKPSTPFTWQTEHQLAFEALKKALLSAPALGLPDTSKPFTLFLDERQGIAKGVLTQKLGPWKRPVAYLSKKLDPVAAGWPPCLRIMAATAMLVKDSAKLTLGQPLTVITPHTLEAIVRQPPDRWITNARLTHYQALLLDTDRVQFGPPVTLNPATLLPVPENQPSPHDCRQVLAETHGTREDLKDQELPDADHTWYTDGSSYLDSGTRRAGAAVVDGHNTIWAQSLPPGTSAQKAELIALTKALELSKGKKANIYTDSRYAFATAHTHGSIYERRGWLTSEGKEIKNKAEIIALLKALFLPQEVAIIHCPGHQKGQDPVAVGNRQADRVARQAAMAEVLTLATEPDNTSHITAGKRTADGSEFEKRTADGSEFESPKKKAKVE

SEQ ID NO: 7571 - protein, 2173 aa, synthetic construct
MPAAKRVKLDGGDKKYSIGLDIGTNSVGWAVITDEYKVPSKKFKVLGNTDRHSIKKNLIGALLFDSGETAEATRLKRTARRRYTRRKNRICYLQEIFSNEMAKVDDSFFHRLEESFLVEEDKKHERHPIFGNIVDEVAYHEKYPTIYHLRKKLVDSTDKADLRLIYLALAHMIKFRGHFLIEGDLNPDNSDVDKLFIQLVQTYNQLFEENPINASGVDAKAILSARLSKSRRLENLIAQLPGEKKNGLFGNLIALSLGLTPNFKSNFDLAEDAKLQLSKDTYDDDLDNLLAQIGDQYADLFLAAKNLSDAILLSDILRVNTEITKAPLSASMIKRYDEHHQDLTLLKALVRQQLPEKYKEIFFDQSKNGYAGYIDGGASQEEFYKFIKPILEKMDGTEELLVKLNREDLLRKQRTFDNGSIPHQIHLGELHAILRRQEDFYPFLKDNREKIEKILTFRIPYYVGPLARGNSRFAWMTRKSEETITPWNFEEVVDKGASAQSFIERMTNFDKNLPNEKVLPKHSLLYEYFTVYNELTKVKYVTEGMRKPAFLSGEQKKAIVDLLFKTNRKVTVKQLKEDYFKKIECFDSVEISGVEDRFNASLGTYHDLLKIIKDKDFLDNEENEDILEDIVLTLTLFEDREMIEERLKTYAHLFDDKVMKQLKRRRYTGWGRLSRKLINGIRDKQSGKTILDFLKSDGFANRNFMQLIHDDSLTFKEDIQKAQVSGQGDSLHEHIANLAGSPAIKKGILQTVKVVDELVKVMGRHKPENIVIEMARENQTTQKGQKNSRERMKRIEEGIKELGSQILKEHPVENTQLQNEKLYLYYLQNGRDMYVDQELDINRLSDYDVDHIVPQSFLKDDSIDNKVLTRSDKARGKSDNVPSEEVVKKMKNYWRQLLNAKLITQRKFDNLTKAERGGLSELDKAGFIKRQLVETRQITKHVAQILDSRMNTKYDENDKLIREVKVITLKSKLVSDFRKDFQFYKVREINNYHHAHDAYLNAVVGTALIKKYPKLESEFVYGDYKVYDVRKMIAKSEQEIGKATAKYFFYSNIMNFFKTEITLANGEIRKRPLIETNGETGEIVWDKGRDFATVRKVLSMPQVNIVKKTEVQTGGFSKESILPKRNSDKLIARKKDWDPKKYGGFDSPTVAYSVLVVAKVEKGKSKKLKSVKELLGITIMERSSFEKNPIDFLEAKGYKEVKKDLIIKLPKYSLFELENGRKRMLASAGELQKGNELALPSKYVNFLYLASHYEKLKGSPEDNEQKQLFVEQHKHYLDEIIEQISEFSKRVILADANLDKVLSAYNKHRDKPIREQAENIIHLFTLTNLGAPAAFKYFDTTIDRKRYTSTKEVLDATLIHQSITGLYETRIDLSQLGGDGGGSSEAAAKPAPGGMDLLKPLTVERKGVKIKGYWNSQADITCVPKDLLQGEEPVRQQNVTTIHGTQEGDVYYVNLKIDGRRINTEVIGTTLDYAIITPGDVPWILKKPLELTIKLDLEEQQGTLLNNSILSKKGKEELKQLFEKYSALWQSWENQVGHRRIRPHKIATGTVKPTPQKQYHINPKAKPDIQIVINDLLKQGVLIQKESTMNTPVYPVPKPNGRWRMVLDYRAVNKVTPLIAVQNQHSYGILGSLFKGRYKTTIDLSNGFWAHPIVPEDYWITAFTWQGKQYCWTVLPQGFLNSPGLFNGDVVDLLQGIPNVEVYVDDVYISHDSEKEHLEYLDILFNRLKEAGYIISLKKSNIANSIVDFLGFQITNEGRGLTDTFKEKLENITAPTTLKQLQSILGLLNFARNFIPDFTELIAPLYALIPKSPKNYVPWQIEHSTTLETLITKLNGAEYLQGRKGDKTLIMKVNASYTTGYIRYYNEGEKKPISYVSIVFSKTELKFTELEKLLTTVHKGLLKALDLSMGQNIHVYSPIVSMQNIQKTPQTAKKALASRWLSWLSYLEDPRIRFFYDPQMPALKDLPAVDTGKDNKKHPSNFQHIFYTDGSAITSPTKEGHLNAGMGIVYFINKDGNLQKQQEWSISLGNHTAQFAEIAAFEFALKKCLPLGGNILVVTDSNYVAKAYNEELDVWASNGFVNNRKKPLKHISKWKSVADLKRLRPDVVVTHEPGHQKLDSSPHAYGNNLADQLATQASFKVHAGKRTADGSEFEKRTADGSEFESPKKKAKVE

SEQ ID NO: 7572 - protein, 2095 aa, synthetic construct
MPAAKRVKLDGGDKKYSIGLDIGTNSVGWAVITDEYKVPSKKFKVLGNTDRHSIKKNLIGALLFDSGETAEATRLKRTARRRYTRRKNRICYLQEIFSNEMAKVDDSFFHRLEESFLVEEDKKHERHPIFGNIVDEVAYHEKYPTIYHLRKKLVDSTDKADLRLIYLALAHMIKFRGHFLIEGDLNPDNSDVDKLFIQLVQTYNQLFEENPINASGVDAKAILSARLSKSRRLENLIAQLPGEKKNGLFGNLIALSLGLTPNFKSNFDLAEDAKLQLSKDTYDDDLDNLLAQIGDQYADLFLAAKNLSDAILLSDILRVNTEITKAPLSASMIKRYDEHHQDLTLLKALVRQQLPEKYKEIFFDQSKNGYAGYIDGGASQEEFYKFIKPILEKMDGTEELLVKLNREDLLRKQRTFDNGSIPHQIHLGELHAILRRQEDFYPFLKDNREKIEKILTFRIPYYVGPLARGNSRFAWMTRKSEETITPWNFEEVVDKGASAQSFIERMTNFDKNLPNEKVLPKHSLLYEYFTVYNELTKVKYVTEGMRKPAFLSGEQKKAIVDLLFKTNRKVTVKQLKEDYFKKIECFDSVEISGVEDRFNASLGTYHDLLKIIKDKDFLDNEENEDILEDIVLTLTLFEDREMIEERLKTYAHLFDDKVMKQLKRRRYTGWGRLSRKLINGIRDKQSGKTILDFLKSDGFANRNFMQLIHDDSLTFKEDIQKAQVSGQGDSLHEHIANLAGSPAIKKGILQTVKVVDELVKVMGRHKPENIVIEMARENQTTQKGQKNSRERMKRIEEGIKELGSQILKEHPVENTQLQNEKLYLYYLQNGRDMYVDQELDINRLSDYDVDHIVPQSFLKDDSIDNKVLTRSDKARGKSDNVPSEEVVKKMKNYWRQLLNAKLITQRKFDNLTKAERGGLSELDKAGFIKRQLVETRQITKHVAQILDSRMNTKYDENDKLIREVKVITLKSKLVSDFRKDFQFYKVREINNYHHAHDAYLNAVVGTALIKKYPKLESEFVYGDYKVYDVRKMIAKSEQEIGKATAKYFFYSNIMNFFKTEITLANGEIRKRPLIETNGETGEIVWDKGRDFATVRKVLSMPQVNIVKKTEVQTGGFSKESILPKRNSDKLIARKKDWDPKKYGGFDSPTVAYSVLVVAKVEKGKSKKLKSVKELLGITIMERSSFEKNPIDFLEAKGYKEVKKDLIIKLPKYSLFELENGRKRMLASAGELQKGNELALPSKYVNFLYLASHYEKLKGSPEDNEQKQLFVEQHKHYLDEIIEQISEFSKRVILADANLDKVLSAYNKHRDKPIREQAENIIHLFTLTNLGAPAAFKYFDTTIDRKRYTSTKEVLDATLIHQSITGLYETRIDLSQLGGDGGGSSEAAAKPAPGGTLQLEEEYRLFEPESTQKQEMDIWLKNFPQAWAETGGMGTAHCQAPVLIQLKATATPISIRQYPMPHEAYQGIKPHIRRMLDQGILKPCQSPWNTPLLPVKKPGTEDYRPVQDLREVNKRVEDIHPTVPNPYNLLSTLPPSHPWYTVLDLKDAFFCLRLHSESQLLFAFEWRDPEIGLSGQLTWTRLPQGFKNSPTLFNEALHSDLADFRVRYPALVLLQYVDDLLLAAATRTECLEGTKALLETLGNKGYRASAKKAQICLQEVTYLGYSLKDGQRWLTKARKEAILSIPVPKNSRQVREFLGTAGYCRLWIPGFAELAAPLYPLTRPGTLFQWGTEQQLAFEDIKKALLSSPALGLPDITKPFELFIDENSGFAKGVLVQKLGPWKRPVAYLSKKLDTVASGWPPCLRMVAAIAILVKDAGKLTLGQPLTILTSHPVEALVRQPPNKWLSNARMTHYQAMLLDAERVHFGPTVSLNPATLLPLPSGGNHHDCLQILAETHGTRPDLTDQPLPDADLTWYTDGSSFIRNGEREAGAAVTTESEVIWAAPLPPGTSAQRAELIALTQALKMAEGKKLTVYTDSRYAFATTHVHGEIYRRRGWLTSEGKEIKNKNEILALLEALFLPKRLSIIHCPGHQKGDSPQAKGNRLADDTAKKAATETHSSLTVLPAGKRTADGSEFEKRTADGSEFESPKKKAKVE

SEQ ID NO: 7573 - protein, 2087 aa, synthetic construct
MPAAKRVKLDGGDKKYSIGLDIGTNSVGWAVITDEYKVPSKKFKVLGNTDRHSIKKNLIGALLFDSGETAEATRLKRTARRRYTRRKNRICYLQEIFSNEMAKVDDSFFHRLEESFLVEEDKKHERHPIFGNIVDEVAYHEKYPTIYHLRKKLVDSTDKADLRLIYLALAHMIKFRGHFLIEGDLNPDNSDVDKLFIQLVQTYNQLFEENPINASGVDAKAILSARLSKSRRLENLIAQLPGEKKNGLFGNLIALSLGLTPNFKSNFDLAEDAKLQLSKDTYDDDLDNLLAQIGDQYADLFLAAKNLSDAILLSDILRVNTEITKAPLSASMIKRYDEHHQDLTLLKALVRQQLPEKYKEIFFDQSKNGYAGYIDGGASQEEFYKFIKPILEKMDGTEELLVKLNREDLLRKQRTFDNGSIPHQIHLGELHAILRRQEDFYPFLKDNREKIEKILTFRIPYYVGPLARGNSRFAWMTRKSEETITPWNFEEVVDKGASAQSFIERMTNFDKNLPNEKVLPKHSLLYEYFTVYNELTKVKYVTEGMRKPAFLSGEQKKAIVDLLFKTNRKVTVKQLKEDYFKKIECFDSVEISGVEDRFNASLGTYHDLLKIIKDKDFLDNEENEDILEDIVLTLTLFEDREMIEERLKTYAHLFDDKVMKQLKRRRYTGWGRLSRKLINGIRDKQSGKTILDFLKSDGFANRNFMQLIHDDSLTFKEDIQKAQVSGQGDSLHEHIANLAGSPAIKKGILQTVKVVDELVKVMGRHKPENIVIEMARENQTTQKGQKNSRERMKRIEEGIKELGSQILKEHPVENTQLQNEKLYLYYLQNGRDMYVDQELDINRLSDYDVDHIVPQSFLKDDSIDNKVLTRSDKARGKSDNVPSEEVVKKMKNYWRQLLNAKLITQRKFDNLTKAERGGLSELDKAGFIKRQLVETRQITKHVAQILDSRMNTKYDENDKLIREVKVITLKSKLVSDFRKDFQFYKVREINNYHHAHDAYLNAVVGTALIKKYPKLESEFVYGDYKVYDVRKMIAKSEQEIGKATAKYFFYSNIMNFFKTEITLANGEIRKRPLIETNGETGEIVWDKGRDFATVRKVLSMPQVNIVKKTEVQTGGFSKESILPKRNSDKLIARKKDWDPKKYGGFDSPTVAYSVLVVAKVEKGKSKKLKSVKELLGITIMERSSFEKNPIDFLEAKGYKEVKKDLIIKLPKYSLFELENGRKRMLASAGELQKGNELALPSKYVNFLYLASHYEKLKGSPEDNEQKQLFVEQHKHYLDEIIEQISEFSKRVILADANLDKVLSAYNKHRDKPIREQAENIIHLFTLTNLGAPAAFKYFDTTIDRKRYTSTKEVLDATLIHQSITGLYETRIDLSQLGGDGGGSSEAAAKPAPGGVPWLTQQPLQLTILVPLQEYQEKILSKTALPEDQKQQLKTLFVKYDNLWQHWENQVGHRKIRPHNIATGDYPPRPQKQYPINPKAKPSIQIVIDDLLKQGVLTPQNSTMNTPVYPVPKPDGRWRMVLDYREVNKTIPLTAAQNQHSAGILATIVRQKYKTTLDLANGFWAHPITPESYWLTAFTWQGKQYCWTRLPQGFLNSPALFNADVVDLLKEIPNVQVYVDDIYLSHDDPKEHVQQLEKVFQILLQAGYVVSLKKSEIGQKTVEFLGFNITKEGRGLTDTFKTKLLNITPPKDLKQLQSILGKLNFARNFIPNFAELVQPLYNLIAPAKGKYIEWSEENTKQLNMVIEALNTASNLEERLPEQRLVIKVNTSPSAGYVRYYNETGKKPIMYLNYVFSKAELKFSMLEKLLTTMHKALIKAMDLAMGQEILVYSPIVSMTKIQKTPLPERKALPIRWITWMTYLEDPRIQFHYDKTLPELKHIPDVYTSSQSPVKHPSQYEGVFYTDGSAIKSPDPTKSNNAGMGIVHATYKPEYQVLNQWSIPLGNHTAQMAEIAAVEFACKKALKIPGPVLVITDSFYVAESANKELPYWKSNGFVNNKKKPLKHISKWKSIAECLSMKPDITIQHEKGISLQIPVFILKGNALADKLATQGSYVVNAGKRTADGSEFEKRTADGSEFESPKKKAKVE

SEQ ID NO: 7574 - protein, 2127 aa, synthetic construct
MPAAKRVKLDGGDKKYSIGLDIGTNSVGWAVITDEYKVPSKKFKVLGNTDRHSIKKNLIGALLFDSGETAEATRLKRTARRRYTRRKNRICYLQEIFSNEMAKVDDSFFHRLEESFLVEEDKKHERHPIFGNIVDEVAYHEKYPTIYHLRKKLVDSTDKADLRLIYLALAHMIKFRGHFLIEGDLNPDNSDVDKLFIQLVQTYNQLFEENPINASGVDAKAILSARLSKSRRLENLIAQLPGEKKNGLFGNLIALSLGLTPNFKSNFDLAEDAKLQLSKDTYDDDLDNLLAQIGDQYADLFLAAKNLSDAILLSDILRVNTEITKAPLSASMIKRYDEHHQDLTLLKALVRQQLPEKYKEIFFDQSKNGYAGYIDGGASQEEFYKFIKPILEKMDGTEELLVKLNREDLLRKQRTFDNGSIPHQIHLGELHAILRRQEDFYPFLKDNREKIEKILTFRIPYYVGPLARGNSRFAWMTRKSEETITPWNFEEVVDKGASAQSFIERMTNFDKNLPNEKVLPKHSLLYEYFTVYNELTKVKYVTEGMRKPAFLSGEQKKAIVDLLFKTNRKVTVKQLKEDYFKKIECFDSVEISGVEDRFNASLGTYHDLLKIIKDKDFLDNEENEDILEDIVLTLTLFEDREMIEERLKTYAHLFDDKVMKQLKRRRYTGWGRLSRKLINGIRDKQSGKTILDFLKSDGFANRNFMQLIHDDSLTFKEDIQKAQVSGQGDSLHEHIANLAGSPAIKKGILQTVKVVDELVKVMGRHKPENIVIEMARENQTTQKGQKNSRERMKRIEEGIKELGSQILKEHPVENTQLQNEKLYLYYLQNGRDMYVDQELDINRLSDYDVDHIVPQSFLKDDSIDNKVLTRSDKARGKSDNVPSEEVVKKMKNYWRQLLNAKLITQRKFDNLTKAERGGLSELDKAGFIKRQLVETRQITKHVAQILDSRMNTKYDENDKLIREVKVITLKSKLVSDFRKDFQFYKVREINNYHHAHDAYLNAVVGTALIKKYPKLESEFVYGDYKVYDVRKMIAKSEQEIGKATAKYFFYSNIMNFFKTEITLANGEIRKRPLIETNGETGEIVWDKGRDFATVRKVLSMPQVNIVKKTEVQTGGFSKESILPKRNSDKLIARKKDWDPKKYGGFDSPTVAYSVLVVAKVEKGKSKKLKSVKELLGITIMERSSFEKNPIDFLEAKGYKEVKKDLIIKLPKYSLFELENGRKRMLASAGELQKGNELALPSKYVNFLYLASHYEKLKGSPEDNEQKQLFVEQHKHYLDEIIEQISEFSKRVILADANLDKVLSAYNKHRDKPIREQAENIIHLFTLTNLGAPAAFKYFDTTIDRKRYTSTKEVLDATLIHQSITGLYETRIDLSQLGGDGGGSSEAAAKPAPGGLLGRDLLTKLKAQIQFSTEGPQVTWEDRPAMCLVLNLEEEYRLHEKPVPPSIDPSWLQLFPMVWAEKAGMGLANQVPPVVVELKSDASPVAVRQYPMSKEAREGIRPHIQRFLDLGILVPCQSPWNTPLLPVKKPGTNDYRPVQDLREVNKRVQDIHPTVPNPYNLLSSLPPSHTWYSVLDLKDAFFCLKLHPNSQPLFAFEWRDPEKGNTGQLTWTRLPQGFKNSPTLFNEALHRDLASFRALNPQVVMLQYVDDLLVAAPTYRDCKEGTRRLLQELSKLGYRVSAKKAQLCREEVTYLGYLLKGGKRWLTPARKATVMKIPTPTTPRQVREFLGTAGFCRLWIPGFASLAAPLYPLTRPKVPFTWTEAHQEAFGRIKEALLSAPALALPDLTKPFALYVDEKEGVARGVLTQTLGPWRRPVAYLSKKLDPVASGWPTCLKAIAAVALLLKDADKLTLGQNVLVIAPHNLESIVRQPPDRWMTNARMTHYQSLLLNERVSFAPPAILNPATLLPVESDDTPIHICSEILAEETGTRPDLRDQPLPGVPAWYTDGSSFIMDGRRQAGAAIVDNKRTVWASNLPEGTSAQKAELIALTQALRLAEGKSINIYTDSRYAFATAHVHGAIYKQRGWLTSAGKDIKNKEEILALLEAIHLPKRVAIIHCPGHQRGTDPVATGNRKADEAAKQAAQSTRILTETTKNAGKRTADGSEFEKRTADGSEFESPKKKAKVE

SEQ ID NO: 7575 - protein, 2218 aa, synthetic construct
MPAAKRVKLDGGDKKYSIGLDIGTNSVGWAVITDEYKVPSKKFKVLGNTDRHSIKKNLIGALLFDSGETAEATRLKRTARRRYTRRKNRICYLQEIFSNEMAKVDDSFFHRLEESFLVEEDKKHERHPIFGNIVDEVAYHEKYPTIYHLRKKLVDSTDKADLRLIYLALAHMIKFRGHFLIEGDLNPDNSDVDKLFIQLVQTYNQLFEENPINASGVDAKAILSARLSKSRRLENLIAQLPGEKKNGLFGNLIALSLGLTPNFKSNFDLAEDAKLQLSKDTYDDDLDNLLAQIGDQYADLFLAAKNLSDAILLSDILRVNTEITKAPLSASMIKRYDEHHQDLTLLKALVRQQLPEKYKEIFFDQSKNGYAGYIDGGASQEEFYKFIKPILEKMDGTEELLVKLNREDLLRKQRTFDNGSIPHQIHLGELHAILRRQEDFYPFLKDNREKIEKILTFRIPYYVGPLARGNSRFAWMTRKSEETITPWNFEEVVDKGASAQSFIERMTNFDKNLPNEKVLPKHSLLYEYFTVYNELTKVKYVTEGMRKPAFLSGEQKKAIVDLLFKTNRKVTVKQLKEDYFKKIECFDSVEISGVEDRFNASLGTYHDLLKIIKDKDFLDNEENEDILEDIVLTLTLFEDREMIEERLKTYAHLFDDKVMKQLKRRRYTGWGRLSRKLINGIRDKQSGKTILDFLKSDGFANRNFMQLIHDDSLTFKEDIQKAQVSGQGDSLHEHIANLAGSPAIKKGILQTVKVVDELVKVMGRHKPENIVIEMARENQTTQKGQKNSRERMKRIEEGIKELGSQILKEHPVENTQLQNEKLYLYYLQNGRDMYVDQELDINRLSDYDVDHIVPQSFLKDDSIDNKVLTRSDKARGKSDNVPSEEVVKKMKNYWRQLLNAKLITQRKFDNLTKAERGGLSELDKAGFIKRQLVETRQITKHVAQILDSRMNTKYDENDKLIREVKVITLKSKLVSDFRKDFQFYKVREINNYHHAHDAYLNAVVGTALIKKYPKLESEFVYGDYKVYDVRKMIAKSEQEIGKATAKYFFYSNIMNFFKTEITLANGEIRKRPLIETNGETGEIVWDKGRDFATVRKVLSMPQVNIVKKTEVQTGGFSKESILPKRNSDKLIARKKDWDPKKYGGFDSPTVAYSVLVVAKVEKGKSKKLKSVKELLGITIMERSSFEKNPIDFLEAKGYKEVKKDLIIKLPKYSLFELENGRKRMLASAGELQKGNELALPSKYVNFLYLASHYEKLKGSPEDNEQKQLFVEQHKHYLDEIIEQISEFSKRVILADANLDKVLSAYNKHRDKPIREQAENIIHLFTLTNLGAPAAFKYFDTTIDRKRYTSTKEVLDATLIHQSITGLYETRIDLSQLGGDGGGSSEAAAKPAPGGTLGDQGSRGSDPLPEPRVTLTVEGIPTEFLVNTGAEHSVLTKPMGKMGSKRTVVAGATGSKVYPWTTKRLLKIGQKQVTHSFLVIPECPAPLLGRDLLTKLKAQIQFSTEGPQVTWEDRPAMCLVLNLEEEYRLHEKPVPPSIDPSWLQLFPMVWAEKAGMGLANQVPPVVVELKSDASPVAVRQYPMSKEAREGIRPHIQRFLDLGILVPCQSPWNTPLLPVKKPGTNDYRPVQDLREVNKRVQDIHPTVPNPYNLLSSLPPSHTWYSVLDLKDAFFCLKLHPNSQPLFAFEWRDPEKGNTGQLTWTRLPQGFKNSPTLFNEALHRDLASFRALNPQVVMLQYVDDLLVAAPTYRDCKEGTRRLLQELSKLGYRVSAKKAQLCREEVTYLGYLLKGGKRWLTPARKATVMKIPTPTTPRQVREFLGTAGFCRLWIPGFASLAAPLYPLTRPKVPFTWTEAHQEAFGRIKEALLSAPALALPDLTKPFALYVDEKEGVARGVLTQTLGPWRRPVAYLSKKLDPVASGWPTCLKAIAAVALLLKDADKLTLGQNVLVIAPHNLESIVRQPPDRWMTNARMTHYQSLLLNERVSFAPPAILNPATLLPVESDDTPIHICSEILAEETGTRPDLRDQPLPGVPAWYTDGSSFIMDGRRQAGAAIVDNKRTVWASNLPEGTSAQKAELIALTQALRLAEGKSINIYTDSRYAFATAHVHGAIYKQRGWLTSAGKDIKNKEEILALLEAIHLPKRVAIIHCPGHQRGTDPVATGNRKADEAAKQAAQSTRILTETTKNAGKRTADGSEFEKRTADGSEFESPKKKAKVE

SEQ ID NO: 7576 - protein, 2218 aa, synthetic construct
MPAAKRVKLDGGDKKYSIGLDIGTNSVGWAVITDEYKVPSKKFKVLGNTDRHSIKKNLIGALLFDSGETAEATRLKRTARRRYTRRKNRICYLQEIFSNEMAKVDDSFFHRLEESFLVEEDKKHERHPIFGNIVDEVAYHEKYPTIYHLRKKLVDSTDKADLRLIYLALAHMIKFRGHFLIEGDLNPDNSDVDKLFIQLVQTYNQLFEENPINASGVDAKAILSARLSKSRRLENLIAQLPGEKKNGLFGNLIALSLGLTPNFKSNFDLAEDAKLQLSKDTYDDDLDNLLAQIGDQYADLFLAAKNLSDAILLSDILRVNTEITKAPLSASMIKRYDEHHQDLTLLKALVRQQLPEKYKEIFFDQSKNGYAGYIDGGASQEEFYKFIKPILEKMDGTEELLVKLNREDLLRKQRTFDNGSIPHQIHLGELHAILRRQEDFYPFLKDNREKIEKILTFRIPYYVGPLARGNSRFAWMTRKSEETITPWNFEEVVDKGASAQSFIERMTNFDKNLPNEKVLPKHSLLYEYFTVYNELTKVKYVTEGMRKPAFLSGEQKKAIVDLLFKTNRKVTVKQLKEDYFKKIECFDSVEISGVEDRFNASLGTYHDLLKIIKDKDFLDNEENEDILEDIVLTLTLFEDREMIEERLKTYAHLFDDKVMKQLKRRRYTGWGRLSRKLINGIRDKQSGKTILDFLKSDGFANRNFMQLIHDDSLTFKEDIQKAQVSGQGDSLHEHIANLAGSPAIKKGILQTVKVVDELVKVMGRHKPENIVIEMARENQTTQKGQKNSRERMKRIEEGIKELGSQILKEHPVENTQLQNEKLYLYYLQNGRDMYVDQELDINRLSDYDVDHIVPQSFLKDDSIDNKVLTRSDKARGKSDNVPSEEVVKKMKNYWRQLLNAKLITQRKFDNLTKAERGGLSELDKAGFIKRQLVETRQITKHVAQILDSRMNTKYDENDKLIREVKVITLKSKLVSDFRKDFQFYKVREINNYHHAHDAYLNAVVGTALIKKYPKLESEFVYGDYKVYDVRKMIAKSEQEIGKATAKYFFYSNIMNFFKTEITLANGEIRKRPLIETNGETGEIVWDKGRDFATVRKVLSMPQVNIVKKTEVQTGGFSKESILPKRNSDKLIARKKDWDPKKYGGFDSPTVAYSVLVVAKVEKGKSKKLKSVKELLGITIMERSSFEKNPIDFLEAKGYKEVKKDLIIKLPKYSLFELENGRKRMLASAGELQKGNELALPSKYVNFLYLASHYEKLKGSPEDNEQKQLFVEQHKHYLDEIIEQISEFSKRVILADANLDKVLSAYNKHRDKPIREQAENIIHLFTLTNLGAPAAFKYFDTTIDRKRYTSTKEVLDATLIHQSITGLYETRIDLSQLGGDGGGSSEAAAKPAPGGTLGDQGSRGSDPLPEPRVTLTVEGIPTEFLVNTGAEHSVLTKPMGKMGSKRTVVAGATGSKVYPWTTKRLLKIGQKQVTHSFLVIPECPAPLLGRDLLTKLKAQIQFSTEGPQVTWEDRPAMCLVLNLEEEYRLHEKPVPPSIDPSWLQLFPMVWAEKAGMGLANQVPPVVVELKSDASPVAVRQYPMSKEAREGIRPHIQRFLDLGILVPCQSPWNTPLLPVKKPGTNDYRPVQDLREVNKRVQDIHPTVPNPYNLLSSLPPSHTWYSVLDLKDAFFCLKLHPNSQPLFAFEWRDPEKGNTGQLTWTRLPQGFKNSPTLFNEALHRDLASFRALNPQVVMLQYVDDLLVAAPTYRDCKEGTRRLLQELSKLGYRVSAKKAQLCREEVTYLGYLLKGGKRWLTPARKATVMKIPTPTTPRQVREFLGKAGFCRLFIPGFASLAAPLYPLTRPKVPFTWTEAHQEAFGRIKEALLSAPALALPDLTKPFALYVDEKEGVARGVLTQTLGPWRRPVAYLSKKLDPVASGWPTCLKAIAAVALLLKDADKLTLGQNVLVIAPHNLESIVRQPPDRWMTNARMTHYQSLLLNERVSFAPPAILNPATLLPVESDDTPIHICSEILAEETGTRPDLRDQPLPGVPAWYTDGSSFIMDGRRQAGAAIVDNKRTVWASNLPEGTSAQKAELIALTQALRLAEGKSINIYTDSRYAFATAHVHGAIYKQRGWLTSAGKDIKNKEEILALLEAIHLPKRVAIIHCPGHQRGTDPVATGNRKADEAAKQAAQSTRILTETTKNAGKRTADGSEFEKRTADGSEFESPKKKAKVE

SEQ ID NO: 7577 - protein, 2096 aa, synthetic construct
MPAAKRVKLDGGDKKYSIGLDIGTNSVGWAVITDEYKVPSKKFKVLGNTDRHSIKKNLIGALLFDSGETAEATRLKRTARRRYTRRKNRICYLQEIFSNEMAKVDDSFFHRLEESFLVEEDKKHERHPIFGNIVDEVAYHEKYPTIYHLRKKLVDSTDKADLRLIYLALAHMIKFRGHFLIEGDLNPDNSDVDKLFIQLVQTYNQLFEENPINASGVDAKAILSARLSKSRRLENLIAQLPGEKKNGLFGNLIALSLGLTPNFKSNFDLAEDAKLQLSKDTYDDDLDNLLAQIGDQYADLFLAAKNLSDAILLSDILRVNTEITKAPLSASMIKRYDEHHQDLTLLKALVRQQLPEKYKEIFFDQSKNGYAGYIDGGASQEEFYKFIKPILEKMDGTEELLVKLNREDLLRKQRTFDNGSIPHQIHLGELHAILRRQEDFYPFLKDNREKIEKILTFRIPYYVGPLARGNSRFAWMTRKSEETITPWNFEEVVDKGASAQSFIERMTNFDKNLPNEKVLPKHSLLYEYFTVYNELTKVKYVTEGMRKPAFLSGEQKKAIVDLLFKTNRKVTVKQLKEDYFKKIECFDSVEISGVEDRFNASLGTYHDLLKIIKDKDFLDNEENEDILEDIVLTLTLFEDREMIEERLKTYAHLFDDKVMKQLKRRRYTGWGRLSRKLINGIRDKQSGKTILDFLKSDGFANRNFMQLIHDDSLTFKEDIQKAQVSGQGDSLHEHIANLAGSPAIKKGILQTVKVVDELVKVMGRHKPENIVIEMARENQTTQKGQKNSRERMKRIEEGIKELGSQILKEHPVENTQLQNEKLYLYYLQNGRDMYVDQELDINRLSDYDVDHIVPQSFLKDDSIDNKVLTRSDKARGKSDNVPSEEVVKKMKNYWRQLLNAKLITQRKFDNLTKAERGGLSELDKAGFIKRQLVETRQITKHVAQILDSRMNTKYDENDKLIREVKVITLKSKLVSDFRKDFQFYKVREINNYHHAHDAYLNAVVGTALIKKYPKLESEFVYGDYKVYDVRKMIAKSEQEIGKATAKYFFYSNIMNFFKTEITLANGEIRKRPLIETNGETGEIVWDKGRDFATVRKVLSMPQVNIVKKTEVQTGGFSKESILPKRNSDKLIARKKDWDPKKYGGFDSPTVAYSVLVVAKVEKGKSKKLKSVKELLGITIMERSSFEKNPIDFLEAKGYKEVKKDLIIKLPKYSLFELENGRKRMLASAGELQKGNELALPSKYVNFLYLASHYEKLKGSPEDNEQKQLFVEQHKHYLDEIIEQISEFSKRVILADANLDKVLSAYNKHRDKPIREQAENIIHLFTLTNLGAPAAFKYFDTTIDRKRYTSTKEVLDATLIHQSITGLYETRIDLSQLGGDGGGSSEAAAKPAPGGTLNLEDEYRLYETSAEPEVSPGSTWLSDFPQAWAETGGMGLAVRQAPLIIPLKATSTPVSIKQYPMSQEAKLGIKPHIQRLLDQGILVPCQSPWNTPLLPVKKPGTNDYRPVQDLREVNKRVEDIHPTVPNPYNLLSGLPPSHRWYTVLDLKDAFFCLRLHPTSQPLFAFEWRDPGMGISGQLTWTRLPQGFKNSPTLFNEALHRDLADFRIQHPDLILLQYVDDILLAATSELDCQQGTRALLLTLGNLGYRASAKKAQLCQKQVKYLGYLLKEGQRWLTEARKETVMGQPTPKTPRQLREFLGTAGFCRLWIPGFAEMAAPLYPLTKPGTLFNWGPDQQKAYQEIKQALLTAPALGLPDLTKPFELFVDEKQGYAKGVLTQKLGPWRRPVAYLSKKLDPVAAGWPPCLRMVAAIAVLRKDAGKLTMGQPLVILAPHAVEALVKQPPDRWLSNARMTHYQAMLLDTDRVQFGPVVALNPATLLPLPEEGAPHDCLEILAETHGTRPDLTDQPIPDADHTWYTDGSSFLQEGQRKAGAAVTTETEVIWARALPAGTSAQRAELIALTQALKMAEGKRLNVYTDSRYAFATAHIHGEIYRRRGWLTSEGREIKNKSEILALLKALFLPKRLSIIHCLGHQKGDSAEARGNRLADQAAREAAIKTPPDTSTLLAGKRTADGSEFEKRTADGSEFESPKKKAKVE

SEQ ID NO: 7578 - protein, 2096 aa, synthetic construct
MPAAKRVKLDGGDKKYSIGLDIGTNSVGWAVITDEYKVPSKKFKVLGNTDRHSIKKNLIGALLFDSGETAEATRLKRTARRRYTRRKNRICYLQEIFSNEMAKVDDSFFHRLEESFLVEEDKKHERHPIFGNIVDEVAYHEKYPTIYHLRKKLVDSTDKADLRLIYLALAHMIKFRGHFLIEGDLNPDNSDVDKLFIQLVQTYNQLFEENPINASGVDAKAILSARLSKSRRLENLIAQLPGEKKNGLFGNLIALSLGLTPNFKSNFDLAEDAKLQLSKDTYDDDLDNLLAQIGDQYADLFLAAKNLSDAILLSDILRVNTEITKAPLSASMIKRYDEHHQDLTLLKALVRQQLPEKYKEIFFDQSKNGYAGYIDGGASQEEFYKFIKPILEKMDGTEELLVKLNREDLLRKQRTFDNGSIPHQIHLGELHAILRRQEDFYPFLKDNREKIEKILTFRIPYYVGPLARGNSRFAWMTRKSEETITPWNFEEVVDKGASAQSFIERMTNFDKNLPNEKVLPKHSLLYEYFTVYNELTKVKYVTEGMRKPAFLSGEQKKAIVDLLFKTNRKVTVKQLKEDYFKKIECFDSVEISGVEDRFNASLGTYHDLLKIIKDKDFLDNEENEDILEDIVLTLTLFEDREMIEERLKTYAHLFDDKVMKQLKRRRYTGWGRLSRKLINGIRDKQSGKTILDFLKSDGFANRNFMQLIHDDSLTFKEDIQKAQVSGQGDSLHEHIANLAGSPAIKKGILQTVKVVDELVKVMGRHKPENIVIEMARENQTTQKGQKNSRERMKRIEEGIKELGSQILKEHPVENTQLQNEKLYLYYLQNGRDMYVDQELDINRLSDYDVDHIVPQSFLKDDSIDNKVLTRSDKARGKSDNVPSEEVVKKMKNYWRQLLNAKLITQRKFDNLTKAERGGLSELDKAGFIKRQLVETRQITKHVAQILDSRMNTKYDENDKLIREVKVITLKSKLVSDFRKDFQFYKVREINNYHHAHDAYLNAVVGTALIKKYPKLESEFVYGDYKVYDVRKMIAKSEQEIGKATAKYFFYSNIMNFFKTEITLANGEIRKRPLIETNGETGEIVWDKGRDFATVRKVLSMPQVNIVKKTEVQTGGFSKESILPKRNSDKLIARKKDWDPKKYGGFDSPTVAYSVLVVAKVEKGKSKKLKSVKELLGITIMERSSFEKNPIDFLEAKGYKEVKKDLIIKLPKYSLFELENGRKRMLASAGELQKGNELALPSKYVNFLYLASHYEKLKGSPEDNEQKQLFVEQHKHYLDEIIEQISEFSKRVILADANLDKVLSAYNKHRDKPIREQAENIIHLFTLTNLGAPAAFKYFDTTIDRKRYTSTKEVLDATLIHQSITGLYETRIDLSQLGGDGGGSSEAAAKPAPGGTLNLEDEYRLYETSAEPEVSPGSTWLSDFPQAWAETGGMGLAVRQAPLIIPLKATSTPVSIKQYPMSQEAKLGIKPHIQRLLDQGILVPCQSPWNTPLLPVKKPGTNDYRPVQDLREVNKRVEDIHPTVPNPYNLLSGLPPSHRWYTVLDLKDAFFCLRLHPTSQPLFAFEWRDPGMGISGQLTWTRLPQGFKNSPTLFNEALHRDLADFRIQHPDLILLQYVDDILLAATSELDCQQGTRALLLTLGNLGYRASAKKAQLCQKQVKYLGYLLKEGQRWLTEARKETVMGQPTPKTPRQLREFLGKAGFCRLFIPGFAEMAAPLYPLTKPGTLFNWGPDQQKAYQEIKQALLTAPALGLPDLTKPFELFVDEKQGYAKGVLTQKLGPWRRPVAYLSKKLDPVAAGWPPCLRMVAAIAVLRKDAGKLTMGQPLVILAPHAVEALVKQPPDRWLSNARMTHYQAMLLDTDRVQFGPVVALNPATLLPLPEEGAPHDCLEILAETHGTRPDLTDQPIPDADHTWYTDGSSFLQEGQRKAGAAVTTETEVIWARALPAGTSAQRAELIALTQALKMAEGKRLNVYTDSRYAFATAHIHGEIYRRRGWLTSEGREIKNKSEILALLKALFLPKRLSIIHCLGHQKGDSAEARGNRLADQAAREAAIKTPPDTSTLLAGKRTADGSEFEKRTADGSEFESPKKKAKVE

SEQ ID NO: 7579 - protein, 2096 aa, synthetic construct
MPAAKRVKLDGGDKKYSIGLDIGTNSVGWAVITDEYKVPSKKFKVLGNTDRHSIKKNLIGALLFDSGETAEATRLKRTARRRYTRRKNRICYLQEIFSNEMAKVDDSFFHRLEESFLVEEDKKHERHPIFGNIVDEVAYHEKYPTIYHLRKKLVDSTDKADLRLIYLALAHMIKFRGHFLIEGDLNPDNSDVDKLFIQLVQTYNQLFEENPINASGVDAKAILSARLSKSRRLENLIAQLPGEKKNGLFGNLIALSLGLTPNFKSNFDLAEDAKLQLSKDTYDDDLDNLLAQIGDQYADLFLAAKNLSDAILLSDILRVNTEITKAPLSASMIKRYDEHHQDLTLLKALVRQQLPEKYKEIFFDQSKNGYAGYIDGGASQEEFYKFIKPILEKMDGTEELLVKLNREDLLRKQRTFDNGSIPHQIHLGELHAILRRQEDFYPFLKDNREKIEKILTFRIPYYVGPLARGNSRFAWMTRKSEETITPWNFEEVVDKGASAQSFIERMTNFDKNLPNEKVLPKHSLLYEYFTVYNELTKVKYVTEGMRKPAFLSGEQKKAIVDLLFKTNRKVTVKQLKEDYFKKIECFDSVEISGVEDRFNASLGTYHDLLKIIKDKDFLDNEENEDILEDIVLTLTLFEDREMIEERLKTYAHLFDDKVMKQLKRRRYTGWGRLSRKLINGIRDKQSGKTILDFLKSDGFANRNFMQLIHDDSLTFKEDIQKAQVSGQGDSLHEHIANLAGSPAIKKGILQTVKVVDELVKVMGRHKPENIVIEMARENQTTQKGQKNSRERMKRIEEGIKELGSQILKEHPVENTQLQNEKLYLYYLQNGRDMYVDQELDINRLSDYDVDHIVPQSFLKDDSIDNKVLTRSDKARGKSDNVPSEEVVKKMKNYWRQLLNAKLITQRKFDNLTKAERGGLSELDKAGFIKRQLVETRQITKHVAQILDSRMNTKYDENDKLIREVKVITLKSKLVSDFRKDFQFYKVREINNYHHAHDAYLNAVVGTALIKKYPKLESEFVYGDYKVYDVRKMIAKSEQEIGKATAKYFFYSNIMNFFKTEITLANGEIRKRPLIETNGETGEIVWDKGRDFATVRKVLSMPQVNIVKKTEVQTGGFSKESILPKRNSDKLIARKKDWDPKKYGGFDSPTVAYSVLVVAKVEKGKSKKLKSVKELLGITIMERSSFEKNPIDFLEAKGYKEVKKDLIIKLPKYSLFELENGRKRMLASAGELQKGNELALPSKYVNFLYLASHYEKLKGSPEDNEQKQLFVEQHKHYLDEIIEQISEFSKRVILADANLDKVLSAYNKHRDKPIREQAENIIHLFTLTNLGAPAAFKYFDTTIDRKRYTSTKEVLDATLIHQSITGLYETRIDLSQLGGDGGGSSEAAAKPAPGGTLGIEDEYRLHETSTEPDVSLGSTWLSDFPQAWAETGGMGLAVRQAPLIIPLKATSTPVSIQQYPMSHEARLGIKPHIQRLLDQGILVPCQSPWNTPLLPVKKPGTNDYRPVQDLREVNKRVEDIHPTVPNPYNLLSGLPPSHQWYTVLDLKDAFFCLRLHPTSQPLFAFEWRDPGMGISGQLTWTRLPQGFKNSPTLFDEALHRDLADFRIQHPDLILLQYVDDILLAATSELDCQQGTRALLQTLGDLGYRASAKKAQICQKQVKYLGYLLREGQRWLTEARKETVMGQPVPKTPRQLREFLGTAGFCRLWIPGFAEMAAPLYPLTKTGTLFSWGPDQQKAYQEIKQALLTAPALGLPDLTKPFELFVDEKQGYAKGVLTQKLGPWRRPVAYLSKKLDPVAAGWPPCLRMVAAIAVLTKDAGKLTMGQPLVILAPHAVEALVKQPPDRWLSNARMTHYQAMLLDTDRVQFGPVVALNPATLLPLPEEGAPHDCLEILAETHGTRPDLTDQPIPDADHTWYTDGSSFLQEGQRKAGAAVTTETEVIWAGALPAGTSAQRAELIALTQALKMAEGKRLNVYTDSRYAFATAHIHGEIYRRRGLLTSEGREIKNKSEILALLKALFLPKRLSIIHCLGHQKGDSAEARGNRLADQAAREAAIKTPPDTSTLLAGKRTADGSEFEKRTADGSEFESPKKKAKVE

SEQ ID NO: 7580 - protein, 2096 aa, synthetic construct
MPAAKRVKLDGGDKKYSIGLDIGTNSVGWAVITDEYKVPSKKFKVLGNTDRHSIKKNLIGALLFDSGETAEATRLKRTARRRYTRRKNRICYLQEIFSNEMAKVDDSFFHRLEESFLVEEDKKHERHPIFGNIVDEVAYHEKYPTIYHLRKKLVDSTDKADLRLIYLALAHMIKFRGHFLIEGDLNPDNSDVDKLFIQLVQTYNQLFEENPINASGVDAKAILSARLSKSRRLENLIAQLPGEKKNGLFGNLIALSLGLTPNFKSNFDLAEDAKLQLSKDTYDDDLDNLLAQIGDQYADLFLAAKNLSDAILLSDILRVNTEITKAPLSASMIKRYDEHHQDLTLLKALVRQQLPEKYKEIFFDQSKNGYAGYIDGGASQEEFYKFIKPILEKMDGTEELLVKLNREDLLRKQRTFDNGSIPHQIHLGELHAILRRQEDFYPFLKDNREKIEKILTFRIPYYVGPLARGNSRFAWMTRKSEETITPWNFEEVVDKGASAQSFIERMTNFDKNLPNEKVLPKHSLLYEYFTVYNELTKVKYVTEGMRKPAFLSGEQKKAIVDLLFKTNRKVTVKQLKEDYFKKIECFDSVEISGVEDRFNASLGTYHDLLKIIKDKDFLDNEENEDILEDIVLTLTLFEDREMIEERLKTYAHLFDDKVMKQLKRRRYTGWGRLSRKLINGIRDKQSGKTILDFLKSDGFANRNFMQLIHDDSLTFKEDIQKAQVSGQGDSLHEHIANLAGSPAIKKGILQTVKVVDELVKVMGRHKPENIVIEMARENQTTQKGQKNSRERMKRIEEGIKELGSQILKEHPVENTQLQNEKLYLYYLQNGRDMYVDQELDINRLSDYDVDHIVPQSFLKDDSIDNKVLTRSDKARGKSDNVPSEEVVKKMKNYWRQLLNAKLITQRKFDNLTKAERGGLSELDKAGFIKRQLVETRQITKHVAQILDSRMNTKYDENDKLIREVKVITLKSKLVSDFRKDFQFYKVREINNYHHAHDAYLNAVVGTALIKKYPKLESEFVYGDYKVYDVRKMIAKSEQEIGKATAKYFFYSNIMNFFKTEITLANGEIRKRPLIETNGETGEIVWDKGRDFATVRKVLSMPQVNIVKKTEVQTGGFSKESILPKRNSDKLIARKKDWDPKKYGGFDSPTVAYSVLVVAKVEKGKSKKLKSVKELLGITIMERSSFEKNPIDFLEAKGYKEVKKDLIIKLPKYSLFELENGRKRMLASAGELQKGNELALPSKYVNFLYLASHYEKLKGSPEDNEQKQLFVEQHKHYLDEIIEQISEFSKRVILADANLDKVLSAYNKHRDKPIREQAENIIHLFTLTNLGAPAAFKYFDTTIDRKRYTSTKEVLDATLIHQSITGLYETRIDLSQLGGDGGGSSEAAAKPAPGGTLNIEDEYRLHETSKEPDVSLGSTWLSDFPQAWAETGGMGLAVRQAPLIIPLKATSTPVSIKQYPMSQEARLGIKPHIQRLLDQGILVPCQSPWNTPLLPVKKPGTNDYRPVQDLREVNKRVEDIHPTVPNPYNLLSGLPPSHQWYTVLDLKDAFFCLRLHPTSQPLFAFEWRDPEMGISGQLTWTRLPQGFKNSPTLFNEALHRDLAGFRIQHPDLILLQYVDDLLLAATSELDCQQGTRALLQTLGDLGYRASAKKAQICQKQVKYLGYLLKEGQRWLTEARKETVMGQPIPKTPRQLREFLGTAGFCRLWIPGFAEMAAPLYPLTKPGTLFNWGPDQQKAFQEIKQALLTAPALGLPDLTKPFELFVDEKQGYAKGVLTQKLGPWRRPVAYLSKKLDPVAAGWPPCLRMVAAIAVLTKDAGKLTMGQPLVILAPHAVEALVKQPPDRWLSNARMTHYQALLLDTDRVQFGPVVALNPATLLPLPEEGLQHDCLDILAEAHGTRSDLMDQPLPDADHTWYTDGSSFLQEGQRKAGAAVTTETEVIWARALPAGTSAQRAELIALTQALKMAEGKKLNVYTDSRYAFATAHIHGEIYRRRGWLTSEGKEIKNKDEILALLKALFLPKRLSIIHCPGHQKGNSAEARGNRMADQAAREVATRETPETSTLLAGKRTADGSEFEKRTADGSEFESPKKKAKVE

SEQ ID NO: 7581 - protein, 2096 aa, synthetic construct
MPAAKRVKLDGGDKKYSIGLDIGTNSVGWAVITDEYKVPSKKFKVLGNTDRHSIKKNLIGALLFDSGETAEATRLKRTARRRYTRRKNRICYLQEIFSNEMAKVDDSFFHRLEESFLVEEDKKHERHPIFGNIVDEVAYHEKYPTIYHLRKKLVDSTDKADLRLIYLALAHMIKFRGHFLIEGDLNPDNSDVDKLFIQLVQTYNQLFEENPINASGVDAKAILSARLSKSRRLENLIAQLPGEKKNGLFGNLIALSLGLTPNFKSNFDLAEDAKLQLSKDTYDDDLDNLLAQIGDQYADLFLAAKNLSDAILLSDILRVNTEITKAPLSASMIKRYDEHHQDLTLLKALVRQQLPEKYKEIFFDQSKNGYAGYIDGGASQEEFYKFIKPILEKMDGTEELLVKLNREDLLRKQRTFDNGSIPHQIHLGELHAILRRQEDFYPFLKDNREKIEKILTFRIPYYVGPLARGNSRFAWMTRKSEETITPWNFEEVVDKGASAQSFIERMTNFDKNLPNEKVLPKHSLLYEYFTVYNELTKVKYVTEGMRKPAFLSGEQKKAIVDLLFKTNRKVTVKQLKEDYFKKIECFDSVEISGVEDRFNASLGTYHDLLKIIKDKDFLDNEENEDILEDIVLTLTLFEDREMIEERLKTYAHLFDDKVMKQLKRRRYTGWGRLSRKLINGIRDKQSGKTILDFLKSDGFANRNFMQLIHDDSLTFKEDIQKAQVSGQGDSLHEHIANLAGSPAIKKGILQTVKVVDELVKVMGRHKPENIVIEMARENQTTQKGQKNSRERMKRIEEGIKELGSQILKEHPVENTQLQNEKLYLYYLQNGRDMYVDQELDINRLSDYDVDHIVPQSFLKDDSIDNKVLTRSDKARGKSDNVPSEEVVKKMKNYWRQLLNAKLITQRKFDNLTKAERGGLSELDKAGFIKRQLVETRQITKHVAQILDSRMNTKYDENDKLIREVKVITLKSKLVSDFRKDFQFYKVREINNYHHAHDAYLNAVVGTALIKKYPKLESEFVYGDYKVYDVRKMIAKSEQEIGKATAKYFFYSNIMNFFKTEITLANGEIRKRPLIETNGETGEIVWDKGRDFATVRKVLSMPQVNIVKKTEVQTGGFSKESILPKRNSDKLIARKKDWDPKKYGGFDSPTVAYSVLVVAKVEKGKSKKLKSVKELLGITIMERSSFEKNPIDFLEAKGYKEVKKDLIIKLPKYSLFELENGRKRMLASAGELQKGNELALPSKYVNFLYLASHYEKLKGSPEDNEQKQLFVEQHKHYLDEIIEQISEFSKRVILADANLDKVLSAYNKHRDKPIREQAENIIHLFTLTNLGAPAAFKYFDTTIDRKRYTSTKEVLDATLIHQSITGLYETRIDLSQLGGDGGGSSEAAAKPAPGGTLNIEDEYRLHEISTEPDVSPGSTWLSDFPQAWAETGGMGLAVRQAPLIIPLKATSTPVSIKQYPMSQEAKLGIKPHIQRLLDQGILVPCQSPWNTPLLPVKKPGTNDYRPVQGLREVNKRVEDIHPTVPNPYNLLSGLPTSHRWYTVLDLKDAFFCLRLHPTSQPLFASEWRDPGMGISGQLTWTRLPQGFKNSPTLFNEALHRGLADFRIQHPDLILLQYVDDLLLAATSELDCQQGTRALLKTLGNLGYRASAKKAQICQKQVKYLGYLLREGQRWLTEARKETVMGQPTPKTPRQLREFLGKAGFCRLFIPRFAEMAAPLYPLTKPGTLFNWGPDQQKAYHEIKQALLTAPALGLPDLTKPFELFVDEKQGYAKGVLTQKLGPWRRPVAYLSKKLDPVAAGWPPCLRMVAAIAVLTKDAGKLTMGQPLVILAPHAVEALVKQPPDRWLSNARMTHYQAMLLDTDRVQFGPVVALNPATLLPLPEEGAPHDCLEILAETHGTEPDLTDQPIPDADHTWYTDGSSFLQEGQRKAGAAVTTETEVIWARALPAGTSAQRAELIALTQALKMAEGKRLNVYTDSRYAFATAHIHGEIYKRRGWLTSEGREIKNKSEILALLKALFLPKRLSIIHCLGHQKGDSAEARGNRLADQAAREAAIKTPPDTSTLLAGKRTADGSEFEKRTADGSEFESPKKKAKVE

SEQ ID NO: 7582 - protein, 2090 aa, synthetic construct
MPAAKRVKLDGGDKKYSIGLDIGTNSVGWAVITDEYKVPSKKFKVLGNTDRHSIKKNLIGALLFDSGETAEATRLKRTARRRYTRRKNRICYLQEIFSNEMAKVDDSFFHRLEESFLVEEDKKHERHPIFGNIVDEVAYHEKYPTIYHLRKKLVDSTDKADLRLIYLALAHMIKFRGHFLIEGDLNPDNSDVDKLFIQLVQTYNQLFEENPINASGVDAKAILSARLSKSRRLENLIAQLPGEKKNGLFGNLIALSLGLTPNFKSNFDLAEDAKLQLSKDTYDDDLDNLLAQIGDQYADLFLAAKNLSDAILLSDILRVNTEITKAPLSASMIKRYDEHHQDLTLLKALVRQQLPEKYKEIFFDQSKNGYAGYIDGGASQEEFYKFIKPILEKMDGTEELLVKLNREDLLRKQRTFDNGSIPHQIHLGELHAILRRQEDFYPFLKDNREKIEKILTFRIPYYVGPLARGNSRFAWMTRKSEETITPWNFEEVVDKGASAQSFIERMTNFDKNLPNEKVLPKHSLLYEYFTVYNELTKVKYVTEGMRKPAFLSGEQKKAIVDLLFKTNRKVTVKQLKEDYFKKIECFDSVEISGVEDRFNASLGTYHDLLKIIKDKDFLDNEENEDILEDIVLTLTLFEDREMIEERLKTYAHLFDDKVMKQLKRRRYTGWGRLSRKLINGIRDKQSGKTILDFLKSDGFANRNFMQLIHDDSLTFKEDIQKAQVSGQGDSLHEHIANLAGSPAIKKGILQTVKVVDELVKVMGRHKPENIVIEMARENQTTQKGQKNSRERMKRIEEGIKELGSQILKEHPVENTQLQNEKLYLYYLQNGRDMYVDQELDINRLSDYDVDHIVPQSFLKDDSIDNKVLTRSDKARGKSDNVPSEEVVKKMKNYWRQLLNAKLITQRKFDNLTKAERGGLSELDKAGFIKRQLVETRQITKHVAQILDSRMNTKYDENDKLIREVKVITLKSKLVSDFRKDFQFYKVREINNYHHAHDAYLNAVVGTALIKKYPKLESEFVYGDYKVYDVRKMIAKSEQEIGKATAKYFFYSNIMNFFKTEITLANGEIRKRPLIETNGETGEIVWDKGRDFATVRKVLSMPQVNIVKKTEVQTGGFSKESILPKRNSDKLIARKKDWDPKKYGGFDSPTVAYSVLVVAKVEKGKSKKLKSVKELLGITIMERSSFEKNPIDFLEAKGYKEVKKDLIIKLPKYSLFELENGRKRMLASAGELQKGNELALPSKYVNFLYLASHYEKLKGSPEDNEQKQLFVEQHKHYLDEIIEQISEFSKRVILADANLDKVLSAYNKHRDKPIREQAENIIHLFTLTNLGAPAAFKYFDTTIDRKRYTSTKEVLDATLIHQSITGLYETRIDLSQLGGDGGGSSEAAAKPAPGGTLQLDDEYRLYSPLVKPDQNIQFWLEQFPQAWAETAGMGLAKQVPPQVIQLKASATPVSVRQYPLSKEAQEGIRPHVQRLIQQGILVPVQSPWNTPLLPVRKPGTNDYRPVQDLREVNKRVQDIHPTVPNPYNLLCALPPQRSWYTVLDLKDAFFCLRLHPTSQPLFAFEWRDPGTGRTGQLTWTRLPQGFKNSPTIFDEALHRDLANFRIQHPQVTLLQYVDDLLLAGATKQDCLEGTKALLLELSDLGYRASAKKAQICRREVTYLGYSLRDGQRWLTEARKKTVVQIPAPTTAKQVREFLGTAGFCRLWIPGFATLAAPLYPLTKEKGEFSWAPEHQKAFDAIKKALLSAPALALPDVTKPFTLYVDERKGVARGVLTQTLGPWRRPVAYLSKKLDPVASGWPVCLKAIAAVAILVKDADKLTLGQNITVIAPHALENIVRQPPDRWMTNARMTHYQSLLLTERVTFAPPAALNPATLLPEETDEPVTHDCHQLLIEETGVRKDLTDIPLTGEVLTWFTDGSSYVVEGKRMAGAAVVDGTRTIWASSLPEGTSAQKAELMALTQALRLAEGKSINIYTDSRYAFATAHVHGAIYKQRGLLTSAGREIKNKEEILSLLEALHLPKRLAIIHCPGHQKAKDPISRGNQMADRVAKQAAQGVNLLAGKRTADGSEFEKRTADGSEFESPKKKAKVE

SEQ ID NO: 7583 - protein, 2176 aa, synthetic construct
MPAAKRVKLDGGDKKYSIGLDIGTNSVGWAVITDEYKVPSKKFKVLGNTDRHSIKKNLIGALLFDSGETAEATRLKRTARRRYTRRKNRICYLQEIFSNEMAKVDDSFFHRLEESFLVEEDKKHERHPIFGNIVDEVAYHEKYPTIYHLRKKLVDSTDKADLRLIYLALAHMIKFRGHFLIEGDLNPDNSDVDKLFIQLVQTYNQLFEENPINASGVDAKAILSARLSKSRRLENLIAQLPGEKKNGLFGNLIALSLGLTPNFKSNFDLAEDAKLQLSKDTYDDDLDNLLAQIGDQYADLFLAAKNLSDAILLSDILRVNTEITKAPLSASMIKRYDEHHQDLTLLKALVRQQLPEKYKEIFFDQSKNGYAGYIDGGASQEEFYKFIKPILEKMDGTEELLVKLNREDLLRKQRTFDNGSIPHQIHLGELHAILRRQEDFYPFLKDNREKIEKILTFRIPYYVGPLARGNSRFAWMTRKSEETITPWNFEEVVDKGASAQSFIERMTNFDKNLPNEKVLPKHSLLYEYFTVYNELTKVKYVTEGMRKPAFLSGEQKKAIVDLLFKTNRKVTVKQLKEDYFKKIECFDSVEISGVEDRFNASLGTYHDLLKIIKDKDFLDNEENEDILEDIVLTLTLFEDREMIEERLKTYAHLFDDKVMKQLKRRRYTGWGRLSRKLINGIRDKQSGKTILDFLKSDGFANRNFMQLIHDDSLTFKEDIQKAQVSGQGDSLHEHIANLAGSPAIKKGILQTVKVVDELVKVMGRHKPENIVIEMARENQTTQKGQKNSRERMKRIEEGIKELGSQILKEHPVENTQLQNEKLYLYYLQNGRDMYVDQELDINRLSDYDVDHIVPQSFLKDDSIDNKVLTRSDKARGKSDNVPSEEVVKKMKNYWRQLLNAKLITQRKFDNLTKAERGGLSELDKAGFIKRQLVETRQITKHVAQILDSRMNTKYDENDKLIREVKVITLKSKLVSDFRKDFQFYKVREINNYHHAHDAYLNAVVGTALIKKYPKLESEFVYGDYKVYDVRKMIAKSEQEIGKATAKYFFYSNIMNFFKTEITLANGEIRKRPLIETNGETGEIVWDKGRDFATVRKVLSMPQVNIVKKTEVQTGGFSKESILPKRNSDKLIARKKDWDPKKYGGFDSPTVAYSVLVVAKVEKGKSKKLKSVKELLGITIMERSSFEKNPIDFLEAKGYKEVKKDLIIKLPKYSLFELENGRKRMLASAGELQKGNELALPSKYVNFLYLASHYEKLKGSPEDNEQKQLFVEQHKHYLDEIIEQISEFSKRVILADANLDKVLSAYNKHRDKPIREQAENIIHLFTLTNLGAPAAFKYFDTTIDRKRYTSTKEVLDATLIHQSITGLYETRIDLSQLGGDGGGSSEAAAKPAPGGMDPLQLLQPLEAEIKGTKLKAHWNSGATITCVPQAFLEEEVPIKNIWIKTIHGEKEQPVYYLTFKIQGRKVEAEVISSPYDYILVSPSDIPWLMKKPLQLTTLVPLQEYEERLLKQTMLTGSYKEKLQSLFLKYDALWQHWENQVGHRRIKPHHIATGTVNPRPQKQYPINPKAKASIQTVINDLLKQGVLIQQNSIMNTPVYPVPKPDGKWRMVLDYREVNKTIPLIAAQNQHSAGILSSIFRGKYKTTLDLSNGFWAHSITPESYWLTAFTWLGQQYCWTRLPQGFLNSPALFNADVVDLLKEVPNVQVYVDDIYISHDDPREHLEQLEKVFSLLLNAGYVVSLKKSEIAQHEVEFLGFNITKEGRGLTETFKQKLLNITPPRDLKQLQSILGKLNFARNFIPNFSELVKPLYNIIATAPGKYITWTTDNSQQLQNIISMLNSAENLEERNPEVRLIMKVNTSPSAGYIRFYNEFAKRPIMYLNYVYTKAEVKFTNTEKLLTTIHKGLIKALDLGMGQEILVYSPIVSMTKIQKTPLPERKALPIRWITWMSYLEDPRIQFHYDKTLPELQQVPTVTDDIIAKIKHPSEFSMVFYTDGSAIKHPNVNKSHNAGMGIAQVQFKPEFTVINTWSIPLGDHTAQLAEVAAVEFACKKALKIDGPVLIVTDSFYVAESVNKELPYWQSNGFFNNKKKPLKHVSKWKSIADCIQLKPDIIIIHEKGHQPTASTFHTEGNNLADKLATQGSYVVNAGKRTADGSEFEKRTADGSEFESPKKKAKVE

SEQ ID NO: 7584 - protein, 2094 aa, synthetic construct
MPAAKRVKLDGGDKKYSIGLDIGTNSVGWAVITDEYKVPSKKFKVLGNTDRHSIKKNLIGALLFDSGETAEATRLKRTARRRYTRRKNRICYLQEIFSNEMAKVDDSFFHRLEESFLVEEDKKHERHPIFGNIVDEVAYHEKYPTIYHLRKKLVDSTDKADLRLIYLALAHMIKFRGHFLIEGDLNPDNSDVDKLFIQLVQTYNQLFEENPINASGVDAKAILSARLSKSRRLENLIAQLPGEKKNGLFGNLIALSLGLTPNFKSNFDLAEDAKLQLSKDTYDDDLDNLLAQIGDQYADLFLAAKNLSDAILLSDILRVNTEITKAPLSASMIKRYDEHHQDLTLLKALVRQQLPEKYKEIFFDQSKNGYAGYIDGGASQEEFYKFIKPILEKMDGTEELLVKLNREDLLRKQRTFDNGSIPHQIHLGELHAILRRQEDFYPFLKDNREKIEKILTFRIPYYVGPLARGNSRFAWMTRKSEETITPWNFEEVVDKGASAQSFIERMTNFDKNLPNEKVLPKHSLLYEYFTVYNELTKVKYVTEGMRKPAFLSGEQKKAIVDLLFKTNRKVTVKQLKEDYFKKIECFDSVEISGVEDRFNASLGTYHDLLKIIKDKDFLDNEENEDILEDIVLTLTLFEDREMIEERLKTYAHLFDDKVMKQLKRRRYTGWGRLSRKLINGIRDKQSGKTILDFLKSDGFANRNFMQLIHDDSLTFKEDIQKAQVSGQGDSLHEHIANLAGSPAIKKGILQTVKVVDELVKVMGRHKPENIVIEMARENQTTQKGQKNSRERMKRIEEGIKELGSQILKEHPVENTQLQNEKLYLYYLQNGRDMYVDQELDINRLSDYDVDHIVPQSFLKDDSIDNKVLTRSDKARGKSDNVPSEEVVKKMKNYWRQLLNAKLITQRKFDNLTKAERGGLSELDKAGFIKRQLVETRQITKHVAQILDSRMNTKYDENDKLIREVKVITLKSKLVSDFRKDFQFYKVREINNYHHAHDAYLNAVVGTALIKKYPKLESEFVYGDYKVYDVRKMIAKSEQEIGKATAKYFFYSNIMNFFKTEITLANGEIRKRPLIETNGETGEIVWDKGRDFATVRKVLSMPQVNIVKKTEVQTGGFSKESILPKRNSDKLIARKKDWDPKKYGGFDSPTVAYSVLVVAKVEKGKSKKLKSVKELLGITIMERSSFEKNPIDFLEAKGYKEVKKDLIIKLPKYSLFELENGRKRMLASAGELQKGNELALPSKYVNFLYLASHYEKLKGSPEDNEQKQLFVEQHKHYLDEIIEQISEFSKRVILADANLDKVLSAYNKHRDKPIREQAENIIHLFTLTNLGAPAAFKYFDTTIDRKRYTSTKEVLDATLIHQSITGLYETRIDLSQLGGDGGGSSEAAAKPAPGGVLNLEEEYRLHEKPVPSSIDPSWLQLFPTVWAERAGMGLANQVPPVVVELRSGASPVAVRQYPMSKEAREGIRPHIQRFLDLGVLVPCQSPWNTPLLPVKKPGTNDYRPVQDLREINKRVQDIHPTVPNPYNLLSSLPPSHTWYSVLDLKDAFFCLKLHPNSQPLFAFEWRDPEKGNTGQLTWTRLPQGFKNSPTLFDEALHRDLAPFRALNPQVVLLQYVDDLLVAAPTYRDCKEGTQKLLQELSKLGYRVSAKKAQLCQKEVTYLGYLLKEGKRWLTPARKATVMKIPPPTTPRQVREFLGTAGFCRLWIPGFASLAAPLYPLTKESIPFIWTEEHQKAFDRIKEALLSAPALALPDLTKPFTLYVDERAGVARGVLTQTLGPWRRPVAYLSKKLDPVASGWPTCLKAVAAVALLLKDADKLTLGQNVTVIASHSLESIVRQPPDRWMTNARMTHYQSLLLNERVSFAPPAVLNPATLLPVESEATPVHRCSEILAEETGTRRDLKDQPLPGVPAWYTDGSSFIAEGKRRAGAAIVDGKRTVWASSLPEGTSAQKAELVALTQALRLAEGKDINIYTDSRYAFATAHIHGAIYKQRGLLTSAGKDIKNKEEILALLEAIHLPKRVAIIHCPGHQKGNDPVATGNRRADEAAKQAALSTRVLAETTKPAGKRTADGSEFEKRTADGSEFESPKKKAKVE

SEQ ID NO: 7585 - protein, 2094 aa, synthetic construct
MPAAKRVKLDGGDKKYSIGLDIGTNSVGWAVITDEYKVPSKKFKVLGNTDRHSIKKNLIGALLFDSGETAEATRLKRTARRRYTRRKNRICYLQEIFSNEMAKVDDSFFHRLEESFLVEEDKKHERHPIFGNIVDEVAYHEKYPTIYHLRKKLVDSTDKADLRLIYLALAHMIKFRGHFLIEGDLNPDNSDVDKLFIQLVQTYNQLFEENPINASGVDAKAILSARLSKSRRLENLIAQLPGEKKNGLFGNLIALSLGLTPNFKSNFDLAEDAKLQLSKDTYDDDLDNLLAQIGDQYADLFLAAKNLSDAILLSDILRVNTEITKAPLSASMIKRYDEHHQDLTLLKALVRQQLPEKYKEIFFDQSKNGYAGYIDGGASQEEFYKFIKPILEKMDGTEELLVKLNREDLLRKQRTFDNGSIPHQIHLGELHAILRRQEDFYPFLKDNREKIEKILTFRIPYYVGPLARGNSRFAWMTRKSEETITPWNFEEVVDKGASAQSFIERMTNFDKNLPNEKVLPKHSLLYEYFTVYNELTKVKYVTEGMRKPAFLSGEQKKAIVDLLFKTNRKVTVKQLKEDYFKKIECFDSVEISGVEDRFNASLGTYHDLLKIIKDKDFLDNEENEDILEDIVLTLTLFEDREMIEERLKTYAHLFDDKVMKQLKRRRYTGWGRLSRKLINGIRDKQSGKTILDFLKSDGFANRNFMQLIHDDSLTFKEDIQKAQVSGQGDSLHEHIANLAGSPAIKKGILQTVKVVDELVKVMGRHKPENIVIEMARENQTTQKGQKNSRERMKRIEEGIKELGSQILKEHPVENTQLQNEKLYLYYLQNGRDMYVDQELDINRLSDYDVDHIVPQSFLKDDSIDNKVLTRSDKARGKSDNVPSEEVVKKMKNYWRQLLNAKLITQRKFDNLTKAERGGLSELDKAGFIKRQLVETRQITKHVAQILDSRMNTKYDENDKLIREVKVITLKSKLVSDFRKDFQFYKVREINNYHHAHDAYLNAVVGTALIKKYPKLESEFVYGDYKVYDVRKMIAKSEQEIGKATAKYFFYSNIMNFFKTEITLANGEIRKRPLIETNGETGEIVWDKGRDFATVRKVLSMPQVNIVKKTEVQTGGFSKESILPKRNSDKLIARKKDWDPKKYGGFDSPTVAYSVLVVAKVEKGKSKKLKSVKELLGITIMERSSFEKNPIDFLEAKGYKEVKKDLIIKLPKYSLFELENGRKRMLASAGELQKGNELALPSKYVNFLYLASHYEKLKGSPEDNEQKQLFVEQHKHYLDEIIEQISEFSKRVILADANLDKVLSAYNKHRDKPIREQAENIIHLFTLTNLGAPAAFKYFDTTIDRKRYTSTKEVLDATLIHQSITGLYETRIDLSQLGGDGGGSSEAAAKPAPGGVLNLEEEYRLHEKPVPSSIDPSWLQLFPTVWAERAGMGLANQVPPVVVELRSGASPVAVRQYPMSKEAREGIRPHIQRFLDLGVLVPCQSPWNTPLLPVKKPGTNDYRPVQDLREINKRVQDIHPTVPNPYNLLSSLPPSHTWYSVLDLKDAFFCLKLHPNSQPLFAFEWRDPEKGNTGQLTWTRLPQGFKNSPTLFNEALHRDLAPFRALNPQVVLLQYVDDLLVAAPTYRDCKEGTQKLLQELSKLGYRVSAKKAQLCQKEVTYLGYLLKEGKRWLTPARKATVMKIPPPTTPRQVREFLGTAGFCRLWIPGFASLAAPLYPLTKPSIPFIWTEEHQKAFDRIKEALLSAPALALPDLTKPFTLYVDERAGVARGVLTQTLGPWRRPVAYLSKKLDPVASGWPTCLKAVAAVALLLKDADKLTLGQNVTVIASHSLESIVRQPPDRWMTNARMTHYQSLLLNERVSFAPPAVLNPATLLPVESEATPVHRCSEILAEETGTRRDLKDQPLPGVPAWYTDGSSFIAEGKRRAGAAIVDGKRTVWASSLPEGTSAQKAELVALTQALRLAEGKDINIYTDSRYAFATAHIHGAIYKQRGWLTSAGKDIKNKEEILALLEAIHLPKRVAIIHCPGHQKGNDPVATGNRRADEAAKQAALSTRVLAETTKPAGKRTADGSEFEKRTADGSEFESPKKKAKVE

SEQ ID NO: 7586 - protein, 2094 aa, synthetic construct
MPAAKRVKLDGGDKKYSIGLDIGTNSVGWAVITDEYKVPSKKFKVLGNTDRHSIKKNLIGALLFDSGETAEATRLKRTARRRYTRRKNRICYLQEIFSNEMAKVDDSFFHRLEESFLVEEDKKHERHPIFGNIVDEVAYHEKYPTIYHLRKKLVDSTDKADLRLIYLALAHMIKFRGHFLIEGDLNPDNSDVDKLFIQLVQTYNQLFEENPINASGVDAKAILSARLSKSRRLENLIAQLPGEKKNGLFGNLIALSLGLTPNFKSNFDLAEDAKLQLSKDTYDDDLDNLLAQIGDQYADLFLAAKNLSDAILLSDILRVNTEITKAPLSASMIKRYDEHHQDLTLLKALVRQQLPEKYKEIFFDQSKNGYAGYIDGGASQEEFYKFIKPILEKMDGTEELLVKLNREDLLRKQRTFDNGSIPHQIHLGELHAILRRQEDFYPFLKDNREKIEKILTFRIPYYVGPLARGNSRFAWMTRKSEETITPWNFEEVVDKGASAQSFIERMTNFDKNLPNEKVLPKHSLLYEYFTVYNELTKVKYVTEGMRKPAFLSGEQKKAIVDLLFKTNRKVTVKQLKEDYFKKIECFDSVEISGVEDRFNASLGTYHDLLKIIKDKDFLDNEENEDILEDIVLTLTLFEDREMIEERLKTYAHLFDDKVMKQLKRRRYTGWGRLSRKLINGIRDKQSGKTILDFLKSDGFANRNFMQLIHDDSLTFKEDIQKAQVSGQGDSLHEHIANLAGSPAIKKGILQTVKVVDELVKVMGRHKPENIVIEMARENQTTQKGQKNSRERMKRIEEGIKELGSQILKEHPVENTQLQNEKLYLYYLQNGRDMYVDQELDINRLSDYDVDHIVPQSFLKDDSIDNKVLTRSDKARGKSDNVPSEEVVKKMKNYWRQLLNAKLITQRKFDNLTKAERGGLSELDKAGFIKRQLVETRQITKHVAQILDSRMNTKYDENDKLIREVKVITLKSKLVSDFRKDFQFYKVREINNYHHAHDAYLNAVVGTALIKKYPKLESEFVYGDYKVYDVRKMIAKSEQEIGKATAKYFFYSNIMNFFKTEITLANGEIRKRPLIETNGETGEIVWDKGRDFATVRKVLSMPQVNIVKKTEVQTGGFSKESILPKRNSDKLIARKKDWDPKKYGGFDSPTVAYSVLVVAKVEKGKSKKLKSVKELLGITIMERSSFEKNPIDFLEAKGYKEVKKDLIIKLPKYSLFELENGRKRMLASAGELQKGNELALPSKYVNFLYLASHYEKLKGSPEDNEQKQLFVEQHKHYLDEIIEQISEFSKRVILADANLDKVLSAYNKHRDKPIREQAENIIHLFTLTNLGAPAAFKYFDTTIDRKRYTSTKEVLDATLIHQSITGLYETRIDLSQLGGDGGGSSEAAAKPAPGGVLNLEEEYRLHEKPVPSSIDPSWLQLFPTVWAERAGMGLANQVPPVVVELRSGASPVAVRQYPMSKEAREGIRPHIQRFLDLGVLVPCQSPWNTPLLPVKKPGTNDYRPVQDLREINKRVQDIHPTVPNPYNLLSSLPPSHTWYSVLDLKDAFFCLKLHPNSQPLFAFEWRDPEKGNTGQLTWTRLPQGFKNSPTLFNEALHRDLAPFRALNPQVVLLQYVDDLLVAAPTYRDCKEGTQKLLQELSKLGYRVSAKKAQLCQKEVTYLGYLLKEGKRWLTPARKATVMKIPPPTTPRQVREFLGKAGFCRLFIPGFASLAAPLYPLTKPSIPFIWTEEHQKAFDRIKEALLSAPALALPDLTKPFTLYVDERAGVARGVLTQTLGPWRRPVAYLSKKLDPVASGWPTCLKAVAAVALLLKDADKLTLGQNVTVIASHSLESIVRQPPDRWMTNARMTHYQSLLLNERVSFAPPAVLNPATLLPVESEATPVHRCSEILAEETGTRRDLKDQPLPGVPAWYTDGSSFIAEGKRRAGAAIVDGKRTVWASSLPEGTSAQKAELVALTQALRLAEGKDINIYTDSRYAFATAHIHGAIYKQRGWLTSAGKDIKNKEEILALLEAIHLPKRVAIIHCPGHQKGNDPVATGNRRADEAAKQAALSTRVLAETTKPAGKRTADGSEFEKRTADGSEFESPKKKAKVE

SEQ ID NO: 7587 - protein, 2096 aa, synthetic construct; identical to SEQ ID NO: 4538

SEQ ID NO: 7588 - protein, 2098 aa, synthetic construct; identical to SEQ ID NO: 4539

SEQ ID NO: 7589 - protein, 2173 aa, synthetic construct
MPAAKRVKLDGGDKKYSIGLDIGTNSVGWAVITDEYKVPSKKFKVLGNTDRHSIKKNLIGALLFDSGETAEATRLKRTARRRYTRRKNRICYLQEIFSNEMAKVDDSFFHRLEESFLVEEDKKHERHPIFGNIVDEVAYHEKYPTIYHLRKKLVDSTDKADLRLIYLALAHMIKFRGHFLIEGDLNPDNSDVDKLFIQLVQTYNQLFEENPINASGVDAKAILSARLSKSRRLENLIAQLPGEKKNGLFGNLIALSLGLTPNFKSNFDLAEDAKLQLSKDTYDDDLDNLLAQIGDQYADLFLAAKNLSDAILLSDILRVNTEITKAPLSASMIKRYDEHHQDLTLLKALVRQQLPEKYKEIFFDQSKNGYAGYIDGGASQEEFYKFIKPILEKMDGTEELLVKLNREDLLRKQRTFDNGSIPHQIHLGELHAILRRQEDFYPFLKDNREKIEKILTFRIPYYVGPLARGNSRFAWMTRKSEETITPWNFEEVVDKGASAQSFIERMTNFDKNLPNEKVLPKHSLLYEYFTVYNELTKVKYVTEGMRKPAFLSGEQKKAIVDLLFKTNRKVTVKQLKEDYFKKIECFDSVEISGVEDRFNASLGTYHDLLKIIKDKDFLDNEENEDILEDIVLTLTLFEDREMIEERLKTYAHLFDDKVMKQLKRRRYTGWGRLSRKLINGIRDKQSGKTILDFLKSDGFANRNFMQLIHDDSLTFKEDIQKAQVSGQGDSLHEHIANLAGSPAIKKGILQTVKVVDELVKVMGRHKPENIVIEMARENQTTQKGQKNSRERMKRIEEGIKELGSQILKEHPVENTQLQNEKLYLYYLQNGRDMYVDQELDINRLSDYDVDHIVPQSFLKDDSIDNKVLTRSDKARGKSDNVPSEEVVKKMKNYWRQLLNAKLITQRKFDNLTKAERGGLSELDKAGFIKRQLVETRQITKHVAQILDSRMNTKYDENDKLIREVKVITLKSKLVSDFRKDFQFYKVREINNYHHAHDAYLNAVVGTALIKKYPKLESEFVYGDYKVYDVRKMIAKSEQEIGKATAKYFFYSNIMNFFKTEITLANGEIRKRPLIETNGETGEIVWDKGRDFATVRKVLSMPQVNIVKKTEVQTGGFSKESILPKRNSDKLIARKKDWDPKKYGGFDSPTVAYSVLVVAKVEKGKSKKLKSVKELLGITIMERSSFEKNPIDFLEAKGYKEVKKDLIIKLPKYSLFELENGRKRMLASAGELQKGNELALPSKYVNFLYLASHYEKLKGSPEDNEQKQLFVEQHKHYLDEIIEQISEFSKRVILADANLDKVLSAYNKHRDKPIREQAENIIHLFTLTNLGAPAAFKYFDTTIDRKRYTSTKEVLDATLIHQSITGLYETRIDLSQLGGDGGGSSPAPEAAAKGGMDLLKPLTVERKGVKIKGYWNSQADITCVPKDLLQGEEPVRQQNVTTIHGTQEGDVYYVNLKIDGRRINTEVIGTTLDYAIITPGDVPWILKKPLELTIKLDLEEQQGTLLNNSILSKKGKEELKQLFEKYSALWQSWENQVGHRRIRPHKIATGTVKPTPQKQYHINPKAKPDIQIVINDLLKQGVLIQKESTMNTPVYPVPKPNGRWRMVLDYRAVNKVTPLIAVQNQHSYGILGSLFKGRYKTTIDLSNGFWAHPIVPEDYWITAFTWQGKQYCWTVLPQGFLNSPGLFTGDVVDLLQGIPNVEVYVDDVYISHDSEKEHLEYLDILFNRLKEAGYIISLKKSNIANSIVDFLGFQITNEGRGLTDTFKEKLENITAPTTLKQLQSILGLLNFARNFIPDFTELIAPLYALIPKSTKNYVPWQIEHSTTLETLITKLNGAEYLQGRKGDKTLIMKVNASYTTGYIRYYNEGEKKPISYVSIVFSKTELKFTELEKLLTTVHKGLLKALDLSMGQNIHVYSPIVSMQNIQKTPQTAKKALASRWLSWLSYLEDPRIRFFYDPQMPALKDLPAVDTGKDNKKHPSNFQHIFYTDGSAITSPTKEGHLNAGMGIVYFINKDGNLQKQQEWSISLGNHTAQFAEIAAFEFALKKCLPLGGNILVVTDSNYVAKAYNEELDVWASNGFVNNRKKPLKHISKWKSVADLKRLRPDVVVTHEPGHQKLDSSPHAYGNNLADQLATQASFKVHAGKRTADGSEFEKRTADGSEFESPKKKAKVE

SEQ ID NO: 7590 - protein, 2127 aa, synthetic construct
MPAAKRVKLDGGDKKYSIGLDIGTNSVGWAVITDEYKVPSKKFKVLGNTDRHSIKKNLIGALLFDSGETAEATRLKRTARRRYTRRKNRICYLQEIFSNEMAKVDDSFFHRLEESFLVEEDKKHERHPIFGNIVDEVAYHEKYPTIYHLRKKLVDSTDKADLRLIYLALAHMIKFRGHFLIEGDLNPDNSDVDKLFIQLVQTYNQLFEENPINASGVDAKAILSARLSKSRRLENLIAQLPGEKKNGLFGNLIALSLGLTPNFKSNFDLAEDAKLQLSKDTYDDDLDNLLAQIGDQYADLFLAAKNLSDAILLSDILRVNTEITKAPLSASMIKRYDEHHQDLTLLKALVRQQLPEKYKEIFFDQSKNGYAGYIDGGASQEEFYKFIKPILEKMDGTEELLVKLNREDLLRKQRTFDNGSIPHQIHLGELHAILRRQEDFYPFLKDNREKIEKILTFRIPYYVGPLARGNSRFAWMTRKSEETITPWNFEEVVDKGASAQSFIERMTNFDKNLPNEKVLPKHSLLYEYFTVYNELTKVKYVTEGMRKPAFLSGEQKKAIVDLLFKTNRKVTVKQLKEDYFKKIECFDSVEISGVEDRFNASLGTYHDLLKIIKDKDFLDNEENEDILEDIVLTLTLFEDREMIEERLKTYAHLFDDKVMKQLKRRRYTGWGRLSRKLINGIRDKQSGKTILDFLKSDGFANRNFMQLIHDDSLTFKEDIQKAQVSGQGDSLHEHIANLAGSPAIKKGILQTVKVVDELVKVMGRHKPENIVIEMARENQTTQKGQKNSRERMKRIEEGIKELGSQILKEHPVENTQLQNEKLYLYYLQNGRDMYVDQELDINRLSDYDVDHIVPQSFLKDDSIDNKVLTRSDKARGKSDNVPSEEVVKKMKNYWRQLLNAKLITQRKFDNLTKAERGGLSELDKAGFIKRQLVETRQITKHVAQILDSRMNTKYDENDKLIREVKVITLKSKLVSDFRKDFQFYKVREINNYHHAHDAYLNAVVGTALIKKYPKLESEFVYGDYKVYDVRKMIAKSEQEIGKATAKYFFYSNIMNFFKTEITLANGEIRKRPLIETNGETGEIVWDKGRDFATVRKVLSMPQVNIVKKTEVQTGGFSKESILPKRNSDKLIARKKDWDPKKYGGFDSPTVAYSVLVVAKVEKGKSKKLKSVKELLGITIMERSSFEKNPIDFLEAKGYKEVKKDLIIKLPKYSLFELENGRKRMLASAGELQKGNELALPSKYVNFLYLASHYEKLKGSPEDNEQKQLFVEQHKHYLDEIIEQISEFSKRVILADANLDKVLSAYNKHRDKPIREQAENIIHLFTLTNLGAPAAFKYFDTTIDRKRYTSTKEVLDATLIHQSITGLYETRIDLSQLGGDGGGSSPAPEAAAKGGLLGRDLLTKLKAQIQFSTEGPQVTWEDRPAMCLVLNLEEEYRLHEKPVPPSIDPSWLQLFPMVWAEKAGMGLANQVPPVVVELKSDASPVAVRQYPMSKEAREGIRPHIQRFLDLGILVPCQSPWNTPLLPVKKPGTNDYRPVQDLREVNKRVQDIHPTVPNPYNLLSSLPPSHTWYSVLDLKDAFFCLKLHPNSQPLFAFEWRDPEKGNTGQLTWTRLPQGFKNSPTLFNEALHRDLASFRALNPQVVMLQYVDDLLVAAPTYRDCKEGTRRLLQELSKLGYRVSAKKAQLCREEVTYLGYLLKGGKRWLTPARKATVMKIPTPTTPRQVREFLGTAGFCRLWIPGFASLAAPLYPLTRPKVPFTWTEAHQEAFGRIKEALLSAPALALPDLTKPFALYVDEKEGVARGVLTQTLGPWRRPVAYLSKKLDPVASGWPTCLKAIAAVALLLKDADKLTLGQNVLVIAPHNLESIVRQPPDRWMTNARMTHYQSLLLNERVSFAPPAILNPATLLPVESDDTPIHICSEILAEETGTRPDLRDQPLPGVPAWYTDGSSFIMDGRRQAGAAIVDNKRTVWASNLPEGTSAQKAELIALTQALRLAEGKSINIYTDSRYAFATAHVHGAIYKQRGWLTSAGKDIKNKEEILALLEAIHLPKRVAIIHCPGHQRGTDPVATGNRKADEAAKQAAQSTRILTETTKNAGKRTADGSEFEKRTADGSEFESPKKKAKVE

SEQ ID NO: 7591 - protein, 2218 aa, synthetic construct
MPAAKRVKLDGGDKKYSIGLDIGTNSVGWAVITDEYKVPSKKFKVLGNTDRHSIKKNLIGALLFDSGETAEATRLKRTARRRYTRRKNRICYLQEIFSNEMAKVDDSFFHRLEESFLVEEDKKHERHPIFGNIVDEVAYHEKYPTIYHLRKKLVDSTDKADLRLIYLALAHMIKFRGHFLIEGDLNPDNSDVDKLFIQLVQTYNQLFEENPINASGVDAKAILSARLSKSRRLENLIAQLPGEKKNGLFGNLIALSLGLTPNFKSNFDLAEDAKLQLSKDTYDDDLDNLLAQIGDQYADLFLAAKNLSDAILLSDILRVNTEITKAPLSASMIKRYDEHHQDLTLLKALVRQQLPEKYKEIFFDQSKNGYAGYIDGGASQEEFYKFIKPILEKMDGTEELLVKLNREDLLRKQRTFDNGSIPHQIHLGELHAILRRQEDFYPFLKDNREKIEKILTFRIPYYVGPLARGNSRFAWMTRKSEETITPWNFEEVVDKGASAQSFIERMTNFDKNLPNEKVLPKHSLLYEYFTVYNELTKVKYVTEGMRKPAFLSGEQKKAIVDLLFKTNRKVTVKQLKEDYFKKIECFDSVEISGVEDRFNASLGTYHDLLKIIKDKDFLDNEENEDILEDIVLTLTLFEDREMIEERLKTYAHLFDDKVMKQLKRRRYTGWGRLSRKLINGIRDKQSGKTILDFLKSDGFANRNFMQLIHDDSLTFKEDIQKAQVSGQGDSLHEHIANLAGSPAIKKGILQTVKVVDELVKVMGRHKPENIVIEMARENQTTQKGQKNSRERMKRIEEGIKELGSQILKEHPVENTQLQNEKLYLYYLQNGRDMYVDQELDINRLSDYDVDHIVPQSFLKDDSIDNKVLTRSDKARGKSDNVPSEEVVKKMKNYWRQLLNAKLITQRKFDNLTKAERGGLSELDKAGFIKRQLVETRQITKHVAQILDSRMNTKYDENDKLIREVKVITLKSKLVSDFRKDFQFYKVREINNYHHAHDAYLNAVVGTALIKKYPKLESEFVYGDYKVYDVRKMIAKSEQEIGKATAKYFFYSNIMNFFKTEITLANGEIRKRPLIETNGETGEIVWDKGRDFATVRKVLSMPQVNIVKKTEVQTGGFSKESILPKRNSDKLIARKKDWDPKKYGGFDSPTVAYSVLVVAKVEKGKSKKLKSVKELLGITIMERSSFEKNPIDFLEAKGYKEVKKDLIIKLPKYSLFELENGRKRMLASAGELQKGNELALPSKYVNFLYLASHYEKLKGSPEDNEQKQLFVEQHKHYLDEIIEQISEFSKRVILADANLDKVLSAYNKHRDKPIREQAENIIHLFTLTNLGAPAAFKYFDTTIDRKRYTSTKEVLDATLIHQSITGLYETRIDLSQLGGDGGGSSPAPEAAAKGGTLGDQGSRGSDPLPEPRVTLTVEGIPTEFLVNTGAEHSVLTKPMGKMGSKRTVVAGATGSKVYPWTTKRLLKIGQKQVTHSFLVIPECPAPLLGRDLLTKLKAQIQFSTEGPQVTWEDRPAMCLVLNLEEEYRLHEKPVPPSIDPSWLQLFPMVWAEKAGMGLANQVPPVVVELKSDASPVAVRQYPMSKEAREGIRPHIQRFLDLGILVPCQSPWNTPLLPVKKPGTNDYRPVQDLREVNKRVQDIHPTVPNPYNLLSSLPPSHTWYSVLDLKDAFFCLKLHPNSQPLFAFEWRDPEKGNTGQLTWTRLPQGFKNSPTLFNEALHRDLASFRALNPQVVMLQYVDDLLVAAPTYRDCKEGTRRLLQELSKLGYRVSAKKAQLCREEVTYLGYLLKGGKRWLTPARKATVMKIPTPTTPRQVREFLGTAGFCRLWIPGFASLAAPLYPLTRPKVPFTWTEAHQEAFGRIKEALLSAPALALPDLTKPFALYVDEKEGVARGVLTQTLGPWRRPVAYLSKKLDPVASGWPTCLKAIAAVALLLKDADKLTLGQNVLVIAPHNLESIVRQPPDRWMTNARMTHYQSLLLNERVSFAPPAILNPATLLPVESDDTPIHICSEILAEETGTRPDLRDQPLPGVPAWYTDGSSFIMDGRRQAGAAIVDNKRTVWASNLPEGTSAQKAELIALTQALRLAEGKSINIYTDSRYAFATAHVHGAIYKQRGWLTSAGKDIKNKEEILALLEAIHLPKRVAIIHCPGHQRGTDPVATGNRKADEAAKQAAQSTRILTETTKNAGKRTADGSEFEKRTADGSEFESPKKKAKVE

SEQ ID NO: 7592 - protein, 2096 aa, synthetic construct
MPAAKRVKLDGGDKKYSIGLDIGTNSVGWAVITDEYKVPSKKFKVLGNTDRHSIKKNLIGALLFDSGETAEATRLKRTARRRYTRRKNRICYLQEIFSNEMAKVDDSFFHRLEESFLVEEDKKHERHPIFGNIVDEVAYHEKYPTIYHLRKKLVDSTDKADLRLIYLALAHMIKFRGHFLIEGDLNPDNSDVDKLFIQLVQTYNQLFEENPINASGVDAKAILSARLSKSRRLENLIAQLPGEKKNGLFGNLIALSLGLTPNFKSNFDLAEDAKLQLSKDTYDDDLDNLLAQIGDQYADLFLAAKNLSDAILLSDILRVNTEITKAPLSASMIKRYDEHHQDLTLLKALVRQQLPEKYKEIFFDQSKNGYAGYIDGGASQEEFYKFIKPILEKMDGTEELLVKLNREDLLRKQRTFDNGSIPHQIHLGELHAILRRQEDFYPFLKDNREKIEKILTFRIPYYVGPLARGNSRFAWMTRKSEETITPWNFEEVVDKGASAQSFIERMTNFDKNLPNEKVLPKHSLLYEYFTVYNELTKVKYVTEGMRKPAFLSGEQKKAIVDLLFKTNRKVTVKQLKEDYFKKIECFDSVEISGVEDRFNASLGTYHDLLKIIKDKDFLDNEENEDILEDIVLTLTLFEDREMIEERLKTYAHLFDDKVMKQLKRRRYTGWGRLSRKLINGIRDKQSGKTILDFLKSDGFANRNFMQLIHDDSLTFKEDIQKAQVSGQGDSLHEHIANLAGSPAIKKGILQTVKVVDELVKVMGRHKPENIVIEMARENQTTQKGQKNSRERMKRIEEGIKELGSQILKEHPVENTQLQNEKLYLYYLQNGRDMYVDQELDINRLSDYDVDHIVPQSFLKDDSIDNKVLTRSDKARGKSDNVPSEEVVKKMKNYWRQLLNAKLITQRKFDNLTKAERGGLSELDKAGFIKRQLVETRQITKHVAQILDSRMNTKYDENDKLIREVKVITLKSKLVSDFRKDFQFYKVREINNYHHAHDAYLNAVVGTALIKKYPKLESEFVYGDYKVYDVRKMIAKSEQEIGKATAKYFFYSNIMNFFKTEITLANGEIRKRPLIETNGETGEIVWDKGRDFATVRKVLSMPQVNIVKKTEVQTGGFSKESILPKRNSDKLIARKKDWDPKKYGGFDSPTVAYSVLVVAKVEKGKSKKLKSVKELLGITIMERSSFEKNPIDFLEAKGYKEVKKDLIIKLPKYSLFELENGRKRMLASAGELQKGNELALPSKYVNFLYLASHYEKLKGSPEDNEQKQLFVEQHKHYLDEIIEQISEFSKRVILADANLDKVLSAYNKHRDKPIREQAENIIHLFTLTNLGAPAAFKYFDTTIDRKRYTSTKEVLDATLIHQSITGLYETRIDLSQLGGDGGGSSPAPEAAAKGGTLGIEDEYRLHETSTEPDVSLGSTWLSDFPQAWAETGGMGLAVRQAPLIIPLKATSTPVSIQQYPMSHEARLGIKPHIQRLLDQGILVPCQSPWNTPLLPVKKPGTNDYRPVQDLREVNKRVEDIHPTVPNPYNLLSGLPPSHQWYTVLDLKDAFFCLRLHPTSQPLFAFEWRDPGMGISGQLTWTRLPQGFKNSPTLFNEALHRDLADFRIQHPDLILLQYVDDILLAATSELDCQQGTRALLQTLGDLGYRASAKKAQICQKQVKYLGYLLREGQRWLTEARKETVMGQPVPKTPRQLREFLGTAGFCRLWIPGFAEMAAPLYPLTKPGTLFSWGPDQQKAYQEIKQALLTAPALGLPDLTKPFELFVDEKQGYAKGVLTQKLGPWRRPVAYLSKKLDPVAAGWPPCLRMVAAIAVLTKDAGKLTMGQPLVILAPHAVEALVKQPPDRWLSNARMTHYQAMLLDTDRVQFGPVVALNPATLLPLPEEGAPHDCLEILAETHGTRPDLTDQPIPDADHTWYTDGSSFLQEGQRKAGAAVTTETEVIWAGALPAGTSAQRAELIALTQALKMAEGKRLNVYTDSRYAFATAHIHGEIYRRRGWLTSEGREIKNKSEILALLKALFLPKRLSIIHCLGHQKGDSAEARGNRLADQAAREAAIKTPPDTSTLLAGKRTADGSEFEKRTADGSEFESPKKKAKVE

SEQ ID NO: 7593 - protein, 2096 aa, synthetic construct
MPAAKRVKLDGGDKKYSIGLDIGTNSVGWAVITDEYKVPSKKFKVLGNTDRHSIKKNLIGALLFDSGETAEATRLKRTARRRYTRRKNRICYLQEIFSNEMAKVDDSFFHRLEESFLVEEDKKHERHPIFGNIVDEVAYHEKYPTIYHLRKKLVDSTDKADLRLIYLALAHMIKFRGHFLIEGDLNPDNSDVDKLFIQLVQTYNQLFEENPINASGVDAKAILSARLSKSRRLENLIAQLPGEKKNGLFGNLIALSLGLTPNFKSNFDLAEDAKLQLSKDTYDDDLDNLLAQIGDQYADLFLAAKNLSDAILLSDILRVNTEITKAPLSASMIKRYDEHHQDLTLLKALVRQQLPEKYKEIFFDQSKNGYAGYIDGGASQEEFYKFIKPILEKMDGTEELLVKLNREDLLRKQRTFDNGSIPHQIHLGELHAILRRQEDFYPFLKDNREKIEKILTFRIPYYVGPLARGNSRFAWMTRKSEETITPWNFEEVVDKGASAQSFIERMTNFDKNLPNEKVLPKHSLLYEYFTVYNELTKVKYVTEGMRKPAFLSGEQKKAIVDLLFKTNRKVTVKQLKEDYFKKIECFDSVEISGVEDRFNASLGTYHDLLKIIKDKDFLDNEENEDILEDIVLTLTLFEDREMIEERLKTYAHLFDDKVMKQLKRRRYTGWGRLSRKLINGIRDKQSGKTILDFLKSDGFANRNFMQLIHDDSLTFKEDIQKAQVSGQGDSLHEHIANLAGSPAIKKGILQTVKVVDELVKVMGRHKPENIVIEMARENQTTQKGQKNSRERMKRIEEGIKELGSQILKEHPVENTQLQNEKLYLYYLQNGRDMYVDQELDINRLSDYDVDHIVPQSFLKDDSIDNKVLTRSDKARGKSDNVPSEEVVKKMKNYWRQLLNAKLITQRKFDNLTKAERGGLSELDKAGFIKRQLVETRQITKHVAQILDSRMNTKYDENDKLIREVKVITLKSKLVSDFRKDFQFYKVREINNYHHAHDAYLNAVVGTALIKKYPKLESEFVYGDYKVYDVRKMIAKSEQEIGKATAKYFFYSNIMNFFKTEITLANGEIRKRPLIETNGETGEIVWDKGRDFATVRKVLSMPQVNIVKKTEVQTGGFSKESILPKRNSDKLIARKKDWDPKKYGGFDSPTVAYSVLVVAKVEKGKSKKLKSVKELLGITIMERSSFEKNPIDFLEAKGYKEVKKDLIIKLPKYSLFELENGRKRMLASAGELQKGNELALPSKYVNFLYLASHYEKLKGSPEDNEQKQLFVEQHKHYLDEIIEQISEFSKRVILADANLDKVLSAYNKHRDKPIREQAENIIHLFTLTNLGAPAAFKYFDTTIDRKRYTSTKEVLDATLIHQSITGLYETRIDLSQLGGDGGGSSPAPEAAAKGGTLNIEDEHRLHETSKEPDVSLGSTWLSDFPQAWAETGGMGLAVRQAPLIIPLKATSTPVSIKQYPMSQEARLGIKPHIQRLLDQGILVPCQSPWNTPLLPVKKPGTNDYRPVQDLREVNKRVEDIHPTVPNPYNLLSGLPPSHQWYTVLDLKDAFFCLRLHPTSQPLFAFEWRDPEMGISGQLTWTRLPQGFKNSPTLFDEALHRDLADFRIQHPDLILLQYVDDLLLAATSELDCQQGTRALLQTLGNLGYRASAKKAQICQKQVKYLGYLLKEGQRWLTEARKETVMGQPTPKTPRQLREFLGTAGFCRLWIPGFAEMAAPLYPLTKTGTLFNWGPDQQKAYQEIKQALLTAPALGLPDLTKPFELFVDEKQGYAKGVLTQKLGPWRRPVAYLSKKLDPVAAGWPPCLRMVAAIAVLTKDAGKLTMGQPLVILAPHAVEALVKQPPDRWLSNARMTHYQALLLDTDRVQFGPVVALNPATLLPLPEEGLQHNCLDILAEAHGTRPDLTDQPLPDADHTWYTDGSSLLQEGQRKAGAAVTTETEVIWAKALPAGTSAQRAELIALTQALKMAEGKKLNVYTDSRYAFATAHIHGEIYRRRGLLTSEGKEIKNKDEILALLKALFLPKRLSIIHCPGHQKGHSAEARGNRMADQAARKAAITETPDTSTLLAGKRTADGSEFEKRTADGSEFESPKKKAKVE

SEQ ID NO: 7594 - protein, 2096 aa, synthetic construct; identical to SEQ ID NO: 7593

SEQ ID NO: 7595 - protein, 2096 aa, synthetic construct
MPAAKRVKLDGGDKKYSIGLDIGTNSVGWAVITDEYKVPSKKFKVLGNTDRHSIKKNLIGALLFDSGETAEATRLKRTARRRYTRRKNRICYLQEIFSNEMAKVDDSFFHRLEESFLVEEDKKHERHPIFGNIVDEVAYHEKYPTIYHLRKKLVDSTDKADLRLIYLALAHMIKFRGHFLIEGDLNPDNSDVDKLFIQLVQTYNQLFEENPINASGVDAKAILSARLSKSRRLENLIAQLPGEKKNGLFGNLIALSLGLTPNFKSNFDLAEDAKLQLSKDTYDDDLDNLLAQIGDQYADLFLAAKNLSDAILLSDILRVNTEITKAPLSASMIKRYDEHHQDLTLLKALVRQQLPEKYKEIFFDQSKNGYAGYIDGGASQEEFYKFIKPILEKMDGTEELLVKLNREDLLRKQRTFDNGSIPHQIHLGELHAILRRQEDFYPFLKDNREKIEKILTFRIPYYVGPLARGNSRFAWMTRKSEETITPWNFEEVVDKGASAQSFIERMTNFDKNLPNEKVLPKHSLLYEYFTVYNELTKVKYVTEGMRKPAFLSGEQKKAIVDLLFKTNRKVTVKQLKEDYFKKIECFDSVEISGVEDRFNASLGTYHDLLKIIKDKDFLDNEENEDILEDIVLTLTLFEDREMIEERLKTYAHLFDDKVMKQLKRRRYTGWGRLSRKLINGIRDKQSGKTILDFLKSDGFANRNFMQLIHDDSLTFKEDIQKAQVSGQGDSLHEHIANLAGSPAIKKGILQTVKVVDELVKVMGRHKPENIVIEMARENQTTQKGQKNSRERMKRIEEGIKELGSQILKEHPVENTQLQNEKLYLYYLQNGRDMYVDQELDINRLSDYDVDHIVPQSFLKDDSIDNKVLTRSDKARGKSDNVPSEEVVKKMKNYWRQLLNAKLITQRKFDNLTKAERGGLSELDKAGFIKRQLVETRQITKHVAQILDSRMNTKYDENDKLIREVKVITLKSKLVSDFRKDFQFYKVREINNYHHAHDAYLNAVVGTALIKKYPKLESEFVYGDYKVYDVRKMIAKSEQEIGKATAKYFFYSNIMNFFKTEITLANGEIRKRPLIETNGETGEIVWDKGRDFATVRKVLSMPQVNIVKKTEVQTGGFSKESILPKRNSDKLIARKKDWDPKKYGGFDSPTVAYSVLVVAKVEKGKSKKLKSVKELLGITIMERSSFEKNPIDFLEAKGYKEVKKDLIIKLPKYSLFELENGRKRMLASAGELQKGNELALPSKYVNFLYLASHYEKLKGSPEDNEQKQLFVEQHKHYLDEIIEQISEFSKRVILADANLDKVLSAYNKHRDKPIREQAENIIHLFTLTNLGAPAAFKYFDTTIDRKRYTSTKEVLDATLIHQSITGLYETRIDLSQLGGDGGGSSPAPEAAAKGGTLNIEDEYRLHEISTEPDVSPGSTWLSDFPQAWAETGGMGLAVRQAPLIIPLKATSTPVSIKQYPMSQEAKLGIKPHIQRLLDQGILVPCQSPWNTPLLPVKKPGTNDYRPVQGLREVNKRVEDIHPTVPNPYNLLSGLPTSHRWYTVLDLKDAFFCLRLHPTSQPLFASEWRDPGMGISGQLTWTRLPQGFKNSPTLFNEALHRGLADFRIQHPDLILLQYVDDLLLAATSELDCQQGTRALLKTLGNLGYRASAKKAQICQKQVKYLGYLLREGQRWLTEARKETVMGQPTPKTPRQLREFLGTAGFCRLWIPRFAEMAAPLYPLTKPGTLFNWGPDQQKAYHEIKQALLTAPALGLPDLTKPFELFVDEKQGYAKGVLTQKLGPWRRPVAYLSKKLDPVAAGWPPCLRMVAAIAVLTKDAGKLTMGQPLVILAPHAVEALVKQPPDRWLSNARMTHYQAMLLDTDRVQFGPVVALNPATLLPLPEEGAPHDCLEILAETHGTEPDLTDQPIPDADHTWYTDGSSFLQEGQRKAGAAVTTETEVIWARALPAGTSAQRAELIALTQALKMAEGKRLNVYTDSRYAFATAHIHGEIYKRRGWLTSEGREIKNKSEILALLKALFLPKRLSIIHCLGHQKGDSAEARGNRLADQAAREAAIKTPPDTSTLLAGKRTADGSEFEKRTADGSEFESPKKKAKVE

SEQ ID NO: 7596 - protein, 2090 aa, synthetic construct
MPAAKRVKLDGGDKKYSIGLDIGTNSVGWAVITDEYKVPSKKFKVLGNTDRHSIKKNLIGALLFDSGETAEATRLKRTARRRYTRRKNRICYLQEIFSNEMAKVDDSFFHRLEESFLVEEDKKHERHPIFGNIVDEVAYHEKYPTIYHLRKKLVDSTDKADLRLIYLALAHMIKFRGHFLIEGDLNPDNSDVDKLFIQLVQTYNQLFEENPINASGVDAKAILSARLSKSRRLENLIAQLPGEKKNGLFGNLIALSLGLTPNFKSNFDLAEDAKLQLSKDTYDDDLDNLLAQIGDQYADLFLAAKNLSDAILLSDILRVNTEITKAPLSASMIKRYDEHHQDLTLLKALVRQQLPEKYKEIFFDQSKNGYAGYIDGGASQEEFYKFIKPILEKMDGTEELLVKLNREDLLRKQRTFDNGSIPHQIHLGELHAILRRQEDFYPFLKDNREKIEKILTFRIPYYVGPLARGNSRFAWMTRKSEETITPWNFEEVVDKGASAQSFIERMTNFDKNLPNEKVLPKHSLLYEYFTVYNELTKVKYVTEGMRKPAFLSGEQKKAIVDLLFKTNRKVTVKQLKEDYFKKIECFDSVEISGVEDRFNASLGTYHDLLKIIKDKDFLDNEENEDILEDIVLTLTLFEDREMIEERLKTYAHLFDDKVMKQLKRRRYTGWGRLSRKLINGIRDKQSGKTILDFLKSDGFANRNFMQLIHDDSLTFKEDIQKAQVSGQGDSLHEHIANLAGSPAIKKGILQTVKVVDELVKVMGRHKPENIVIEMARENQTTQKGQKNSRERMKRIEEGIKELGSQILKEHPVENTQLQNEKLYLYYLQNGRDMYVDQELDINRLSDYDVDHIVPQSFLKDDSIDNKVLTRSDKARGKSDNVPSEEVVKKMKNYWRQLLNAKLITQRKFDNLTKAERGGLSELDKAGFIKRQLVETRQITKHVAQILDSRMNTKYDENDKLIREVKVITLKSKLVSDFRKDFQFYKVREINNYHHAHDAYLNAVVGTALIKKYPKLESEFVYGDYKVYDVRKMIAKSEQEIGKATAKYFFYSNIMNFFKTEITLANGEIRKRPLIETNGETGEIVWDKGRDFATVRKVLSMPQVNIVKKTEVQTGGFSKESILPKRNSDKLIARKKDWDPKKYGGFDSPTVAYSVLVVAKVEKGKSKKLKSVKELLGITIMERSSFEKNPIDFLEAKGYKEVKKDLIIKLPKYSLFELENGRKRMLASAGELQKGNELALPSKYVNFLYLASHYEKLKGSPEDNEQKQLFVEQHKHYLDEIIEQISEFSKRVILADANLDKVLSAYNKHRDKPIREQAENIIHLFTLTNLGAPAAFKYFDTTIDRKRYTSTKEVLDATLIHQSITGLYETRIDLSQLGGDGGGSSPAPEAAAKGGTLQLDDEYRLYSPLVKPDQNIQFWLEQFPQAWAETAGMGLAKQVPPQVIQLKASATPVSVRQYPLSKEAQEGIRPHVQRLIQQGILVPVQSPWNTPLLPVRKPGTNDYRPVQDLREVNKRVQDIHPTVPNPYNLLCALPPQRSWYTVLDLKDAFFCLRLHPTSQPLFAFEWRDPGTGRTGQLTWTRLPQGFKNSPTIFDEALHRDLANFRIQHPQVTLLQYVDDLLLAGATKQDCLEGTKALLLELSDLGYRASAKKAQICRREVTYLGYSLRDGQRWLTEARKKTVVQIPAPTTAKQVREFLGTAGFCRLWIPGFATLAAPLYPLTKEKGEFSWAPEHQKAFDAIKKALLSAPALALPDVTKPFTLYVDERKGVARGVLTQTLGPWRRPVAYLSKKLDPVASGWPVCLKAIAAVAILVKDADKLTLGQNITVIAPHALENIVRQPPDRWMTNARMTHYQSLLLTERVTFAPPAALNPATLLPEETDEPVTHDCHQLLIEETGVRKDLTDIPLTGEVLTWFTDGSSYVVEGKRMAGAAVVDGTRTIWASSLPEGTSAQKAELMALTQALRLAEGKSINIYTDSRYAFATAHVHGAIYKQRGLLTSAGREIKNKEEILSLLEALHLPKRLAIIHCPGHQKAKDPISRGNQMADRVAKQAAQGVNLLAGKRTADGSEFEKRTADGSEFESPKKKAKVE

SEQ ID NO: 7597 - protein, 2090 aa, synthetic construct; identical to SEQ ID NO: 7596

SEQ ID NO: 7598 - protein, 2176 aa, synthetic construct
MPAAKRVKLDGGDKKYSIGLDIGTNSVGWAVITDEYKVPSKKFKVLGNTDRHSIKKNLIGALLFDSGETAEATRLKRTARRRYTRRKNRICYLQEIFSNEMAKVDDSFFHRLEESFLVEEDKKHERHPIFGNIVDEVAYHEKYPTIYHLRKKLVDSTDKADLRLIYLALAHMIKFRGHFLIEGDLNPDNSDVDKLFIQLVQTYNQLFEENPINASGVDAKAILSARLSKSRRLENLIAQLPGEKKNGLFGNLIALSLGLTPNFKSNFDLAEDAKLQLSKDTYDDDLDNLLAQIGDQYADLFLAAKNLSDAILLSDILRVNTEITKAPLSASMIKRYDEHHQDLTLLKALVRQQLPEKYKEIFFDQSKNGYAGYIDGGASQEEFYKFIKPILEKMDGTEELLVKLNREDLLRKQRTFDNGSIPHQIHLGELHAILRRQEDFYPFLKDNREKIEKILTFRIPYYVGPLARGNSRFAWMTRKSEETITPWNFEEVVDKGASAQSFIERMTNFDKNLPNEKVLPKHSLLYEYFTVYNELTKVKYVTEGMRKPAFLSGEQKKAIVDLLFKTNRKVTVKQLKEDYFKKIECFDSVEISGVEDRFNASLGTYHDLLKIIKDKDFLDNEENEDILEDIVLTLTLFEDREMIEERLKTYAHLFDDKVMKQLKRRRYTGWGRLSRKLINGIRDKQSGKTILDFLKSDGFANRNFMQLIHDDSLTFKEDIQKAQVSGQGDSLHEHIANLAGSPAIKKGILQTVKVVDELVKVMGRHKPENIVIEMARENQTTQKGQKNSRERMKRIEEGIKELGSQILKEHPVENTQLQNEKLYLYYLQNGRDMYVDQELDINRLSDYDVDHIVPQSFLKDDSIDNKVLTRSDKARGKSDNVPSEEVVKKMKNYWRQLLNAKLITQRKFDNLTKAERGGLSELDKAGFIKRQLVETRQITKHVAQILDSRMNTKYDENDKLIREVKVITLKSKLVSDFRKDFQFYKVREINNYHHAHDAYLNAVVGTALIKKYPKLESEFVYGDYKVYDVRKMIAKSEQEIGKATAKYFFYSNIMNFFKTEITLANGEIRKRPLIETNGETGEIVWDKGRDFATVRKVLSMPQVNIVKKTEVQTGGFSKESILPKRNSDKLIARKKDWDPKKYGGFDSPTVAYSVLVVAKVEKGKSKKLKSVKELLGITIMERSSFEKNPIDFLEAKGYKEVKKDLIIKLPKYSLFELENGRKRMLASAGELQKGNELALPSKYVNFLYLASHYEKLKGSPEDNEQKQLFVEQHKHYLDEIIEQISEFSKRVILADANLDKVLSAYNKHRDKPIREQAENIIHLFTLTNLGAPAAFKYFDTTIDRKRYTSTKEVLDATLIHQSITGLYETRIDLSQLGGDGGGSSPAPEAAAKGGMDPLQLLQPLEAEIKGTKLKAHWNSGATITCVPEAFLEDERPIQTMLIKTIHGEKQQDVYYLTFKVQGRKVEAEVLASPYDYILLNPSDVPWLMKKPLQLTVLVPLHEYQERLLQQTALPKEQKELLQKLFLKYDALWQHWENQVGHRRIKPHNIATGTLAPRPQKQYPINPKAKPSIQIVIDDLLKQGVLIQQNSTMNTPVYPVPKPDGKWRMVLDYREVNKTIPLIAAQNQHSAGILSSIYRGKYKTTLDLTNGFWAHPITPESYWLTAFTWQGKQYCWTRLPQGFLNSPALFTADVVDLLKEIPNVQAYVDDIYISHDDPQEHLEQLEKIFSILLNAGYVVSLKKSEIAQREVEFLGFNITKEGRGLTDTFKQKLLNITPPKDLKQLQSILGLLNFARNFIPNYSELVKPLYTIVANANGKFISWTEDNSNQLQHIISVLNQADNLEERNPETRLIIKVNSSPSAGYIRYYNEGSKRPIMYVNYIFSKAEAKFTQTEKLLTTMHKGLIKAMDLAMGQEILVYSPIVSMTKIQRTPLPERKALPVRWITWMTYLEDPRIQFHYDKSLPELQQIPNVTEDVIAKTKHPSEFAMVFYTDGSAIKHPDVNKSHSAGMGIAQVQFIPEYKIVHQWSIPLGDHTAQLAEIAAVEFACKKALKISGPVLIVTDSFYVAESANKELPYWKSNGFLNNKKKPLRHVSKWKSIAECLQLKPDIIIMHEKGHQQPMTTLHTEGNNLADKLATQGSYVVHAGKRTADGSEFEKRTADGSEFESPKKKAKVE

SEQ ID NO: 7599 - protein, 2087 aa, synthetic construct
MPAAKRVKLDGGDKKYSIGLDIGTNSVGWAVITDEYKVPSKKFKVLGNTDRHSIKKNLIGALLFDSGETAEATRLKRTARRRYTRRKNRICYLQEIFSNEMAKVDDSFFHRLEESFLVEEDKKHERHPIFGNIVDEVAYHEKYPTIYHLRKKLVDSTDKADLRLIYLALAHMIKFRGHFLIEGDLNPDNSDVDKLFIQLVQTYNQLFEENPINASGVDAKAILSARLSKSRRLENLIAQLPGEKKNGLFGNLIALSLGLTPNFKSNFDLAEDAKLQLSKDTYDDDLDNLLAQIGDQYADLFLAAKNLSDAILLSDILRVNTEITKAPLSASMIKRYDEHHQDLTLLKALVRQQLPEKYKEIFFDQSKNGYAGYIDGGASQEEFYKFIKPILEKMDGTEELLVKLNREDLLRKQRTFDNGSIPHQIHLGELHAILRRQEDFYPFLKDNREKIEKILTFRIPYYVGPLARGNSRFAWMTRKSEETITPWNFEEVVDKGASAQSFIERMTNFDKNLPNEKVLPKHSLLYEYFTVYNELTKVKYVTEGMRKPAFLSGEQKKAIVDLLFKTNRKVTVKQLKEDYFKKIECFDSVEISGVEDRFNASLGTYHDLLKIIKDKDFLDNEENEDILEDIVLTLTLFEDREMIEERLKTYAHLFDDKVMKQLKRRRYTGWGRLSRKLINGIRDKQSGKTILDFLKSDGFANRNFMQLIHDDSLTFKEDIQKAQVSGQGDSLHEHIANLAGSPAIKKGILQTVKVVDELVKVMGRHKPENIVIEMARENQTTQKGQKNSRERMKRIEEGIKELGSQILKEHPVENTQLQNEKLYLYYLQNGRDMYVDQELDINRLSDYDVDHIVPQSFLKDDSIDNKVLTRSDKARGKSDNVPSEEVVKKMKNYWRQLLNAKLITQRKFDNLTKAERGGLSELDKAGFIKRQLVETRQITKHVAQILDSRMNTKYDENDKLIREVKVITLKSKLVSDFRKDFQFYKVREINNYHHAHDAYLNAVVGTALIKKYPKLESEFVYGDYKVYDVRKMIAKSEQEIGKATAKYFFYSNIMNFFKTEITLANGEIRKRPLIETNGETGEIVWDKGRDFATVRKVLSMPQVNIVKKTEVQTGGFSKESILPKRNSDKLIARKKDWDPKKYGGFDSPTVAYSVLVVAKVEKGKSKKLKSVKELLGITIMERSSFEKNPIDFLEAKGYKEVKKDLIIKLPKYSLFELENGRKRMLASAGELQKGNELALPSKYVNFLYLASHYEKLKGSPEDNEQKQLFVEQHKHYLDEIIEQISEFSKRVILADANLDKVLSAYNKHRDKPIREQAENIIHLFTLTNLGAPAAFKYFDTTIDRKRYTSTKEVLDATLIHQSITGLYETRIDLSQLGGDGGGSSPAPEAAAKGGIPWLMKKPLQLTTLVPLQEYEERLLKQTMLTGSYKEKLQSLFLKYDALWQHWENQVGHRRIKPHHIATGTVNPRPQKQYPINPKAKASIQTVINDLLKQGVLIQQNSIMNTPVYPVPKPDGKWRMVLDYREVNKTIPLIAAQNQHSAGILSSIFRGKYKTTLDLSNGFWAHSITPESYWLTAFTWLGQQYCWTRLPQGFLNSPALFNADVVDLLKEVPNVQVYVDDIYISHDDPREHLEQLEKVFSLLLNAGYVVSLKKSEIAQHEVEFLGFNITKEGRGLTETFKQKLLNITPPRDLKQLQSILGKLNFARNFIPNFSELVKPLYNIIATAPGKYITWTTDNSQQLQNIISMLNSAENLEERNPEVRLIMKVNTSPSAGYIRFYNEFAKRPIMYLNYVYTKAEVKFTNTEKLLTTIHKGLIKALDLGMGQEILVYSPIVSMTKIQKTPLPERKALPIRWITWMSYLEDPRIQFHYDKTLPELQQVPTVTDDIIAKIKHPSEFSMVFYTDGSAIKHPNVNKSHNAGMGIAQVQFKPEFTVINTWSIPLGDHTAQLAEVAAVEFACKKALKIDGPVLIVTDSFYVAESVNKELPYWQSNGFFNNKKKPLKHVSKWKSIADCIQLKPDIIIIHEKGHQPTASTFHTEGNNLADKLATQGSYVVNAGKRTADGSEFEKRTADGSEFESPKKKAKVE

SEQ ID NO: 7600 - protein, 2096 aa, synthetic construct
MPAAKRVKLDGGDKKYSIGLDIGTNSVGWAVITDEYKVPSKKFKVLGNTDRHSIKKNLIGALLFDSGETAEATRLKRTARRRYTRRKNRICYLQEIFSNEMAKVDDSFFHRLEESFLVEEDKKHERHPIFGNIVDEVAYHEKYPTIYHLRKKLVDSTDKADLRLIYLALAHMIKFRGHFLIEGDLNPDNSDVDKLFIQLVQTYNQLFEENPINASGVDAKAILSARLSKSRRLENLIAQLPGEKKNGLFGNLIALSLGLTPNFKSNFDLAEDAKLQLSKDTYDDDLDNLLAQIGDQYADLFLAAKNLSDAILLSDILRVNTEITKAPLSASMIKRYDEHHQDLTLLKALVRQQLPEKYKEIFFDQSKNGYAGYIDGGASQEEFYKFIKPILEKMDGTEELLVKLNREDLLRKQRTFDNGSIPHQIHLGELHAILRRQEDFYPFLKDNREKIEKILTFRIPYYVGPLARGNSRFAWMTRKSEETITPWNFEEVVDKGASAQSFIERMTNFDKNLPNEKVLPKHSLLYEYFTVYNELTKVKYVTEGMRKPAFLSGEQKKAIVDLLFKTNRKVTVKQLKEDYFKKIECFDSVEISGVEDRFNASLGTYHDLLKIIKDKDFLDNEENEDILEDIVLTLTLFEDREMIEERLKTYAHLFDDKVMKQLKRRRYTGWGRLSRKLINGIRDKQSGKTILDFLKSDGFANRNFMQLIHDDSLTFKEDIQKAQVSGQGDSLHEHIANLAGSPAIKKGILQTVKVVDELVKVMGRHKPENIVIEMARENQTTQKGQKNSRERMKRIEEGIKELGSQILKEHPVENTQLQNEKLYLYYLQNGRDMYVDQELDINRLSDYDVDHIVPQSFLKDDSIDNKVLTRSDKARGKSDNVPSEEVVKKMKNYWRQLLNAKLITQRKFDNLTKAERGGLSELDKAGFIKRQLVETRQITKHVAQILDSRMNTKYDENDKLIREVKVITLKSKLVSDFRKDFQFYKVREINNYHHAHDAYLNAVVGTALIKKYPKLESEFVYGDYKVYDVRKMIAKSEQEIGKATAKYFFYSNIMNFFKTEITLANGEIRKRPLIETNGETGEIVWDKGRDFATVRKVLSMPQVNIVKKTEVQTGGFSKESILPKRNSDKLIARKKDWDPKKYGGFDSPTVAYSVLVVAKVEKGKSKKLKSVKELLGITIMERSSFEKNPIDFLEAKGYKEVKKDLIIKLPKYSLFELENGRKRMLASAGELQKGNELALPSKYVNFLYLASHYEKLKGSPEDNEQKQLFVEQHKHYLDEIIEQISEFSKRVILADANLDKVLSAYNKHRDKPIREQAENIIHLFTLTNLGAPAAFKYFDTTIDRKRYTSTKEVLDATLIHQSITGLYETRIDLSQLGGDGGGSSPAPEAAAKGGTLNIEDEYRLHETSKEPDVPLGSTWLSDFPQAWAETGGMGLAVRQAPLIIPLKATSTPVSIKQYPMSQEARLGIKPHIQRLLDQGILVPCQSPWNTPLLPVKKPGTNDYRPVQDLREVNKRVEDIHPTVPNPYNLLSGLPPSHQWYTVLDLKDAFFCLRLHPTSQPLFAFEWRDPEMGISGQLTWTRLPQGFKNSPTLFNEALHRDLADFRIQHPDLILLQYVDDLLLAATSEQDCQRGTRALLQTLGNLGYRASAKKAQICQKQVKYLGYLLKEGQRWLTEARKETVMGQPTPKTPRQLREFLGTAGFCRLWIPGFAEMAAPLYPLTKPGTLFNWGPDQQKAYQEIKQALLTAPALGLPDLTKPFELFVDEKQGYAKGVLTQKLGPWRRPVAYLSKKLDPVAAGWPPCLRMVAAIAVLTKDAGKLTMGQPLVILAPHAVEALVKQPPDRWLSNARMTHYQAMLLDTDRVQFGPVVALNPATLLPLPEKEAPHDCLEILAETHGTRPDLTDQPIPDADYTWYTDGSSFLQEGQRRAGAAVTTETEVIWARALPAGTSAQRAELIALTQALKMAEGKKLNVYTDSRYAFATAHVHGEIYRRRGWLTSEGREIKNKNEILALLKALFLPKRLSIIHCPGHQKGNSAEARGNRMADQAAREAAMKAVLETSTLLAGKRTADGSEFEKRTADGSEFESPKKKAKVE

SEQ ID NO: 7601 - protein, 2087 aa, synthetic construct
MPAAKRVKLDGGDKKYSIGLDIGTNSVGWAVITDEYKVPSKKFKVLGNTDRHSIKKNLIGALLFDSGETAEATRLKRTARRRYTRRKNRICYLQEIFSNEMAKVDDSFFHRLEESFLVEEDKKHERHPIFGNIVDEVAYHEKYPTIYHLRKKLVDSTDKADLRLIYLALAHMIKFRGHFLIEGDLNPDNSDVDKLFIQLVQTYNQLFEENPINASGVDAKAILSARLSKSRRLENLIAQLPGEKKNGLFGNLIALSLGLTPNFKSNFDLAEDAKLQLSKDTYDDDLDNLLAQIGDQYADLFLAAKNLSDAILLSDILRVNTEITKAPLSASMIKRYDEHHQDLTLLKALVRQQLPEKYKEIFFDQSKNGYAGYIDGGASQEEFYKFIKPILEKMDGTEELLVKLNREDLLRKQRTFDNGSIPHQIHLGELHAILRRQEDFYPFLKDNREKIEKILTFRIPYYVGPLARGNSRFAWMTRKSEETITPWNFEEVVDKGASAQSFIERMTNFDKNLPNEKVLPKHSLLYEYFTVYNELTKVKYVTEGMRKPAFLSGEQKKAIVDLLFKTNRKVTVKQLKEDYFKKIECFDSVEISGVEDRFNASLGTYHDLLKIIKDKDFLDNEENEDILEDIVLTLTLFEDREMIEERLKTYAHLFDDKVMKQLKRRRYTGWGRLSRKLINGIRDKQSGKTILDFLKSDGFANRNFMQLIHDDSLTFKEDIQKAQVSGQGDSLHEHIANLAGSPAIKKGILQTVKVVDELVKVMGRHKPENIVIEMARENQTTQKGQKNSRERMKRIEEGIKELGSQILKEHPVENTQLQNEKLYLYYLQNGRDMYVDQELDINRLSDYDVDHIVPQSFLKDDSIDNKVLTRSDKARGKSDNVPSEEVVKKMKNYWRQLLNAKLITQRKFDNLTKAERGGLSELDKAGFIKRQLVETRQITKHVAQILDSRMNTKYDENDKLIREVKVITLKSKLVSDFRKDFQFYKVREINNYHHAHDAYLNAVVGTALIKKYPKLESEFVYGDYKVYDVRKMIAKSEQEIGKATAKYFFYSNIMNFFKTEITLANGEIRKRPLIETNGETGEIVWDKGRDFATVRKVLSMPQVNIVKKTEVQTGGFSKESILPKRNSDKLIARKKDWDPKKYGGFDSPTVAYSVLVVAKVEKGKSKKLKSVKELLGITIMERSSFEKNPIDFLEAKGYKEVKKDLIIKLPKYSLFELENGRKRMLASAGELQKGNELALPSKYVNFLYLASHYEKLKGSPEDNEQKQLFVEQHKHYLDEIIEQISEFSKRVILADANLDKVLSAYNKHRDKPIREQAENIIHLFTLTNLGAPAAFKYFDTTIDRKRYTSTKEVLDATLIHQSITGLYETRIDLSQLGGDGGEAAAKGSSPAPGGVPWILKKPLELTIKLDLEEQQGTLLNNSILSKKGKEELKQLFEKYSALWQSWENQVGHRRIRPHKIATGTVKPTPQKQYHINPKAKPDIQIVINDLLKQGVLIQKESTMNTPVYPVPKPNGRWRMVLDYRAVNKVTPLIAVQNQHSYGILGSLFKGRYKTTIDLSNGFWAHPIVPEDYWITAFTWQGKQYCWTVLPQGFLNSPGLFTGDVVDLLQGIPNVEVYVDDVYISHDSEKEHLEYLDILFNRLKEAGYIISLKKSNIANSIVDFLGFQITNEGRGLTDTFKEKLENITAPTTLKQLQSILGLLNFARNFIPDFTELIAPLYALIPKSTKNYVPWQIEHSTTLETLITKLNGAEYLQGRKGDKTLIMKVNASYTTGYIRYYNEGEKKPISYVSIVFSKTELKFTELEKLLTTVHKGLLKALDLSMGQNIHVYSPIVSMQNIQKTPQTAKKALASRWLSWLSYLEDPRIRFFYDPQMPALKDLPAVDTGKDNKKHPSNFQHIFYTDGSAITSPTKEGHLNAGMGIVYFINKDGNLQKQQEWSISLGNHTAQFAEIAAFEFALKKCLPLGGNILVVTDSNYVAKAYNEELDVWASNGFVNNRKKPLKHISKWKSVADLKRLRPDVVVTHEPGHQKLDSSPHAYGNNLADQLATQASFKVHAGKRTADGSEFEKRTADGSEFESPKKKAKVE

SEQ ID NO: 7602 - protein, 2087 aa, synthetic construct
MPAAKRVKLDGGDKKYSIGLDIGTNSVGWAVITDEYKVPSKKFKVLGNTDRHSIKKNLIGALLFDSGETAEATRLKRTARRRYTRRKNRICYLQEIFSNEMAKVDDSFFHRLEESFLVEEDKKHERHPIFGNIVDEVAYHEKYPTIYHLRKKLVDSTDKADLRLIYLALAHMIKFRGHFLIEGDLNPDNSDVDKLFIQLVQTYNQLFEENPINASGVDAKAILSARLSKSRRLENLIAQLPGEKKNGLFGNLIALSLGLTPNFKSNFDLAEDAKLQLSKDTYDDDLDNLLAQIGDQYADLFLAAKNLSDAILLSDILRVNTEITKAPLSASMIKRYDEHHQDLTLLKALVRQQLPEKYKEIFFDQSKNGYAGYIDGGASQEEFYKFIKPILEKMDGTEELLVKLNREDLLRKQRTFDNGSIPHQIHLGELHAILRRQEDFYPFLKDNREKIEKILTFRIPYYVGPLARGNSRFAWMTRKSEETITPWNFEEVVDKGASAQSFIERMTNFDKNLPNEKVLPKHSLLYEYFTVYNELTKVKYVTEGMRKPAFLSGEQKKAIVDLLFKTNRKVTVKQLKEDYFKKIECFDSVEISGVEDRFNASLGTYHDLLKIIKDKDFLDNEENEDILEDIVLTLTLFEDREMIEERLKTYAHLFDDKVMKQLKRRRYTGWGRLSRKLINGIRDKQSGKTILDFLKSDGFANRNFMQLIHDDSLTFKEDIQKAQVSGQGDSLHEHIANLAGSPAIKKGILQTVKVVDELVKVMGRHKPENIVIEMARENQTTQKGQKNSRERMKRIEEGIKELGSQILKEHPVENTQLQNEKLYLYYLQNGRDMYVDQELDINRLSDYDVDHIVPQSFLKDDSIDNKVLTRSDKARGKSDNVPSEEVVKKMKNYWRQLLNAKLITQRKFDNLTKAERGGLSELDKAGFIKRQLVETRQITKHVAQILDSRMNTKYDENDKLIREVKVITLKSKLVSDFRKDFQFYKVREINNYHHAHDAYLNAVVGTALIKKYPKLESEFVYGDYKVYDVRKMIAKSEQEIGKATAKYFFYSNIMNFFKTEITLANGEIRKRPLIETNGETGEIVWDKGRDFATVRKVLSMPQVNIVKKTEVQTGGFSKESILPKRNSDKLIARKKDWDPKKYGGFDSPTVAYSVLVVAKVEKGKSKKLKSVKELLGITIMERSSFEKNPIDFLEAKGYKEVKKDLIIKLPKYSLFELENGRKRMLASAGELQKGNELALPSKYVNFLYLASHYEKLKGSPEDNEQKQLFVEQHKHYLDEIIEQISEFSKRVILADANLDKVLSAYNKHRDKPIREQAENIIHLFTLTNLGAPAAFKYFDTTIDRKRYTSTKEVLDATLIHQSITGLYETRIDLSQLGGDGGEAAAKGSSPAPGGVPWLTQQPLQLTILVPLQEYQEKILSKTALPEDQKQQLKTLFVKYDNLWQHWENQVGHRKIRPHNIATGDYPPRPQKQYPINPKAKPSIQIVIDDLLKQGVLTPQNSTMNTPVYPVPKPDGRWRMVLDYREVNKTIPLTAAQNQHSAGILATIVRQKYKTTLDLANGFWAHPITPESYWLTAFTWQGKQYCWTRLPQGFLNSPALFNADVVDLLKEIPNVQVYVDDIYLSHDDPKEHVQQLEKVFQILLQAGYVVSLKKSEIGQKTVEFLGFNITKEGRGLTDTFKTKLLNITPPKDLKQLQSILGKLNFARNFIPNFAELVQPLYNLIAPAKGKYIEWSEENTKQLNMVIEALNTASNLEERLPEQRLVIKVNTSPSAGYVRYYNETGKKPIMYLNYVFSKAELKFSMLEKLLTTMHKALIKAMDLAMGQEILVYSPIVSMTKIQKTPLPERKALPIRWITWMTYLEDPRIQFHYDKTLPELKHIPDVYTSSQSPVKHPSQYEGVFYTDGSAIKSPDPTKSNNAGMGIVHATYKPEYQVLNQWSIPLGNHTAQMAEIAAVEFACKKALKIPGPVLVITDSFYVAESANKELPYWKSNGFVNNKKKPLKHISKWKSIAECLSMKPDITIQHEKGISLQIPVFILKGNALADKLATQGSYVVNAGKRTADGSEFEKRTADGSEFESPKKKAKVE

SEQ ID NO: 7603 - protein, 2218 aa, synthetic construct
MPAAKRVKLDGGDKKYSIGLDIGTNSVGWAVITDEYKVPSKKFKVLGNTDRHSIKKNLIGALLFDSGETAEATRLKRTARRRYTRRKNRICYLQEIFSNEMAKVDDSFFHRLEESFLVEEDKKHERHPIFGNIVDEVAYHEKYPTIYHLRKKLVDSTDKADLRLIYLALAHMIKFRGHFLIEGDLNPDNSDVDKLFIQLVQTYNQLFEENPINASGVDAKAILSARLSKSRRLENLIAQLPGEKKNGLFGNLIALSLGLTPNFKSNFDLAEDAKLQLSKDTYDDDLDNLLAQIGDQYADLFLAAKNLSDAILLSDILRVNTEITKAPLSASMIKRYDEHHQDLTLLKALVRQQLPEKYKEIFFDQSKNGYAGYIDGGASQEEFYKFIKPILEKMDGTEELLVKLNREDLLRKQRTFDNGSIPHQIHLGELHAILRRQEDFYPFLKDNREKIEKILTFRIPYYVGPLARGNSRFAWMTRKSEETITPWNFEEVVDKGASAQSFIERMTNFDKNLPNEKVLPKHSLLYEYFTVYNELTKVKYVTEGMRKPAFLSGEQKKAIVDLLFKTNRKVTVKQLKEDYFKKIECFDSVEISGVEDRFNASLGTYHDLLKIIKDKDFLDNEENEDILEDIVLTLTLFEDREMIEERLKTYAHLFDDKVMKQLKRRRYTGWGRLSRKLINGIRDKQSGKTILDFLKSDGFANRNFMQLIHDDSLTFKEDIQKAQVSGQGDSLHEHIANLAGSPAIKKGILQTVKVVDELVKVMGRHKPENIVIEMARENQTTQKGQKNSRERMKRIEEGIKELGSQILKEHPVENTQLQNEKLYLYYLQNGRDMYVDQELDINRLSDYDVDHIVPQSFLKDDSIDNKVLTRSDKARGKSDNVPSEEVVKKMKNYWRQLLNAKLITQRKFDNLTKAERGGLSELDKAGFIKRQLVETRQITKHVAQILDSRMNTKYDENDKLIREVKVITLKSKLVSDFRKDFQFYKVREINNYHHAHDAYLNAVVGTALIKKYPKLESEFVYGDYKVYDVRKMIAKSEQEIGKATAKYFFYSNIMNFFKTEITLANGEIRKRPLIETNGETGEIVWDKGRDFATVRKVLSMPQVNIVKKTEVQTGGFSKESILPKRNSDKLIARKKDWDPKKYGGFDSPTVAYSVLVVAKVEKGKSKKLKSVKELLGITIMERSSFEKNPIDFLEAKGYKEVKKDLIIKLPKYSLFELENGRKRMLASAGELQKGNELALPSKYVNFLYLASHYEKLKGSPEDNEQKQLFVEQHKHYLDEIIEQISEFSKRVILADANLDKVLSAYNKHRDKPIREQAENIIHLFTLTNLGAPAAFKYFDTTIDRKRYTSTKEVLDATLIHQSITGLYETRIDLSQLGGDGGEAAAKGSSPAPGGTLGDQGSRGSDPLPEPRVTLTVEGIPTEFLVNTGAEHSVLTKPMGKMGSKRTVVAGATGSKVYPWTTKRLLKIGQKQVTHSFLVIPECPAPLLGRDLLTKLKAQIQFSTEGPQVTWEDRPAMCLVLNLEEEYRLHEKPVPPSIDPSWLQLFPMVWAEKAGMGLANQVPPVVVELKSDASPVAVRQYPMSKEAREGIRPHIQRFLDLGILVPCQSPWNTPLLPVKKPGTNDYRPVQDLREVNKRVQDIHPTVPNPYNLLSSLPPSHTWYSVLDLKDAFFCLKLHPNSQPLFAFEWRDPEKGNTGQLTWTRLPQGFKNSPTLFNEALHRDLASFRALNPQVVMLQYVDDLLVAAPTYRDCKEGTRRLLQELSKLGYRVSAKKAQLCREEVTYLGYLLKGGKRWLTPARKATVMKIPTPTTPRQVREFLGTAGFCRLWIPGFASLAAPLYPLTRPKVPFTWTEAHQEAFGRIKEALLSAPALALPDLTKPFALYVDEKEGVARGVLTQTLGPWRRPVAYLSKKLDPVASGWPTCLKAIAAVALLLKDADKLTLGQNVLVIAPHNLESIVRQPPDRWMTNARMTHYQSLLLNERVSFAPPAILNPATLLPVESDDTPIHICSEILAEETGTRPDLRDQPLPGVPAWYTDGSSFIMDGRRQAGAAIVDNKRTVWASNLPEGTSAQKAELIALTQALRLAEGKSINIYTDSRYAFATAHVHGAIYKQRGWLTSAGKDIKNKEEILALLEAIHLPKRVAIIHCPGHQRGTDPVATGNRKADEAAKQAAQSTRILTETTKNAGKRTADGSEFEKRTADGSEFESPKKKAKVE

SEQ ID NO: 7604 - protein, 2096 aa, synthetic construct
MPAAKRVKLDGGDKKYSIGLDIGTNSVGWAVITDEYKVPSKKFKVLGNTDRHSIKKNLIGALLFDSGETAEATRLKRTARRRYTRRKNRICYLQEIFSNEMAKVDDSFFHRLEESFLVEEDKKHERHPIFGNIVDEVAYHEKYPTIYHLRKKLVDSTDKADLRLIYLALAHMIKFRGHFLIEGDLNPDNSDVDKLFIQLVQTYNQLFEENPINASGVDAKAILSARLSKSRRLENLIAQLPGEKKNGLFGNLIALSLGLTPNFKSNFDLAEDAKLQLSKDTYDDDLDNLLAQIGDQYADLFLAAKNLSDAILLSDILRVNTEITKAPLSASMIKRYDEHHQDLTLLKALVRQQLPEKYKEIFFDQSKNGYAGYIDGGASQEEFYKFIKPILEKMDGTEELLVKLNREDLLRKQRTFDNGSIPHQIHLGELHAILRRQEDFYPFLKDNREKIEKILTFRIPYYVGPLARGNSRFAWMTRKSEETITPWNFEEVVDKGASAQSFIERMTNFDKNLPNEKVLPKHSLLYEYFTVYNELTKVKYVTEGMRKPAFLSGEQKKAIVDLLFKTNRKVTVKQLKEDYFKKIECFDSVEISGVEDRFNASLGTYHDLLKIIKDKDFLDNEENEDILEDIVLTLTLFEDREMIEERLKTYAHLFDDKVMKQLKRRRYTGWGRLSRKLINGIRDKQSGKTILDFLKSDGFANRNFMQLIHDDSLTFKEDIQKAQVSGQGDSLHEHIANLAGSPAIKKGILQTVKVVDELVKVMGRHKPENIVIEMARENQTTQKGQKNSRERMKRIEEGIKELGSQILKEHPVENTQLQNEKLYLYYLQNGRDMYVDQELDINRLSDYDVDHIVPQSFLKDDSIDNKVLTRSDKARGKSDNVPSEEVVKKMKNYWRQLLNAKLITQRKFDNLTKAERGGLSELDKAGFIKRQLVETRQITKHVAQILDSRMNTKYDENDKLIREVKVITLKSKLVSDFRKDFQFYKVREINNYHHAHDAYLNAVVGTALIKKYPKLESEFVYGDYKVYDVRKMIAKSEQEIGKATAKYFFYSNIMNFFKTEITLANGEIRKRPLIETNGETGEIVWDKGRDFATVRKVLSMPQVNIVKKTEVQTGGFSKESILPKRNSDKLIARKKDWDPKKYGGFDSPTVAYSVLVVAKVEKGKSKKLKSVKELLGITIMERSSFEKNPIDFLEAKGYKEVKKDLIIKLPKYSLFELENGRKRMLASAGELQKGNELALPSKYVNFLYLASHYEKLKGSPEDNEQKQLFVEQHKHYLDEIIEQISEFSKRVILADANLDKVLSAYNKHRDKPIREQAENIIHLFTLTNLGAPAAFKYFDTTIDRKRYTSTKEVLDATLIHQSITGLYETRIDLSQLGGDGGEAAAKGSSPAPGGTLNLEDEYRLYETSAEPEVSPGSTWLSDFPQAWAETGGMGLAVRQAPLIIPLKATSTPVSIKQYPMSQEAKLGIKPHIQRLLDQGILVPCQSPWNTPLLPVKKPGTNDYRPVQDLREVNKRVEDIHPTVPNPYNLLSGLPPSHRWYTVLDLKDAFFCLRLHPTSQPLFAFEWRDPGMGISGQLTWTRLPQGFKNSPTLFNEALHRDLADFRIQHPDLILLQYVDDILLAATSELDCQQGTRALLLTLGNLGYRASAKKAQLCQKQVKYLGYLLKEGQRWLTEARKETVMGQPTPKTPRQLREFLGTAGFCRLWIPGFAEMAAPLYPLTKPGTLFNWGPDQQKAYQEIKQALLTAPALGLPDLTKPFELFVDEKQGYAKGVLTQKLGPWRRPVAYLSKKLDPVAAGWPPCLRMVAAIAVLRKDAGKLTMGQPLVILAPHAVEALVKQPPDRWLSNARMTHYQAMLLDTDRVQFGPVVALNPATLLPLPEEGAPHDCLEILAETHGTRPDLTDQPIPDADHTWYTDGSSFLQEGQRKAGAAVTTETEVIWARALPAGTSAQRAELIALTQALKMAEGKRLNVYTDSRYAFATAHIHGEIYRRRGWLTSEGREIKNKSEILALLKALFLPKRLSIIHCLGHQKGDSAEARGNRLADQAAREAAIKTPPDTSTLLAGKRTADGSEFEKRTADGSEFESPKKKAKVE

SEQ ID NO: 7605 - protein, 2096 aa, synthetic construct
MPAAKRVKLDGGDKKYSIGLDIGTNSVGWAVITDEYKVPSKKFKVLGNTDRHSIKKNLIGALLFDSGETAEATRLKRTARRRYTRRKNRICYLQEIFSNEMAKVDDSFFHRLEESFLVEEDKKHERHPIFGNIVDEVAYHEKYPTIYHLRKKLVDSTDKADLRLIYLALAHMIKFRGHFLIEGDLNPDNSDVDKLFIQLVQTYNQLFEENPINASGVDAKAILSARLSKSRRLENLIAQLPGEKKNGLFGNLIALSLGLTPNFKSNFDLAEDAKLQLSKDTYDDDLDNLLAQIGDQYADLFLAAKNLSDAILLSDILRVNTEITKAPLSASMIKRYDEHHQDLTLLKALVRQQLPEKYKEIFFDQSKNGYAGYIDGGASQEEFYKFIKPILEKMDGTEELLVKLNREDLLRKQRTFDNGSIPHQIHLGELHAILRRQEDFYPFLKDNREKIEKILTFRIPYYVGPLARGNSRFAWMTRKSEETITPWNFEEVVDKGASAQSFIERMTNFDKNLPNEKVLPKHSLLYEYFTVYNELTKVKYVTEGMRKPAFLSGEQKKAIVDLLFKTNRKVTVKQLKEDYFKKIECFDSVEISGVEDRFNASLGTYHDLLKIIKDKDFLDNEENEDILEDIVLTLTLFEDREMIEERLKTYAHLFDDKVMKQLKRRRYTGWGRLSRKLINGIRDKQSGKTILDFLKSDGFANRNFMQLIHDDSLTFKEDIQKAQVSGQGDSLHEHIANLAGSPAIKKGILQTVKVVDELVKVMGRHKPENIVIEMARENQTTQKGQKNSRERMKRIEEGIKELGSQILKEHPVENTQLQNEKLYLYYLQNGRDMYVDQELDINRLSDYDVDHIVPQSFLKDDSIDNKVLTRSDKARGKSDNVPSEEVVKKMKNYWRQLLNAKLITQRKFDNLTKAERGGLSELDKAGFIKRQLVETRQITKHVAQILDSRMNTKYDENDKLIREVKVITLKSKLVSDFRKDFQFYKVREINNYHHAHDAYLNAVVGTALIKKYPKLESEFVYGDYKVYDVRKMIAKSEQEIGKATAKYFFYSNIMNFFKTEITLANGEIRKRPLIETNGETGEIVWDKGRDFATVRKVLSMPQVNIVKKTEVQTGGFSKESILPKRNSDKLIARKKDWDPKKYGGFDSPTVAYSVLVVAKVEKGKSKKLKSVKELLGITIMERSSFEKNPIDFLEAKGYKEVKKDLIIKLPKYSLFELENGRKRMLASAGELQKGNELALPSKYVNFLYLASHYEKLKGSPEDNEQKQLFVEQHKHYLDEIIEQISEFSKRVILADANLDKVLSAYNKHRDKPIREQAENIIHLFTLTNLGAPAAFKYFDTTIDRKRYTSTKEVLDATLIHQSITGLYETRIDLSQLGGDGGEAAAKGSSPAPGGTLNIEDEYRLHETSKEPDVSLGSTWLSDFPQAWAETGGMGLAVRQAPLIIPLKATSTPVSIKQYPMSQEARLGIKPHIQRLLDQGILVPCQSPWNTPLLPVKKPGTNDYRPVQDLREVNKRVEDIHPTVPNPYNLLSGLPPSHQWYTVLDLKDAFFCLRLHPTSQPLFAFEWRDPEMGISGQLTWTRLPQGFKNSPTLFDEALHRDLAGFRIQHPDLILLQYVDDLLLAATSELDCQQGTRALLQTLGDLGYRASAKKAQICQKQVKYLGYLLKEGQRWLTEARKETVMGQPIPKTPRQLREFLGTAGFCRLWIPGFAEMAAPLYPLTKTGTLFNWGPDQQKAFQEIKQALLTAPALGLPDLTKPFELFVDEKQGYAKGVLTQKLGPWRRPVAYLSKKLDPVAAGWPPCLRMVAAIAVLTKDAGKLTMGQPLVILAPHAVEALVKQPPDRWLSNARMTHYQALLLDTDRVQFGPVVALNPATLLPLPEEGLQHDCLDILAEAHGTRSDLMDQPLPDADHTWYTDGSSFLQEGQRKAGAAVTTETEVIWARALPAGTSAQRAELIALTQALKMAEGKKLNVYTDSRYAFATAHIHGEIYRRRGLLTSEGKEIKNKDEILALLKALFLPKRLSIIHCPGHQKGNSAEARGNRMADQAAREVATRETPETSTLLAGKRTADGSEFEKRTADGSEFESPKKKAKVE

SEQ ID NO: 7606 - protein, 2096 aa, synthetic construct
MPAAKRVKLDGGDKKYSIGLDIGTNSVGWAVITDEYKVPSKKFKVLGNTDRHSIKKNLIGALLFDSGETAEATRLKRTARRRYTRRKNRICYLQEIFSNEMAKVDDSFFHRLEESFLVEEDKKHERHPIFGNIVDEVAYHEKYPTIYHLRKKLVDSTDKADLRLIYLALAHMIKFRGHFLIEGDLNPDNSDVDKLFIQLVQTYNQLFEENPINASGVDAKAILSARLSKSRRLENLIAQLPGEKKNGLFGNLIALSLGLTPNFKSNFDLAEDAKLQLSKDTYDDDLDNLLAQIGDQYADLFLAAKNLSDAILLSDILRVNTEITKAPLSASMIKRYDEHHQDLTLLKALVRQQLPEKYKEIFFDQSKNGYAGYIDGGASQEEFYKFIKPILEKMDGTEELLVKLNREDLLRKQRTFDNGSIPHQIHLGELHAILRRQEDFYPFLKDNREKIEKILTFRIPYYVGPLARGNSRFAWMTRKSEETITPWNFEEVVDKGASAQSFIERMTNFDKNLPNEKVLPKHSLLYEYFTVYNELTKVKYVTEGMRKPAFLSGEQKKAIVDLLFKTNRKVTVKQLKEDYFKKIECFDSVEISGVEDRFNASLGTYHDLLKIIKDKDFLDNEENEDILEDIVLTLTLFEDREMIEERLKTYAHLFDDKVMKQLKRRRYTGWGRLSRKLINGIRDKQSGKTILDFLKSDGFANRNFMQLIHDDSLTFKEDIQKAQVSGQGDSLHEHIANLAGSPAIKKGILQTVKVVDELVKVMGRHKPENIVIEMARENQTTQKGQKNSRERMKRIEEGIKELGSQILKEHPVENTQLQNEKLYLYYLQNGRDMYVDQELDINRLSDYDVDHIVPQSFLKDDSIDNKVLTRSDKARGKSDNVPSEEVVKKMKNYWRQLLNAKLITQRKFDNLTKAERGGLSELDKAGFIKRQLVETRQITKHVAQILDSRMNTKYDENDKLIREVKVITLKSKLVSDFRKDFQFYKVREINNYHHAHDAYLNAVVGTALIKKYPKLESEFVYGDYKVYDVRKMIAKSEQEIGKATAKYFFYSNIMNFFKTEITLANGEIRKRPLIETNGETGEIVWDKGRDFATVRKVLSMPQVNIVKKTEVQTGGFSKESILPKRNSDKLIARKKDWDPKKYGGFDSPTVAYSVLVVAKVEKGKSKKLKSVKELLGITIMERSSFEKNPIDFLEAKGYKEVKKDLIIKLPKYSLFELENGRKRMLASAGELQKGNELALPSKYVNFLYLASHYEKLKGSPEDNEQKQLFVEQHKHYLDEIIEQISEFSKRVILADANLDKVLSAYNKHRDKPIREQAENIIHLFTLTNLGAPAAFKYFDTTIDRKRYTSTKEVLDATLIHQSITGLYETRIDLSQLGGDGGEAAAKGSSPAPGGTLNIEDEYRLHETSKEPDVSLGSTWLSDFPQAWAETGGMGLAVRQAPLIIPLKATSTPVSIKQYPMSQEARLGIKPHIQRLLDQGILVPCQSPWNTPLLPVKKPGTNDYRPVQDLREVNKRVEDIHPTVPNPYNLLSGLPPSHQWYTVLDLKDAFFCLRLHPTSQPLFAFEWRDPEMGISGQLTWTRLPQGFKNSPTLFNEALHRDLAGFRIQHPDLILLQYVDDLLLAATSELDCQQGTRALLQTLGDLGYRASAKKAQICQKQVKYLGYLLKEGQRWLTEARKETVMGQPIPKTPRQLREFLGKAGFCRLFIPGFAEMAAPLYPLTKPGTLFNWGPDQQKAFQEIKQALLTAPALGLPDLTKPFELFVDEKQGYAKGVLTQKLGPWRRPVAYLSKKLDPVAAGWPPCLRMVAAIAVLTKDAGKLTMGQPLVILAPHAVEALVKQPPDRWLSNARMTHYQALLLDTDRVQFGPVVALNPATLLPLPEEGLQHDCLDILAEAHGTRSDLMDQPLPDADHTWYTDGSSFLQEGQRKAGAAVTTETEVIWARALPAGTSAQRAELIALTQALKMAEGKKLNVYTDSRYAFATAHIHGEIYRRRGWLTSEGKEIKNKDEILALLKALFLPKRLSIIHCPGHQKGNSAEARGNRMADQAAREVATRETPETSTLLAGKRTADGSEFEKRTADGSEFESPKKKAKVE

SEQ ID NO: 7607 - protein, 2096 aa, synthetic construct
MPAAKRVKLDGGDKKYSIGLDIGTNSVGWAVITDEYKVPSKKFKVLGNTDRHSIKKNLIGALLFDSGETAEATRLKRTARRRYTRRKNRICYLQEIFSNEMAKVDDSFFHRLEESFLVEEDKKHERHPIFGNIVDEVAYHEKYPTIYHLRKKLVDSTDKADLRLIYLALAHMIKFRGHFLIEGDLNPDNSDVDKLFIQLVQTYNQLFEENPINASGVDAKAILSARLSKSRRLENLIAQLPGEKKNGLFGNLIALSLGLTPNFKSNFDLAEDAKLQLSKDTYDDDLDNLLAQIGDQYADLFLAAKNLSDAILLSDILRVNTEITKAPLSASMIKRYDEHHQDLTLLKALVRQQLPEKYKEIFFDQSKNGYAGYIDGGASQEEFYKFIKPILEKMDGTEELLVKLNREDLLRKQRTFDNGSIPHQIHLGELHAILRRQEDFYPFLKDNREKIEKILTFRIPYYVGPLARGNSRFAWMTRKSEETITPWNFEEVVDKGASAQSFIERMTNFDKNLPNEKVLPKHSLLYEYFTVYNELTKVKYVTEGMRKPAFLSGEQKKAIVDLLFKTNRKVTVKQLKEDYFKKIECFDSVEISGVEDRFNASLGTYHDLLKIIKDKDFLDNEENEDILEDIVLTLTLFEDREMIEERLKTYAHLFDDKVMKQLKRRRYTGWGRLSRKLINGIRDKQSGKTILDFLKSDGFANRNFMQLIHDDSLTFKEDIQKAQVSGQGDSLHEHIANLAGSPAIKKGILQTVKVVDELVKVMGRHKPENIVIEMARENQTTQKGQKNSRERMKRIEEGIKELGSQILKEHPVENTQLQNEKLYLYYLQNGRDMYVDQELDINRLSDYDVDHIVPQSFLKDDSIDNKVLTRSDKARGKSDNVPSEEVVKKMKNYWRQLLNAKLITQRKFDNLTKAERGGLSELDKAGFIKRQLVETRQITKHVAQILDSRMNTKYDENDKLIREVKVITLKSKLVSDFRKDFQFYKVREINNYHHAHDAYLNAVVGTALIKKYPKLESEFVYGDYKVYDVRKMIAKSEQEIGKATAKYFFYSNIMNFFKTEITLANGEIRKRPLIETNGETGEIVWDKGRDFATVRKVLSMPQVNIVKKTEVQTGGFSKESILPKRNSDKLIARKKDWDPKKYGGFDSPTVAYSVLVVAKVEKGKSKKLKSVKELLGITIMERSSFEKNPIDFLEAKGYKEVKKDLIIKLPKYSLFELENGRKRMLASAGELQKGNELALPSKYVNFLYLASHYEKLKGSPEDNEQKQLFVEQHKHYLDEIIEQISEFSKRVILADANLDKVLSAYNKHRDKPIREQAENIIHLFTLTNLGAPAAFKYFDTTIDRKRYTSTKEVLDATLIHQSITGLYETRIDLSQLGGDGGEAAAKGSSPAPGGTLNIEDEHRLHETSKEPDVSLGSTWLSDFPQAWAETGGMGLAVRQAPLIIPLKATSTPVSIKQYPMSQEARLGIKPHIQRLLDQGILVPCQSPWNTPLLPVKKPGTNDYRPVQDLREVNKRVEDIHPTVPNPYNLLSGLPPSHQWYTVLDLKDAFFCLRLHPTSQPLFAFEWRDPEMGISGQLTWTRLPQGFKNSPTLFDEALHRDLADFRIQHPDLILLQYVDDLLLAATSELDCQQGTRALLQTLGNLGYRASAKKAQICQKQVKYLGYLLKEGQRWLTEARKETVMGQPTPKTPRQLREFLGTAGFCRLWIPGFAEMAAPLYPLTKTGTLFNWGPDQQKAYQEIKQALLTAPALGLPDLTKPFELFVDEKQGYAKGVLTQKLGPWRRPVAYLSKKLDPVAAGWPPCLRMVAAIAVLTKDAGKLTMGQPLVILAPHAVEALVKQPPDRWLSNARMTHYQALLLDTDRVQFGPVVALNPATLLPLPEEGLQHNCLDILAEAHGTRPDLTDQPLPDADHTWYTDGSSLLQEGQRKAGAAVTTETEVIWAKALPAGTSAQRAELIALTQALKMAEGKKLNVYTDSRYAFATAHIHGEIYRRRGLLTSEGKEIKNKDEILALLKALFLPKRLSIIHCPGHQKGHSAEARGNRMADQAARKAAITETPDTSTLLAGKRTADGSEFEKRTADGSEFESPKKKAKVE

SEQ ID NO: 7608 - protein, 2024 aa, synthetic construct
MPAAKRVKLDGGDKKYSIGLDIGTNSVGWAVITDEYKVPSKKFKVLGNTDRHSIKKNLIGALLFDSGETAEATRLKRTARRRYTRRKNRICYLQEIFSNEMAKVDDSFFHRLEESFLVEEDKKHERHPIFGNIVDEVAYHEKYPTIYHLRKKLVDSTDKADLRLIYLALAHMIKFRGHFLIEGDLNPDNSDVDKLFIQLVQTYNQLFEENPINASGVDAKAILSARLSKSRRLENLIAQLPGEKKNGLFGNLIALSLGLTPNFKSNFDLAEDAKLQLSKDTYDDDLDNLLAQIGDQYADLFLAAKNLSDAILLSDILRVNTEITKAPLSASMIKRYDEHHQDLTLLKALVRQQLPEKYKEIFFDQSKNGYAGYIDGGASQEEFYKFIKPILEKMDGTEELLVKLNREDLLRKQRTFDNGSIPHQIHLGELHAILRRQEDFYPFLKDNREKIEKILTFRIPYYVGPLARGNSRFAWMTRKSEETITPWNFEEVVDKGASAQSFIERMTNFDKNLPNEKVLPKHSLLYEYFTVYNELTKVKYVTEGMRKPAFLSGEQKKAIVDLLFKTNRKVTVKQLKEDYFKKIECFDSVEISGVEDRFNASLGTYHDLLKIIKDKDFLDNEENEDILEDIVLTLTLFEDREMIEERLKTYAHLFDDKVMKQLKRRRYTGWGRLSRKLINGIRDKQSGKTILDFLKSDGFANRNFMQLIHDDSLTFKEDIQKAQVSGQGDSLHEHIANLAGSPAIKKGILQTVKVVDELVKVMGRHKPENIVIEMARENQTTQKGQKNSRERMKRIEEGIKELGSQILKEHPVENTQLQNEKLYLYYLQNGRDMYVDQELDINRLSDYDVDHIVPQSFLKDDSIDNKVLTRSDKARGKSDNVPSEEVVKKMKNYWRQLLNAKLITQRKFDNLTKAERGGLSELDKAGFIKRQLVETRQITKHVAQILDSRMNTKYDENDKLIREVKVITLKSKLVSDFRKDFQFYKVREINNYHHAHDAYLNAVVGTALIKKYPKLESEFVYGDYKVYDVRKMIAKSEQEIGKATAKYFFYSNIMNFFKTEITLANGEIRKRPLIETNGETGEIVWDKGRDFATVRKVLSMPQVNIVKKTEVQTGGFSKESILPKRNSDKLIARKKDWDPKKYGGFDSPTVAYSVLVVAKVEKGKSKKLKSVKELLGITIMERSSFEKNPIDFLEAKGYKEVKKDLIIKLPKYSLFELENGRKRMLASAGELQKGNELALPSKYVNFLYLASHYEKLKGSPEDNEQKQLFVEQHKHYLDEIIEQISEFSKRVILADANLDKVLSAYNKHRDKPIREQAENIIHLFTLTNLGAPAAFKYFDTTIDRKRYTSTKEVLDATLIHQSITGLYETRIDLSQLGGDGGEAAAKGSSPAPGGGRDIMKDIKVRLMTDSPDDSQDLMIGAIESNLFADQISWKSDQPVWLNQWPLKQEKLQALQQLVTEQLQLGHLEESNSPWNTPVFVIKKKSGKWRLLQDLRAVNATMHDMGALQPGLPSPVAPPKGWEIIIIDLQDCFFNIKLHPEDCKRFAFSVPSPNFKRPYQRFQWKVLPQGMKNSPTLCQKFVDKAILTVRDKYQDSYIVHYMDDILLAHPSRSIVDEILTSMIQALNKHGLVVSTEKIQKYDNLKYLGTHIQGDSVSYQKLQIRTDKLRTLNDFQKLLGNINWIRPFLKLTTGELKPLFEILNPDSNPISTRKLTPEACKALQLMNERLSTARVKRLDLSQPWSLCILKTEYTPTACLWQDGVVEWIHLPHISPKVITPYDIFCTQLIIKGRHRSKELFSKDPDYIVVPYTKVQFDLLLQEKEDWPISLLGFLGEVHFHLPKDPLLTFTLQTAIIFPHMTSTTPLEKGIVIFTDGSANGRSVTYIQGREPIIKENTQNTAQQAEIVAVITAFEEVSQPFNLYTDSKYVTGLFPEIETATLSPRTKIYTELKHLQRLIHKRQEKFYIGHIRGHTGLPGPLAQGNAYADSLTRILTAGKRTADGSEFEKRTADGSEFESPKKKAKVE

SEQ ID NO: 7609 - protein, 2176 aa, synthetic construct
MPAAKRVKLDGGDKKYSIGLDIGTNSVGWAVITDEYKVPSKKFKVLGNTDRHSIKKNLIGALLFDSGETAEATRLKRTARRRYTRRKNRICYLQEIFSNEMAKVDDSFFHRLEESFLVEEDKKHERHPIFGNIVDEVAYHEKYPTIYHLRKKLVDSTDKADLRLIYLALAHMIKFRGHFLIEGDLNPDNSDVDKLFIQLVQTYNQLFEENPINASGVDAKAILSARLSKSRRLENLIAQLPGEKKNGLFGNLIALSLGLTPNFKSNFDLAEDAKLQLSKDTYDDDLDNLLAQIGDQYADLFLAAKNLSDAILLSDILRVNTEITKAPLSASMIKRYDEHHQDLTLLKALVRQQLPEKYKEIFFDQSKNGYAGYIDGGASQEEFYKFIKPILEKMDGTEELLVKLNREDLLRKQRTFDNGSIPHQIHLGELHAILRRQEDFYPFLKDNREKIEKILTFRIPYYVGPLARGNSRFAWMTRKSEETITPWNFEEVVDKGASAQSFIERMTNFDKNLPNEKVLPKHSLLYEYFTVYNELTKVKYVTEGMRKPAFLSGEQKKAIVDLLFKTNRKVTVKQLKEDYFKKIECFDSVEISGVEDRFNASLGTYHDLLKIIKDKDFLDNEENEDILEDIVLTLTLFEDREMIEERLKTYAHLFDDKVMKQLKRRRYTGWGRLSRKLINGIRDKQSGKTILDFLKSDGFANRNFMQLIHDDSLTFKEDIQKAQVSGQGDSLHEHIANLAGSPAIKKGILQTVKVVDELVKVMGRHKPENIVIEMARENQTTQKGQKNSRERMKRIEEGIKELGSQILKEHPVENTQLQNEKLYLYYLQNGRDMYVDQELDINRLSDYDVDHIVPQSFLKDDSIDNKVLTRSDKARGKSDNVPSEEVVKKMKNYWRQLLNAKLITQRKFDNLTKAERGGLSELDKAGFIKRQLVETRQITKHVAQILDSRMNTKYDENDKLIREVKVITLKSKLVSDFRKDFQFYKVREINNYHHAHDAYLNAVVGTALIKKYPKLESEFVYGDYKVYDVRKMIAKSEQEIGKATAKYFFYSNIMNFFKTEITLANGEIRKRPLIETNGETGEIVWDKGRDFATVRKVLSMPQVNIVKKTEVQTGGFSKESILPKRNSDKLIARKKDWDPKKYGGFDSPTVAYSVLVVAKVEKGKSKKLKSVKELLGITIMERSSFEKNPIDFLEAKGYKEVKKDLIIKLPKYSLFELENGRKRMLASAGELQKGNELALPSKYVNFLYLASHYEKLKGSPEDNEQKQLFVEQHKHYLDEIIEQISEFSKRVILADANLDKVLSAYNKHRDKPIREQAENIIHLFTLTNLGAPAAFKYFDTTIDRKRYTSTKEVLDATLIHQSITGLYETRIDLSQLGGDGGEAAAKGSSPAPGGMDPLQLLQPLEAEIKGTKLKAHWNSGATITCVPEAFLEDERPIQTMLIKTIHGEKQQDVYYLTFKVQGRKVEAEVLASPYDYILLNPSDVPWLMKKPLQLTVLVPLHEYQERLLQQTALPKEQKELLQKLFLKYDALWQHWENQVGHRRIKPHNIATGTLAPRPQKQYPINPKAKPSIQIVIDDLLKQGVLIQQNSTMNTPVYPVPKPDGKWRMVLDYREVNKTIPLIAAQNQHSAGILSSIYRGKYKTTLDLTNGFWAHPITPESYWLTAFTWQGKQYCWTRLPQGFLNSPALFNADVVDLLKEIPNVQAYVDDIYISHDDPQEHLEQLEKIFSILLNAGYVVSLKKSEIAQREVEFLGFNITKEGRGLTDTFKQKLLNITPPKDLKQLQSILGKLNFARNFIPNYSELVKPLYTIVAPANGKFISWTEDNSNQLQHIISVLNQADNLEERNPETRLIIKVNSSPSAGYIRYYNEGSKRPIMYVNYIFSKAEAKFTQTEKLLTTMHKGLIKAMDLAMGQEILVYSPIVSMTKIQRTPLPERKALPVRWITWMTYLEDPRIQFHYDKSLPELQQIPNVTEDVIAKTKHPSEFAMVFYTDGSAIKHPDVNKSHSAGMGIAQVQFIPEYKIVHQWSIPLGDHTAQLAEIAAVEFACKKALKISGPVLIVTDSFYVAESANKELPYWKSNGFLNNKKKPLRHVSKWKSIAECLQLKPDIIIMHEKGHQQPMTTLHTEGNNLADKLATQGSYVVHAGKRTADGSEFEKRTADGSEFESPKKKAKVE

SEQ ID NO: 7610 - protein, 2087 aa, synthetic construct
MPAAKRVKLDGGDKKYSIGLDIGTNSVGWAVITDEYKVPSKKFKVLGNTDRHSIKKNLIGALLFDSGETAEATRLKRTARRRYTRRKNRICYLQEIFSNEMAKVDDSFFHRLEESFLVEEDKKHERHPIFGNIVDEVAYHEKYPTIYHLRKKLVDSTDKADLRLIYLALAHMIKFRGHFLIEGDLNPDNSDVDKLFIQLVQTYNQLFEENPINASGVDAKAILSARLSKSRRLENLIAQLPGEKKNGLFGNLIALSLGLTPNFKSNFDLAEDAKLQLSKDTYDDDLDNLLAQIGDQYADLFLAAKNLSDAILLSDILRVNTEITKAPLSASMIKRYDEHHQDLTLLKALVRQQLPEKYKEIFFDQSKNGYAGYIDGGASQEEFYKFIKPILEKMDGTEELLVKLNREDLLRKQRTFDNGSIPHQIHLGELHAILRRQEDFYPFLKDNREKIEKILTFRIPYYVGPLARGNSRFAWMTRKSEETITPWNFEEVVDKGASAQSFIERMTNFDKNLPNEKVLPKHSLLYEYFTVYNELTKVKYVTEGMRKPAFLSGEQKKAIVDLLFKTNRKVTVKQLKEDYFKKIECFDSVEISGVEDRFNASLGTYHDLLKIIKDKDFLDNEENEDILEDIVLTLTLFEDREMIEERLKTYAHLFDDKVMKQLKRRRYTGWGRLSRKLINGIRDKQSGKTILDFLKSDGFANRNFMQLIHDDSLTFKEDIQKAQVSGQGDSLHEHIANLAGSPAIKKGILQTVKVVDELVKVMGRHKPENIVIEMARENQTTQKGQKNSRERMKRIEEGIKELGSQILKEHPVENTQLQNEKLYLYYLQNGRDMYVDQELDINRLSDYDVDHIVPQSFLKDDSIDNKVLTRSDKARGKSDNVPSEEVVKKMKNYWRQLLNAKLITQRKFDNLTKAERGGLSELDKAGFIKRQLVETRQITKHVAQILDSRMNTKYDENDKLIREVKVITLKSKLVSDFRKDFQFYKVREINNYHHAHDAYLNAVVGTALIKKYPKLESEFVYGDYKVYDVRKMIAKSEQEIGKATAKYFFYSNIMNFFKTEITLANGEIRKRPLIETNGETGEIVWDKGRDFATVRKVLSMPQVNIVKKTEVQTGGFSKESILPKRNSDKLIARKKDWDPKKYGGFDSPTVAYSVLVVAKVEKGKSKKLKSVKELLGITIMERSSFEKNPIDFLEAKGYKEVKKDLIIKLPKYSLFELENGRKRMLASAGELQKGNELALPSKYVNFLYLASHYEKLKGSPEDNEQKQLFVEQHKHYLDEIIEQISEFSKRVILADANLDKVLSAYNKHRDKPIREQAENIIHLFTLTNLGAPAAFKYFDTTIDRKRYTSTKEVLDATLIHQSITGLYETRIDLSQLGGDGGEAAAKGSSPAPGGIPWLMKKPLQLTTLVPLQEYEERLLKQTMLTGSYKEKLQSLFLKYDALWQHWENQVGHRRIKPHHIATGTVNPRPQKQYPINPKAKASIQTVINDLLKQGVLIQQNSIMNTPVYPVPKPDGKWRMVLDYREVNKTIPLIAAQNQHSAGILSSIFRGKYKTTLDLSNGFWAHSITPESYWLTAFTWLGQQYCWTRLPQGFLNSPALFNADVVDLLKEVPNVQVYVDDIYISHDDPREHLEQLEKVFSLLLNAGYVVSLKKSEIAQHEVEFLGFNITKEGRGLTETFKQKLLNITPPRDLKQLQSILGKLNFARNFIPNFSELVKPLYNIIATAPGKYITWTTDNSQQLQNIISMLNSAENLEERNPEVRLIMKVNTSPSAGYIRFYNEFAKRPIMYLNYVYTKAEVKFTNTEKLLTTIHKGLIKALDLGMGQEILVYSPIVSMTKIQKTPLPERKALPIRWITWMSYLEDPRIQFHYDKTLPELQQVPTVTDDIIAKIKHPSEFSMVFYTDGSAIKHPNVNKSHNAGMGIAQVQFKPEFTVINTWSIPLGDHTAQLAEVAAVEFACKKALKIDGPVLIVTDSFYVAESVNKELPYWQSNGFFNNKKKPLKHVSKWKSIADCIQLKPDIIIIHEKGHQPTASTFHTEGNNLADKLATQGSYVVNAGKRTADGSEFEKRTADGSEFESPKKKAKVE

SEQ ID NO: 7611 - protein, 2176 aa, synthetic construct
MPAAKRVKLDGGDKKYSIGLDIGTNSVGWAVITDEYKVPSKKFKVLGNTDRHSIKKNLIGALLFDSGETAEATRLKRTARRRYTRRKNRICYLQEIFSNEMAKVDDSFFHRLEESFLVEEDKKHERHPIFGNIVDEVAYHEKYPTIYHLRKKLVDSTDKADLRLIYLALAHMIKFRGHFLIEGDLNPDNSDVDKLFIQLVQTYNQLFEENPINASGVDAKAILSARLSKSRRLENLIAQLPGEKKNGLFGNLIALSLGLTPNFKSNFDLAEDAKLQLSKDTYDDDLDNLLAQIGDQYADLFLAAKNLSDAILLSDILRVNTEITKAPLSASMIKRYDEHHQDLTLLKALVRQQLPEKYKEIFFDQSKNGYAGYIDGGASQEEFYKFIKPILEKMDGTEELLVKLNREDLLRKQRTFDNGSIPHQIHLGELHAILRRQEDFYPFLKDNREKIEKILTFRIPYYVGPLARGNSRFAWMTRKSEETITPWNFEEVVDKGASAQSFIERMTNFDKNLPNEKVLPKHSLLYEYFTVYNELTKVKYVTEGMRKPAFLSGEQKKAIVDLLFKTNRKVTVKQLKEDYFKKIECFDSVEISGVEDRFNASLGTYHDLLKIIKDKDFLDNEENEDILEDIVLTLTLFEDREMIEERLKTYAHLFDDKVMKQLKRRRYTGWGRLSRKLINGIRDKQSGKTILDFLKSDGFANRNFMQLIHDDSLTFKEDIQKAQVSGQGDSLHEHIANLAGSPAIKKGILQTVKVVDELVKVMGRHKPENIVIEMARENQTTQKGQKNSRERMKRIEEGIKELGSQILKEHPVENTQLQNEKLYLYYLQNGRDMYVDQELDINRLSDYDVDHIVPQSFLKDDSIDNKVLTRSDKARGKSDNVPSEEVVKKMKNYWRQLLNAKLITQRKFDNLTKAERGGLSELDKAGFIKRQLVETRQITKHVAQILDSRMNTKYDENDKLIREVKVITLKSKLVSDFRKDFQFYKVREINNYHHAHDAYLNAVVGTALIKKYPKLESEFVYGDYKVYDVRKMIAKSEQEIGKATAKYFFYSNIMNFFKTEITLANGEIRKRPLIETNGETGEIVWDKGRDFATVRKVLSMPQVNIVKKTEVQTGGFSKESILPKRNSDKLIARKKDWDPKKYGGFDSPTVAYSVLVVAKVEKGKSKKLKSVKELLGITIMERSSFEKNPIDFLEAKGYKEVKKDLIIKLPKYSLFELENGRKRMLASAGELQKGNELALPSKYVNFLYLASHYEKLKGSPEDNEQKQLFVEQHKHYLDEIIEQISEFSKRVILADANLDKVLSAYNKHRDKPIREQAENIIHLFTLTNLGAPAAFKYFDTTIDRKRYTSTKEVLDATLIHQSITGLYETRIDLSQLGGDGGEAAAKGSSPAPGGMDPLQLLQPLEAEIKGTKLKAHWNSGATITCVPQAFLEEEVPIKNIWIKTIHGEKEQPVYYLTFKIQGRKVEAEVISSPYDYILVSPSDIPWLMKKPLQLTTLVPLQEYEERLLKQTMLTGSYKEKLQSLFLKYDALWQHWENQVGHRRIKPHHIATGTVNPRPQKQYPINPKAKASIQTVINDLLKQGVLIQQNSIMNTPVYPVPKPDGKWRMVLDYREVNKTIPLIAAQNQHSAGILSSIFRGKYKTTLDLSNGFWAHSITPESYWLTAFTWLGQQYCWTRLPQGFLNSPALFNADVVDLLKEVPNVQVYVDDIYISHDDPREHLEQLEKVFSLLLNAGYVVSLKKSEIAQHEVEFLGFNITKEGRGLTETFKQKLLNITPPRDLKQLQSILGKLNFARNFIPNFSELVKPLYNIIATAPGKYITWTTDNSQQLQNIISMLNSAENLEERNPEVRLIMKVNTSPSAGYIRFYNEFAKRPIMYLNYVYTKAEVKFTNTEKLLTTIHKGLIKALDLGMGQEILVYSPIVSMTKIQKTPLPERKALPIRWITWMSYLEDPRIQFHYDKTLPELQQVPTVTDDIIAKIKHPSEFSMVFYTDGSAIKHPNVNKSHNAGMGIAQVQFKPEFTVINTWSIPLGDHTAQLAEVAAVEFACKKALKIDGPVLIVTDSFYVAESVNKELPYWQSNGFFNNKKKPLKHVSKWKSIADCIQLKPDIIIIHEKGHQPTASTFHTEGNNLADKLATQGSYVVNAGKRTADGSEFEKRTADGSEFESPKKKAKVE

SEQ ID NO: 7612 - protein, 2098 aa, synthetic construct
MPAAKRVKLDGGDKKYSIGLDIGTNSVGWAVITDEYKVPSKKFKVLGNTDRHSIKKNLIGALLFDSGETAEATRLKRTARRRYTRRKNRICYLQEIFSNEMAKVDDSFFHRLEESFLVEEDKKHERHPIFGNIVDEVAYHEKYPTIYHLRKKLVDSTDKADLRLIYLALAHMIKFRGHFLIEGDLNPDNSDVDKLFIQLVQTYNQLFEENPINASGVDAKAILSARLSKSRRLENLIAQLPGEKKNGLFGNLIALSLGLTPNFKSNFDLAEDAKLQLSKDTYDDDLDNLLAQIGDQYADLFLAAKNLSDAILLSDILRVNTEITKAPLSASMIKRYDEHHQDLTLLKALVRQQLPEKYKEIFFDQSKNGYAGYIDGGASQEEFYKFIKPILEKMDGTEELLVKLNREDLLRKQRTFDNGSIPHQIHLGELHAILRRQEDFYPFLKDNREKIEKILTFRIPYYVGPLARGNSRFAWMTRKSEETITPWNFEEVVDKGASAQSFIERMTNFDKNLPNEKVLPKHSLLYEYFTVYNELTKVKYVTEGMRKPAFLSGEQKKAIVDLLFKTNRKVTVKQLKEDYFKKIECFDSVEISGVEDRFNASLGTYHDLLKIIKDKDFLDNEENEDILEDIVLTLTLFEDREMIEERLKTYAHLFDDKVMKQLKRRRYTGWGRLSRKLINGIRDKQSGKTILDFLKSDGFANRNFMQLIHDDSLTFKEDIQKAQVSGQGDSLHEHIANLAGSPAIKKGILQTVKVVDELVKVMGRHKPENIVIEMARENQTTQKGQKNSRERMKRIEEGIKELGSQILKEHPVENTQLQNEKLYLYYLQNGRDMYVDQELDINRLSDYDVDHIVPQSFLKDDSIDNKVLTRSDKARGKSDNVPSEEVVKKMKNYWRQLLNAKLITQRKFDNLTKAERGGLSELDKAGFIKRQLVETRQITKHVAQILDSRMNTKYDENDKLIREVKVITLKSKLVSDFRKDFQFYKVREINNYHHAHDAYLNAVVGTALIKKYPKLESEFVYGDYKVYDVRKMIAKSEQEIGKATAKYFFYSNIMNFFKTEITLANGEIRKRPLIETNGETGEIVWDKGRDFATVRKVLSMPQVNIVKKTEVQTGGFSKESILPKRNSDKLIARKKDWDPKKYGGFDSPTVAYSVLVVAKVEKGKSKKLKSVKELLGITIMERSSFEKNPIDFLEAKGYKEVKKDLIIKLPKYSLFELENGRKRMLASAGELQKGNELALPSKYVNFLYLASHYEKLKGSPEDNEQKQLFVEQHKHYLDEIIEQISEFSKRVILADANLDKVLSAYNKHRDKPIREQAENIIHLFTLTNLGAPAAFKYFDTTIDRKRYTSTKEVLDATLIHQSITGLYETRIDLSQLGGDGGEAAAKPAPGSSGGTAPLEEEYRLFLEAPIQNVTLLEQWKREIPKVWAEINPPGLASTQAPIHVQLLSTALPVRVRQYPITLEAKRSLRETIRKFRAAGILRPVHSPWNTPLLPVRKSGTSEYRMVQDLREVNKRVETIHPTVPNPYTLLSLLPPDRIWYSVLDLKDAFFCIPLAPESQLIFAFEWADAEEGESGQLTWTRLPQGFKNSPTLFNEALNRDLQGFRLDHPSVSLLQYVDDLLIAADTQAACLSATRDLLMTLAELGYRVSGKKAQLCQEEVTYLGFKIHKGSRSLSNSRTQAILQIPVPKTKRQVREFLGKIGYCRLFIPGFAELAQPLYAATRPGNDPLVWGEKEEEAFQSLKLALTQPPALALPSLDKPFQLFVEETSGAAKGVLTQALGPWKRPVAYLSKRLDPVAAGWPRCLRAIAAAALLTREASKLTFGQDIEITSSHNLESLLRSPPDKWLTNARITQYQVLLLDPPRVRFKQTAALNPATLLPETDDTLPIHHCLDTLDSLTSTRPDLTDQPLAQAEATLFTDGSSYIRDGKRYAGAAVVTLDSVIWAEPLPIGTSAQKAELIALTKALEWSKDKSVNIYTDSRYAFATLHVHGMIYRERGWLTAGGKAIKNAPEILALLTAVWLPKRVAVMHCKGHQKDDAPTSTGNRRADEVAREVAIRPLSTQATISAGKRTADGSEFEKRTADGSEFESPKKKAKVE

SEQ ID NO: 7613 - protein, 2102 aa, synthetic construct
MPAAKRVKLDGGDKKYSIGLDIGTNSVGWAVITDEYKVPSKKFKVLGNTDRHSIKKNLIGALLFDSGETAEATRLKRTARRRYTRRKNRICYLQEIFSNEMAKVDDSFFHRLEESFLVEEDKKHERHPIFGNIVDEVAYHEKYPTIYHLRKKLVDSTDKADLRLIYLALAHMIKFRGHFLIEGDLNPDNSDVDKLFIQLVQTYNQLFEENPINASGVDAKAILSARLSKSRRLENLIAQLPGEKKNGLFGNLIALSLGLTPNFKSNFDLAEDAKLQLSKDTYDDDLDNLLAQIGDQYADLFLAAKNLSDAILLSDILRVNTEITKAPLSASMIKRYDEHHQDLTLLKALVRQQLPEKYKEIFFDQSKNGYAGYIDGGASQEEFYKFIKPILEKMDGTEELLVKLNREDLLRKQRTFDNGSIPHQIHLGELHAILRRQEDFYPFLKDNREKIEKILTFRIPYYVGPLARGNSRFAWMTRKSEETITPWNFEEVVDKGASAQSFIERMTNFDKNLPNEKVLPKHSLLYEYFTVYNELTKVKYVTEGMRKPAFLSGEQKKAIVDLLFKTNRKVTVKQLKEDYFKKIECFDSVEISGVEDRFNASLGTYHDLLKIIKDKDFLDNEENEDILEDIVLTLTLFEDREMIEERLKTYAHLFDDKVMKQLKRRRYTGWGRLSRKLINGIRDKQSGKTILDFLKSDGFANRNFMQLIHDDSLTFKEDIQKAQVSGQGDSLHEHIANLAGSPAIKKGILQTVKVVDELVKVMGRHKPENIVIEMARENQTTQKGQKNSRERMKRIEEGIKELGSQILKEHPVENTQLQNEKLYLYYLQNGRDMYVDQELDINRLSDYDVDHIVPQSFLKDDSIDNKVLTRSDKARGKSDNVPSEEVVKKMKNYWRQLLNAKLITQRKFDNLTKAERGGLSELDKAGFIKRQLVETRQITKHVAQILDSRMNTKYDENDKLIREVKVITLKSKLVSDFRKDFQFYKVREINNYHHAHDAYLNAVVGTALIKKYPKLESEFVYGDYKVYDVRKMIAKSEQEIGKATAKYFFYSNIMNFFKTEITLANGEIRKRPLIETNGETGEIVWDKGRDFATVRKVLSMPQVNIVKKTEVQTGGFSKESILPKRNSDKLIARKKDWDPKKYGGFDSPTVAYSVLVVAKVEKGKSKKLKSVKELLGITIMERSSFEKNPIDFLEAKGYKEVKKDLIIKLPKYSLFELENGRKRMLASAGELQKGNELALPSKYVNFLYLASHYEKLKGSPEDNEQKQLFVEQHKHYLDEIIEQISEFSKRVILADANLDKVLSAYNKHRDKPIREQAENIIHLFTLTNLGAPAAFKYFDTTIDRKRYTSTKEVLDATLIHQSITGLYETRIDLSQLGGDGGEAAAKPAPGSSGGTVSLQDEHRLFDIPVTTSLPDVWLQDFPQAWAETGGLGRAKCQAPIIIDLKPTAVPVSIKQYPMSLEAHMGIRQHIIKFLELGVLRPCRSPWNTPLLPVKKPGTQDYRPVQDLREINKRTVDIHPTVPNPYNLLSTLKPDYSWYTVLDLKDAFFCLPLAPQSQELFAFEWKDPERGISGQLTWTRLPQGFKNSPTLFNEALHRDLTDFRTQHPEVTLLQYVDDLLLAAPTKKACTQGTRHLLQELGEKGYRASAKKAQICQTKVTYLGYILSEGKRWLTPGRIETVARIPPPRNPREVREFLGTAGFCRLWIPGFAELAAPLYALTKPSTPFTWQTEHQLAFEALKKALLSAPALGLPDTSKPFTLFLDERQGIAKGVLTQKLGPWKRPVAYLSKKLDPVAAGWPPCLRIMAATAMLVKDSAKLTLGQPLTVITPHTLEAIVRQPPDRWITNARLTHYQALLLDTDRVQFGPPVTLNPATLLPVPENQPSPHDCRQVLAETHGTREDLKDQELPDADHTWYTDGSSYLDSGTRRAGAAVVDGHNTIWAQSLPPGTSAQKAELIALTKALELSKGKKANIYTDSRYAFATAHTHGSIYERRGWLTSEGKEIKNKAEIIALLKALFLPQEVAIIHCPGHQKGQDPVAVGNRQADRVARQAAMAEVLTLATEPDNTSHITAGKRTADGSEFEKRTADGSEFESPKKKAKVE

SEQ ID NO: 7614 - protein, 2173 aa, synthetic construct
MPAAKRVKLDGGDKKYSIGLDIGTNSVGWAVITDEYKVPSKKFKVLGNTDRHSIKKNLIGALLFDSGETAEATRLKRTARRRYTRRKNRICYLQEIFSNEMAKVDDSFFHRLEESFLVEEDKKHERHPIFGNIVDEVAYHEKYPTIYHLRKKLVDSTDKADLRLIYLALAHMIKFRGHFLIEGDLNPDNSDVDKLFIQLVQTYNQLFEENPINASGVDAKAILSARLSKSRRLENLIAQLPGEKKNGLFGNLIALSLGLTPNFKSNFDLAEDAKLQLSKDTYDDDLDNLLAQIGDQYADLFLAAKNLSDAILLSDILRVNTEITKAPLSASMIKRYDEHHQDLTLLKALVRQQLPEKYKEIFFDQSKNGYAGYIDGGASQEEFYKFIKPILEKMDGTEELLVKLNREDLLRKQRTFDNGSIPHQIHLGELHAILRRQEDFYPFLKDNREKIEKILTFRIPYYVGPLARGNSRFAWMTRKSEETITPWNFEEVVDKGASAQSFIERMTNFDKNLPNEKVLPKHSLLYEYFTVYNELTKVKYVTEGMRKPAFLSGEQKKAIVDLLFKTNRKVTVKQLKEDYFKKIECFDSVEISGVEDRFNASLGTYHDLLKIIKDKDFLDNEENEDILEDIVLTLTLFEDREMIEERLKTYAHLFDDKVMKQLKRRRYTGWGRLSRKLINGIRDKQSGKTILDFLKSDGFANRNFMQLIHDDSLTFKEDIQKAQVSGQGDSLHEHIANLAGSPAIKKGILQTVKVVDELVKVMGRHKPENIVIEMARENQTTQKGQKNSRERMKRIEEGIKELGSQILKEHPVENTQLQNEKLYLYYLQNGRDMYVDQELDINRLSDYDVDHIVPQSFLKDDSIDNKVLTRSDKARGKSDNVPSEEVVKKMKNYWRQLLNAKLITQRKFDNLTKAERGGLSELDKAGFIKRQLVETRQITKHVAQILDSRMNTKYDENDKLIREVKVITLKSKLVSDFRKDFQFYKVREINNYHHAHDAYLNAVVGTALIKKYPKLESEFVYGDYKVYDVRKMIAKSEQEIGKATAKYFFYSNIMNFFKTEITLANGEIRKRPLIETNGETGEIVWDKGRDFATVRKVLSMPQVNIVKKTEVQTGGFSKESILPKRNSDKLIARKKDWDPKKYGGFDSPTVAYSVLVVAKVEKGKSKKLKSVKELLGITIMERSSFEKNPIDFLEAKGYKEVKKDLIIKLPKYSLFELENGRKRMLASAGELQKGNELALPSKYVNFLYLASHYEKLKGSPEDNEQKQLFVEQHKHYLDEIIEQISEFSKRVILADANLDKVLSAYNKHRDKPIREQAENIIHLFTLTNLGAPAAFKYFDTTIDRKRYTSTKEVLDATLIHQSITGLYETRIDLSQLGGDGGEAAAKPAPGSSGGMDLLKPLTVERKGVKIKGYWNSQADITCVPKDLLQGEEPVRQQNVTTIHGTQEGDVYYVNLKIDGRRINTEVIGTTLDYAIITPGDVPWILKKPLELTIKLDLEEQQGTLLNNSILSKKGKEELKQLFEKYSALWQSWENQVGHRRIRPHKIATGTVKPTPQKQYHINPKAKPDIQIVINDLLKQGVLIQKESTMNTPVYPVPKPNGRWRMVLDYRAVNKVTPLIAVQNQHSYGILGSLFKGRYKTTIDLSNGFWAHPIVPEDYWITAFTWQGKQYCWTVLPQGFLNSPGLFTGDVVDLLQGIPNVEVYVDDVYISHDSEKEHLEYLDILFNRLKEAGYIISLKKSNIANSIVDFLGFQITNEGRGLTDTFKEKLENITAPTTLKQLQSILGLLNFARNFIPDFTELIAPLYALIPKSTKNYVPWQIEHSTTLETLITKLNGAEYLQGRKGDKTLIMKVNASYTTGYIRYYNEGEKKPISYVSIVFSKTELKFTELEKLLTTVHKGLLKALDLSMGQNIHVYSPIVSMQNIQKTPQTAKKALASRWLSWLSYLEDPRIRFFYDPQMPALKDLPAVDTGKDNKKHPSNFQHIFYTDGSAITSPTKEGHLNAGMGIVYFINKDGNLQKQQEWSISLGNHTAQFAEIAAFEFALKKCLPLGGNILVVTDSNYVAKAYNEELDVWASNGFVNNRKKPLKHISKWKSVADLKRLRPDVVVTHEPGHQKLDSSPHAYGNNLADQLATQASFKVHAGKRTADGSEFEKRTADGSEFESPKKKAKVE

SEQ ID NO: 7615 - protein, 2095 aa, synthetic construct
MPAAKRVKLDGGDKKYSIGLDIGTNSVGWAVITDEYKVPSKKFKVLGNTDRHSIKKNLIGALLFDSGETAEATRLKRTARRRYTRRKNRICYLQEIFSNEMAKVDDSFFHRLEESFLVEEDKKHERHPIFGNIVDEVAYHEKYPTIYHLRKKLVDSTDKADLRLIYLALAHMIKFRGHFLIEGDLNPDNSDVDKLFIQLVQTYNQLFEENPINASGVDAKAILSARLSKSRRLENLIAQLPGEKKNGLFGNLIALSLGLTPNFKSNFDLAEDAKLQLSKDTYDDDLDNLLAQIGDQYADLFLAAKNLSDAILLSDILRVNTEITKAPLSASMIKRYDEHHQDLTLLKALVRQQLPEKYKEIFFDQSKNGYAGYIDGGASQEEFYKFIKPILEKMDGTEELLVKLNREDLLRKQRTFDNGSIPHQIHLGELHAILRRQEDFYPFLKDNREKIEKILTFRIPYYVGPLARGNSRFAWMTRKSEETITPWNFEEVVDKGASAQSFIERMTNFDKNLPNEKVLPKHSLLYEYFTVYNELTKVKYVTEGMRKPAFLSGEQKKAIVDLLFKTNRKVTVKQLKEDYFKKIECFDSVEISGVEDRFNASLGTYHDLLKIIKDKDFLDNEENEDILEDIVLTLTLFEDREMIEERLKTYAHLFDDKVMKQLKRRRYTGWGRLSRKLINGIRDKQSGKTILDFLKSDGFANRNFMQLIHDDSLTFKEDIQKAQVSGQGDSLHEHIANLAGSPAIKKGILQTVKVVDELVKVMGRHKPENIVIEMARENQTTQKGQKNSRERMKRIEEGIKELGSQILKEHPVENTQLQNEKLYLYYLQNGRDMYVDQELDINRLSDYDVDHIVPQSFLKDDSIDNKVLTRSDKARGKSDNVPSEEVVKKMKNYWRQLLNAKLITQRKFDNLTKAERGGLSELDKAGFIKRQLVETRQITKHVAQILDSRMNTKYDENDKLIREVKVITLKSKLVSDFRKDFQFYKVREINNYHHAHDAYLNAVVGTALIKKYPKLESEFVYGDYKVYDVRKMIAKSEQEIGKATAKYFFYSNIMNFFKTEITLANGEIRKRPLIETNGETGEIVWDKGRDFATVRKVLSMPQVNIVKKTEVQTGGFSKESILPKRNSDKLIARKKDWDPKKYGGFDSPTVAYSVLVVAKVEKGKSKKLKSVKELLGITIMERSSFEKNPIDFLEAKGYKEVKKDLIIKLPKYSLFELENGRKRMLASAGELQKGNELALPSKYVNFLYLASHYEKLKGSPEDNEQKQLFVEQHKHYLDEIIEQISEFSKRVILADANLDKVLSAYNKHRDKPIREQAENIIHLFTLTNLGAPAAFKYFDTTIDRKRYTSTKEVLDATLIHQSITGLYETRIDLSQLGGDGGEAAAKPAPGSSGGTLQLEEEYRLFEPESTQKQEMDIWLKNFPQAWAETGGMGTAHCQAPVLIQLKATATPISIRQYPMPHEAYQGIKPHIRRMLDQGILKPCQSPWNTPLLPVKKPGTEDYRPVQDLREVNKRVEDIHPTVPNPYNLLSTLPPSHPWYTVLDLKDAFFCLRLHSESQLLFAFEWRDPEIGLSGQLTWTRLPQGFKNSPTLFNEALHSDLADFRVRYPALVLLQYVDDLLLAAATRTECLEGTKALLETLGNKGYRASAKKAQICLQEVTYLGYSLKDGQRWLTKARKEAILSIPVPKNSRQVREFLGKAGYCRLFIPGFAELAAPLYPLTRPGTLFQWGTEQQLAFEDIKKALLSSPALGLPDITKPFELFIDENSGFAKGVLVQKLGPWKRPVAYLSKKLDTVASGWPPCLRMVAAIAILVKDAGKLTLGQPLTILTSHPVEALVRQPPNKWLSNARMTHYQAMLLDAERVHFGPTVSLNPATLLPLPSGGNHHDCLQILAETHGTRPDLTDQPLPDADLTWYTDGSSFIRNGEREAGAAVTTESEVIWAAPLPPGTSAQRAELIALTQALKMAEGKKLTVYTDSRYAFATTHVHGEIYRRRGWLTSEGKEIKNKNEILALLEALFLPKRLSIIHCPGHQKGDSPQAKGNRLADDTAKKAATETHSSLTVLPAGKRTADGSEFEKRTADGSEFESPKKKAKVE

SEQ ID NO: 7616 - protein, 2087 aa, synthetic construct
MPAAKRVKLDGGDKKYSIGLDIGTNSVGWAVITDEYKVPSKKFKVLGNTDRHSIKKNLIGALLFDSGETAEATRLKRTARRRYTRRKNRICYLQEIFSNEMAKVDDSFFHRLEESFLVEEDKKHERHPIFGNIVDEVAYHEKYPTIYHLRKKLVDSTDKADLRLIYLALAHMIKFRGHFLIEGDLNPDNSDVDKLFIQLVQTYNQLFEENPINASGVDAKAILSARLSKSRRLENLIAQLPGEKKNGLFGNLIALSLGLTPNFKSNFDLAEDAKLQLSKDTYDDDLDNLLAQIGDQYADLFLAAKNLSDAILLSDILRVNTEITKAPLSASMIKRYDEHHQDLTLLKALVRQQLPEKYKEIFFDQSKNGYAGYIDGGASQEEFYKFIKPILEKMDGTEELLVKLNREDLLRKQRTFDNGSIPHQIHLGELHAILRRQEDFYPFLKDNREKIEKILTFRIPYYVGPLARGNSRFAWMTRKSEETITPWNFEEVVDKGASAQSFIERMTNFDKNLPNEKVLPKHSLLYEYFTVYNELTKVKYVTEGMRKPAFLSGEQKKAIVDLLFKTNRKVTVKQLKEDYFKKIECFDSVEISGVEDRFNASLGTYHDLLKIIKDKDFLDNEENEDILEDIVLTLTLFEDREMIEERLKTYAHLFDDKVMKQLKRRRYTGWGRLSRKLINGIRDKQSGKTILDFLKSDGFANRNFMQLIHDDSLTFKEDIQKAQVSGQGDSLHEHIANLAGSPAIKKGILQTVKVVDELVKVMGRHKPENIVIEMARENQTTQKGQKNSRERMKRIEEGIKELGSQILKEHPVENTQLQNEKLYLYYLQNGRDMYVDQELDINRLSDYDVDHIVPQSFLKDDSIDNKVLTRSDKARGKSDNVPSEEVVKKMKNYWRQLLNAKLITQRKFDNLTKAERGGLSELDKAGFIKRQLVETRQITKHVAQILDSRMNTKYDENDKLIREVKVITLKSKLVSDFRKDFQFYKVREINNYHHAHDAYLNAVVGTALIKKYPKLESEFVYGDYKVYDVRKMIAKSEQEIGKATAKYFFYSNIMNFFKTEITLANGEIRKRPLIETNGETGEIVWDKGRDFATVRKVLSMPQVNIVKKTEVQTGGFSKESILPKRNSDKLIARKKDWDPKKYGGFDSPTVAYSVLVVAKVEKGKSKKLKSVKELLGITIMERSSFEKNPIDFLEAKGYKEVKKDLIIKLPKYSLFELENGRKRMLASAGELQKGNELALPSKYVNFLYLASHYEKLKGSPEDNEQKQLFVEQHKHYLDEIIEQISEFSKRVILADANLDKVLSAYNKHRDKPIREQAENIIHLFTLTNLGAPAAFKYFDTTIDRKRYTSTKEVLDATLIHQSITGLYETRIDLSQLGGDGGEAAAKPAPGSSGGVPWLTQQPLQLTILVPLQEYQEKILSKTALPEDQKQQLKTLFVKYDNLWQHWENQVGHRKIRPHNIATGDYPPRPQKQYPINPKAKPSIQIVIDDLLKQGVLTPQNSTMNTPVYPVPKPDGRWRMVLDYREVNKTIPLTAAQNQHSAGILATIVRQKYKTTLDLANGFWAHPITPESYWLTAFTWQGKQYCWTRLPQGFLNSPALFNADVVDLLKEIPNVQVYVDDIYLSHDDPKEHVQQLEKVFQILLQAGYVVSLKKSEIGQKTVEFLGFNITKEGRGLTDTFKTKLLNITPPKDLKQLQSILGKLNFARNFIPNFAELVQPLYNLIAPAKGKYIEWSEENTKQLNMVIEALNTASNLEERLPEQRLVIKVNTSPSAGYVRYYNETGKKPIMYLNYVFSKAELKFSMLEKLLTTMHKALIKAMDLAMGQEILVYSPIVSMTKIQKTPLPERKALPIRWITWMTYLEDPRIQFHYDKTLPELKHIPDVYTSSQSPVKHPSQYEGVFYTDGSAIKSPDPTKSNNAGMGIVHATYKPEYQVLNQWSIPLGNHTAQMAEIAAVEFACKKALKIPGPVLVITDSFYVAESANKELPYWKSNGFVNNKKKPLKHISKWKSIAECLSMKPDITIQHEKGISLQIPVFILKGNALADKLATQGSYVVNAGKRTADGSEFEKRTADGSEFESPKKKAKVE

SEQ ID NO: 7617 - protein, 2094 aa, synthetic construct
MPAAKRVKLDGGDKKYSIGLDIGTNSVGWAVITDEYKVPSKKFKVLGNTDRHSIKKNLIGALLFDSGETAEATRLKRTARRRYTRRKNRICYLQEIFSNEMAKVDDSFFHRLEESFLVEEDKKHERHPIFGNIVDEVAYHEKYPTIYHLRKKLVDSTDKADLRLIYLALAHMIKFRGHFLIEGDLNPDNSDVDKLFIQLVQTYNQLFEENPINASGVDAKAILSARLSKSRRLENLIAQLPGEKKNGLFGNLIALSLGLTPNFKSNFDLAEDAKLQLSKDTYDDDLDNLLAQIGDQYADLFLAAKNLSDAILLSDILRVNTEITKAPLSASMIKRYDEHHQDLTLLKALVRQQLPEKYKEIFFDQSKNGYAGYIDGGASQEEFYKFIKPILEKMDGTEELLVKLNREDLLRKQRTFDNGSIPHQIHLGELHAILRRQEDFYPFLKDNREKIEKILTFRIPYYVGPLARGNSRFAWMTRKSEETITPWNFEEVVDKGASAQSFIERMTNFDKNLPNEKVLPKHSLLYEYFTVYNELTKVKYVTEGMRKPAFLSGEQKKAIVDLLFKTNRKVTVKQLKEDYFKKIECFDSVEISGVEDRFNASLGTYHDLLKIIKDKDFLDNEENEDILEDIVLTLTLFEDREMIEERLKTYAHLFDDKVMKQLKRRRYTGWGRLSRKLINGIRDKQSGKTILDFLKSDGFANRNFMQLIHDDSLTFKEDIQKAQVSGQGDSLHEHIANLAGSPAIKKGILQTVKVVDELVKVMGRHKPENIVIEMARENQTTQKGQKNSRERMKRIEEGIKELGSQILKEHPVENTQLQNEKLYLYYLQNGRDMYVDQELDINRLSDYDVDHIVPQSFLKDDSIDNKVLTRSDKARGKSDNVPSEEVVKKMKNYWRQLLNAKLITQRKFDNLTKAERGGLSELDKAGFIKRQLVETRQITKHVAQILDSRMNTKYDENDKLIREVKVITLKSKLVSDFRKDFQFYKVREINNYHHAHDAYLNAVVGTALIKKYPKLESEFVYGDYKVYDVRKMIAKSEQEIGKATAKYFFYSNIMNFFKTEITLANGEIRKRPLIETNGETGEIVWDKGRDFATVRKVLSMPQVNIVKKTEVQTGGFSKESILPKRNSDKLIARKKDWDPKKYGGFDSPTVAYSVLVVAKVEKGKSKKLKSVKELLGITIMERSSFEKNPIDFLEAKGYKEVKKDLIIKLPKYSLFELENGRKRMLASAGELQKGNELALPSKYVNFLYLASHYEKLKGSPEDNEQKQLFVEQHKHYLDEIIEQISEFSKRVILADANLDKVLSAYNKHRDKPIREQAENIIHLFTLTNLGAPAAFKYFDTTIDRKRYTSTKEVLDATLIHQSITGLYETRIDLSQLGGDGGEAAAKPAPGSSGGVLNLEEEYRLHEKPVPSSIDPSWLQLFPTVWAERAGMGLANQVPPVVVELRSGASPVAVRQYPMSKEAREGIRPHIQKFLDLGVLVPCRSPWNTPLLPVKKPGTNDYRPVQDLREINKRVQDIHPTVPNPYNLLSSLPPSYTWYSVLDLKDAFFCLRLHPNSQPLFAFEWKDPEKGNTGQLTWTRLPQGFKNSPTLFNEALHRDLAPFRALNPQVVLLQYVDDLLVAAPTYEDCKKGTQKLLQELSKLGYRVSAKKAQLCQREVTYLGYLLKEGKRWLTPARKATVMKIPVPTTPRQVREFLGTAGFCRLWIPGFASLAAPLYPLTKPSIPFIWTEEHQQAFDHIKKALLSAPALALPDLTKPFTLYIDERAGVARGVLTQTLGPWRRPVAYLSKKLDPVASGWPTCLKAVAAVALLLKDADKLTLGQNVTVIASHSLESIVRQPPDRWMTNARMTHYQSLLLNERVSFAPPAVLNPATLLPVESEATPVHRCSEILAEETGTRRDLEDQPLPGVPTWYTDGSSFITEGKRRAGAPIVDGKRTVWASSLPEGTSAQKAELVALTQALRLAEGKNINIYTDSRYAFATAHIHGAIYKQRGWLTSAGKDIKNKEEILALLEAIHLPRRVAIIHCPGHQRGSNPVATGNRRADEAAKQAALSTRVLAGTTKPAGKRTADGSEFEKRTADGSEFESPKKKAKVE

SEQ ID NO: 7618 - protein, 2094 aa, synthetic construct
MPAAKRVKLDGGDKKYSIGLDIGTNSVGWAVITDEYKVPSKKFKVLGNTDRHSIKKNLIGALLFDSGETAEATRLKRTARRRYTRRKNRICYLQEIFSNEMAKVDDSFFHRLEESFLVEEDKKHERHPIFGNIVDEVAYHEKYPTIYHLRKKLVDSTDKADLRLIYLALAHMIKFRGHFLIEGDLNPDNSDVDKLFIQLVQTYNQLFEENPINASGVDAKAILSARLSKSRRLENLIAQLPGEKKNGLFGNLIALSLGLTPNFKSNFDLAEDAKLQLSKDTYDDDLDNLLAQIGDQYADLFLAAKNLSDAILLSDILRVNTEITKAPLSASMIKRYDEHHQDLTLLKALVRQQLPEKYKEIFFDQSKNGYAGYIDGGASQEEFYKFIKPILEKMDGTEELLVKLNREDLLRKQRTFDNGSIPHQIHLGELHAILRRQEDFYPFLKDNREKIEKILTFRIPYYVGPLARGNSRFAWMTRKSEETITPWNFEEVVDKGASAQSFIERMTNFDKNLPNEKVLPKHSLLYEYFTVYNELTKVKYVTEGMRKPAFLSGEQKKAIVDLLFKTNRKVTVKQLKEDYFKKIECFDSVEISGVEDRFNASLGTYHDLLKIIKDKDFLDNEENEDILEDIVLTLTLFEDREMIEERLKTYAHLFDDKVMKQLKRRRYTGWGRLSRKLINGIRDKQSGKTILDFLKSDGFANRNFMQLIHDDSLTFKEDIQKAQVSGQGDSLHEHIANLAGSPAIKKGILQTVKVVDELVKVMGRHKPENIVIEMARENQTTQKGQKNSRERMKRIEEGIKELGSQILKEHPVENTQLQNEKLYLYYLQNGRDMYVDQELDINRLSDYDVDHIVPQSFLKDDSIDNKVLTRSDKARGKSDNVPSEEVVKKMKNYWRQLLNAKLITQRKFDNLTKAERGGLSELDKAGFIKRQLVETRQITKHVAQILDSRMNTKYDENDKLIREVKVITLKSKLVSDFRKDFQFYKVREINNYHHAHDAYLNAVVGTALIKKYPKLESEFVYGDYKVYDVRKMIAKSEQEIGKATAKYFFYSNIMNFFKTEITLANGEIRKRPLIETNGETGEIVWDKGRDFATVRKVLSMPQVNIVKKTEVQTGGFSKESILPKRNSDKLIARKKDWDPKKYGGFDSPTVAYSVLVVAKVEKGKSKKLKSVKELLGITIMERSSFEKNPIDFLEAKGYKEVKKDLIIKLPKYSLFELENGRKRMLASAGELQKGNELALPSKYVNFLYLASHYEKLKGSPEDNEQKQLFVEQHKHYLDEIIEQISEFSKRVILADANLDKVLSAYNKHRDKPIREQAENIIHLFTLTNLGAPAAFKYFDTTIDRKRYTSTKEVLDATLIHQSITGLYETRIDLSQLGGDGGEAAAKPAPGSSGGVLNLEEEYRLHEKPVPSSIDPSWLQLFPTVWAERAGMGLANQVPPVVVELRSGASPVAVRQYPMSKEAREGIRPHIQKFLDLGVLVPCRSPWNTPLLPVKKPGTNDYRPVQDLREINKRVQDIHPTVPNPYNLLSSLPPSYTWYSVLDLKDAFFCLRLHPNSQPLFAFEWKDPEKGNTGQLTWTRLPQGFKNSPTLFNEALHRDLAPFRALNPQVVLLQYVDDLLVAAPTYEDCKKGTQKLLQELSKLGYRVSAKKAQLCQREVTYLGYLLKEGKRWLTPARKATVMKIPVPTTPRQVREFLGKAGFCRLFIPGFASLAAPLYPLTKPSIPFIWTEEHQQAFDHIKKALLSAPALALPDLTKPFTLYIDERAGVARGVLTQTLGPWRRPVAYLSKKLDPVASGWPTCLKAVAAVALLLKDADKLTLGQNVTVIASHSLESIVRQPPDRWMTNARMTHYQSLLLNERVSFAPPAVLNPATLLPVESEATPVHRCSEILAEETGTRRDLEDQPLPGVPTWYTDGSSFITEGKRRAGAPIVDGKRTVWASSLPEGTSAQKAELVALTQALRLAEGKNINIYTDSRYAFATAHIHGAIYKQRGWLTSAGKDIKNKEEILALLEAIHLPRRVAIIHCPGHQRGSNPVATGNRRADEAAKQAALSTRVLAGTTKPAGKRTADGSEFEKRTADGSEFESPKKKAKVE

SEQ ID NO: 7619 - protein, 2218 aa, synthetic construct
MPAAKRVKLDGGDKKYSIGLDIGTNSVGWAVITDEYKVPSKKFKVLGNTDRHSIKKNLIGALLFDSGETAEATRLKRTARRRYTRRKNRICYLQEIFSNEMAKVDDSFFHRLEESFLVEEDKKHERHPIFGNIVDEVAYHEKYPTIYHLRKKLVDSTDKADLRLIYLALAHMIKFRGHFLIEGDLNPDNSDVDKLFIQLVQTYNQLFEENPINASGVDAKAILSARLSKSRRLENLIAQLPGEKKNGLFGNLIALSLGLTPNFKSNFDLAEDAKLQLSKDTYDDDLDNLLAQIGDQYADLFLAAKNLSDAILLSDILRVNTEITKAPLSASMIKRYDEHHQDLTLLKALVRQQLPEKYKEIFFDQSKNGYAGYIDGGASQEEFYKFIKPILEKMDGTEELLVKLNREDLLRKQRTFDNGSIPHQIHLGELHAILRRQEDFYPFLKDNREKIEKILTFRIPYYVGPLARGNSRFAWMTRKSEETITPWNFEEVVDKGASAQSFIERMTNFDKNLPNEKVLPKHSLLYEYFTVYNELTKVKYVTEGMRKPAFLSGEQKKAIVDLLFKTNRKVTVKQLKEDYFKKIECFDSVEISGVEDRFNASLGTYHDLLKIIKDKDFLDNEENEDILEDIVLTLTLFEDREMIEERLKTYAHLFDDKVMKQLKRRRYTGWGRLSRKLINGIRDKQSGKTILDFLKSDGFANRNFMQLIHDDSLTFKEDIQKAQVSGQGDSLHEHIANLAGSPAIKKGILQTVKVVDELVKVMGRHKPENIVIEMARENQTTQKGQKNSRERMKRIEEGIKELGSQILKEHPVENTQLQNEKLYLYYLQNGRDMYVDQELDINRLSDYDVDHIVPQSFLKDDSIDNKVLTRSDKARGKSDNVPSEEVVKKMKNYWRQLLNAKLITQRKFDNLTKAERGGLSELDKAGFIKRQLVETRQITKHVAQILDSRMNTKYDENDKLIREVKVITLKSKLVSDFRKDFQFYKVREINNYHHAHDAYLNAVVGTALIKKYPKLESEFVYGDYKVYDVRKMIAKSEQEIGKATAKYFFYSNIMNFFKTEITLANGEIRKRPLIETNGETGEIVWDKGRDFATVRKVLSMPQVNIVKKTEVQTGGFSKESILPKRNSDKLIARKKDWDPKKYGGFDSPTVAYSVLVVAKVEKGKSKKLKSVKELLGITIMERSSFEKNPIDFLEAKGYKEVKKDLIIKLPKYSLFELENGRKRMLASAGELQKGNELALPSKYVNFLYLASHYEKLKGSPEDNEQKQLFVEQHKHYLDEIIEQISEFSKRVILADANLDKVLSAYNKHRDKPIREQAENIIHLFTLTNLGAPAAFKYFDTTIDRKRYTSTKEVLDATLIHQSITGLYETRIDLSQLGGDGGEAAAKPAPGSSGGTLGDQGSRGSDPLPEPRVTLTVEGIPTEFLVNTGAEHSVLTKPMGKMGSKRTVVAGATGSKVYPWTTKRLLKIGQKQVTHSFLVIPECPAPLLGRDLLTKLKAQIQFSTEGPQVTWEDRPAMCLVLNLEEEYRLHEKPVPPSIDPSWLQLFPMVWAEKAGMGLANQVPPVVVELKSDASPVAVRQYPMSKEAREGIRPHIQRFLDLGILVPCQSPWNTPLLPVKKPGTNDYRPVQDLREVNKRVQDIHPTVPNPYNLLSSLPPSHTWYSVLDLKDAFFCLKLHPNSQPLFAFEWRDPEKGNTGQLTWTRLPQGFKNSPTLFDEALHRDLASFRALNPQVVMLQYVDDLLVAAPTYRDCKEGTRRLLQELSKLGYRVSAKKAQLCREEVTYLGYLLKGGKRWLTPARKATVMKIPTPTTPRQVREFLGTAGFCRLWIPGFASLAAPLYPLTREKVPFTWTEAHQEAFGRIKEALLSAPALALPDLTKPFALYVDEKEGVARGVLTQTLGPWRRPVAYLSKKLDPVASGWPTCLKAIAAVALLLKDADKLTLGQNVLVIAPHNLESIVRQPPDRWMTNARMTHYQSLLLNERVSFAPPAILNPATLLPVESDDTPIHICSEILAEETGTRPDLRDQPLPGVPAWYTDGSSFIMDGRRQAGAAIVDNKRTVWASNLPEGTSAQKAELIALTQALRLAEGKSINIYTDSRYAFATAHVHGAIYKQRGLLTSAGKDIKNKEEILALLEAIHLPKRVAIIHCPGHQRGTDPVATGNRKADEAAKQAAQSTRILTETTKNAGKRTADGSEFEKRTADGSEFESPKKKAKVE

SEQ ID NO: 7620 - protein, 2218 aa, synthetic construct
MPAAKRVKLDGGDKKYSIGLDIGTNSVGWAVITDEYKVPSKKFKVLGNTDRHSIKKNLIGALLFDSGETAEATRLKRTARRRYTRRKNRICYLQEIFSNEMAKVDDSFFHRLEESFLVEEDKKHERHPIFGNIVDEVAYHEKYPTIYHLRKKLVDSTDKADLRLIYLALAHMIKFRGHFLIEGDLNPDNSDVDKLFIQLVQTYNQLFEENPINASGVDAKAILSARLSKSRRLENLIAQLPGEKKNGLFGNLIALSLGLTPNFKSNFDLAEDAKLQLSKDTYDDDLDNLLAQIGDQYADLFLAAKNLSDAILLSDILRVNTEITKAPLSASMIKRYDEHHQDLTLLKALVRQQLPEKYKEIFFDQSKNGYAGYIDGGASQEEFYKFIKPILEKMDGTEELLVKLNREDLLRKQRTFDNGSIPHQIHLGELHAILRRQEDFYPFLKDNREKIEKILTFRIPYYVGPLARGNSRFAWMTRKSEETITPWNFEEVVDKGASAQSFIERMTNFDKNLPNEKVLPKHSLLYEYFTVYNELTKVKYVTEGMRKPAFLSGEQKKAIVDLLFKTNRKVTVKQLKEDYFKKIECFDSVEISGVEDRFNASLGTYHDLLKIIKDKDFLDNEENEDILEDIVLTLTLFEDREMIEERLKTYAHLFDDKVMKQLKRRRYTGWGRLSRKLINGIRDKQSGKTILDFLKSDGFANRNFMQLIHDDSLTFKEDIQKAQVSGQGDSLHEHIANLAGSPAIKKGILQTVKVVDELVKVMGRHKPENIVIEMARENQTTQKGQKNSRERMKRIEEGIKELGSQILKEHPVENTQLQNEKLYLYYLQNGRDMYVDQELDINRLSDYDVDHIVPQSFLKDDSIDNKVLTRSDKARGKSDNVPSEEVVKKMKNYWRQLLNAKLITQRKFDNLTKAERGGLSELDKAGFIKRQLVETRQITKHVAQILDSRMNTKYDENDKLIREVKVITLKSKLVSDFRKDFQFYKVREINNYHHAHDAYLNAVVGTALIKKYPKLESEFVYGDYKVYDVRKMIAKSEQEIGKATAKYFFYSNIMNFFKTEITLANGEIRKRPLIETNGETGEIVWDKGRDFATVRKVLSMPQVNIVKKTEVQTGGFSKESILPKRNSDKLIARKKDWDPKKYGGFDSPTVAYSVLVVAKVEKGKSKKLKSVKELLGITIMERSSFEKNPIDFLEAKGYKEVKKDLIIKLPKYSLFELENGRKRMLASAGELQKGNELALPSKYVNFLYLASHYEKLKGSPEDNEQKQLFVEQHKHYLDEIIEQISEFSKRVILADANLDKVLSAYNKHRDKPIREQAENIIHLFTLTNLGAPAAFKYFDTTIDRKRYTSTKEVLDATLIHQSITGLYETRIDLSQLGGDGGEAAAKPAPGSSGGTLGDQGSRGSDPLPEPRVTLTVEGIPTEFLVNTGAEHSVLTKPMGKMGSKRTVVAGATGSKVYPWTTKRLLKIGQKQVTHSFLVIPECPAPLLGRDLLTKLKAQIQFSTEGPQVTWEDRPAMCLVLNLEEEYRLHEKPVPPSIDPSWLQLFPMVWAEKAGMGLANQVPPVVVELKSDASPVAVRQYPMSKEAREGIRPHIQRFLDLGILVPCQSPWNTPLLPVKKPGTNDYRPVQDLREVNKRVQDIHPTVPNPYNLLSSLPPSHTWYSVLDLKDAFFCLKLHPNSQPLFAFEWRDPEKGNTGQLTWTRLPQGFKNSPTLFNEALHRDLASFRALNPQVVMLQYVDDLLVAAPTYRDCKEGTRRLLQELSKLGYRVSAKKAQLCREEVTYLGYLLKGGKRWLTPARKATVMKIPTPTTPRQVREFLGTAGFCRLWIPGFASLAAPLYPLTRPKVPFTWTEAHQEAFGRIKEALLSAPALALPDLTKPFALYVDEKEGVARGVLTQTLGPWRRPVAYLSKKLDPVASGWPTCLKAIAAVALLLKDADKLTLGQNVLVIAPHNLESIVRQPPDRWMTNARMTHYQSLLLNERVSFAPPAILNPATLLPVESDDTPIHICSEILAEETGTRPDLRDQPLPGVPAWYTDGSSFIMDGRRQAGAAIVDNKRTVWASNLPEGTSAQKAELIALTQALRLAEGKSINIYTDSRYAFATAHVHGAIYKQRGWLTSAGKDIKNKEEILALLEAIHLPKRVAIIHCPGHQRGTDPVATGNRKADEAAKQAAQSTRILTETTKNAGKRTADGSEFEKRTADGSEFESPKKKAKVE

SEQ ID NO: 7621 - protein, 2096 aa, synthetic construct
MPAAKRVKLDGGDKKYSIGLDIGTNSVGWAVITDEYKVPSKKFKVLGNTDRHSIKKNLIGALLFDSGETAEATRLKRTARRRYTRRKNRICYLQEIFSNEMAKVDDSFFHRLEESFLVEEDKKHERHPIFGNIVDEVAYHEKYPTIYHLRKKLVDSTDKADLRLIYLALAHMIKFRGHFLIEGDLNPDNSDVDKLFIQLVQTYNQLFEENPINASGVDAKAILSARLSKSRRLENLIAQLPGEKKNGLFGNLIALSLGLTPNFKSNFDLAEDAKLQLSKDTYDDDLDNLLAQIGDQYADLFLAAKNLSDAILLSDILRVNTEITKAPLSASMIKRYDEHHQDLTLLKALVRQQLPEKYKEIFFDQSKNGYAGYIDGGASQEEFYKFIKPILEKMDGTEELLVKLNREDLLRKQRTFDNGSIPHQIHLGELHAILRRQEDFYPFLKDNREKIEKILTFRIPYYVGPLARGNSRFAWMTRKSEETITPWNFEEVVDKGASAQSFIERMTNFDKNLPNEKVLPKHSLLYEYFTVYNELTKVKYVTEGMRKPAFLSGEQKKAIVDLLFKTNRKVTVKQLKEDYFKKIECFDSVEISGVEDRFNASLGTYHDLLKIIKDKDFLDNEENEDILEDIVLTLTLFEDREMIEERLKTYAHLFDDKVMKQLKRRRYTGWGRLSRKLINGIRDKQSGKTILDFLKSDGFANRNFMQLIHDDSLTFKEDIQKAQVSGQGDSLHEHIANLAGSPAIKKGILQTVKVVDELVKVMGRHKPENIVIEMARENQTTQKGQKNSRERMKRIEEGIKELGSQILKEHPVENTQLQNEKLYLYYLQNGRDMYVDQELDINRLSDYDVDHIVPQSFLKDDSIDNKVLTRSDKARGKSDNVPSEEVVKKMKNYWRQLLNAKLITQRKFDNLTKAERGGLSELDKAGFIKRQLVETRQITKHVAQILDSRMNTKYDENDKLIREVKVITLKSKLVSDFRKDFQFYKVREINNYHHAHDAYLNAVVGTALIKKYPKLESEFVYGDYKVYDVRKMIAKSEQEIGKATAKYFFYSNIMNFFKTEITLANGEIRKRPLIETNGETGEIVWDKGRDFATVRKVLSMPQVNIVKKTEVQTGGFSKESILPKRNSDKLIARKKDWDPKKYGGFDSPTVAYSVLVVAKVEKGKSKKLKSVKELLGITIMERSSFEKNPIDFLEAKGYKEVKKDLIIKLPKYSLFELENGRKRMLASAGELQKGNELALPSKYVNFLYLASHYEKLKGSPEDNEQKQLFVEQHKHYLDEIIEQISEFSKRVILADANLDKVLSAYNKHRDKPIREQAENIIHLFTLTNLGAPAAFKYFDTTIDRKRYTSTKEVLDATLIHQSITGLYETRIDLSQLGGDGGEAAAKPAPGSSGGTLNLEDEYRLYETSAEPEVSPGSTWLSDFPQAWAETGGMGLAVRQAPLIIPLKATSTPVSIKQYPMSQEAKLGIKPHIQRLLDQGILVPCQSPWNTPLLPVKKPGTNDYRPVQDLREVNKRVEDIHPTVPNPYNLLSGLPPSHRWYTVLDLKDAFFCLRLHPTSQPLFAFEWRDPGMGISGQLTWTRLPQGFKNSPTLFNEALHRDLADFRIQHPDLILLQYVDDILLAATSELDCQQGTRALLLTLGNLGYRASAKKAQLCQKQVKYLGYLLKEGQRWLTEARKETVMGQPTPKTPRQLREFLGKAGFCRLFIPGFAEMAAPLYPLTKPGTLFNWGPDQQKAYQEIKQALLTAPALGLPDLTKPFELFVDEKQGYAKGVLTQKLGPWRRPVAYLSKKLDPVAAGWPPCLRMVAAIAVLRKDAGKLTMGQPLVILAPHAVEALVKQPPDRWLSNARMTHYQAMLLDTDRVQFGPVVALNPATLLPLPEEGAPHDCLEILAETHGTRPDLTDQPIPDADHTWYTDGSSFLQEGQRKAGAAVTTETEVIWARALPAGTSAQRAELIALTQALKMAEGKRLNVYTDSRYAFATAHIHGEIYRRRGWLTSEGREIKNKSEILALLKALFLPKRLSIIHCLGHQKGDSAEARGNRLADQAAREAAIKTPPDTSTLLAGKRTADGSEFEKRTADGSEFESPKKKAKVE

SEQ ID NO: 7622 - protein, 2096 aa, synthetic construct
MPAAKRVKLDGGDKKYSIGLDIGTNSVGWAVITDEYKVPSKKFKVLGNTDRHSIKKNLIGALLFDSGETAEATRLKRTARRRYTRRKNRICYLQEIFSNEMAKVDDSFFHRLEESFLVEEDKKHERHPIFGNIVDEVAYHEKYPTIYHLRKKLVDSTDKADLRLIYLALAHMIKFRGHFLIEGDLNPDNSDVDKLFIQLVQTYNQLFEENPINASGVDAKAILSARLSKSRRLENLIAQLPGEKKNGLFGNLIALSLGLTPNFKSNFDLAEDAKLQLSKDTYDDDLDNLLAQIGDQYADLFLAAKNLSDAILLSDILRVNTEITKAPLSASMIKRYDEHHQDLTLLKALVRQQLPEKYKEIFFDQSKNGYAGYIDGGASQEEFYKFIKPILEKMDGTEELLVKLNREDLLRKQRTFDNGSIPHQIHLGELHAILRRQEDFYPFLKDNREKIEKILTFRIPYYVGPLARGNSRFAWMTRKSEETITPWNFEEVVDKGASAQSFIERMTNFDKNLPNEKVLPKHSLLYEYFTVYNELTKVKYVTEGMRKPAFLSGEQKKAIVDLLFKTNRKVTVKQLKEDYFKKIECFDSVEISGVEDRFNASLGTYHDLLKIIKDKDFLDNEENEDILEDIVLTLTLFEDREMIEERLKTYAHLFDDKVMKQLKRRRYTGWGRLSRKLINGIRDKQSGKTILDFLKSDGFANRNFMQLIHDDSLTFKEDIQKAQVSGQGDSLHEHIANLAGSPAIKKGILQTVKVVDELVKVMGRHKPENIVIEMARENQTTQKGQKNSRERMKRIEEGIKELGSQILKEHPVENTQLQNEKLYLYYLQNGRDMYVDQELDINRLSDYDVDHIVPQSFLKDDSIDNKVLTRSDKARGKSDNVPSEEVVKKMKNYWRQLLNAKLITQRKFDNLTKAERGGLSELDKAGFIKRQLVETRQITKHVAQILDSRMNTKYDENDKLIREVKVITLKSKLVSDFRKDFQFYKVREINNYHHAHDAYLNAVVGTALIKKYPKLESEFVYGDYKVYDVRKMIAKSEQEIGKATAKYFFYSNIMNFFKTEITLANGEIRKRPLIETNGETGEIVWDKGRDFATVRKVLSMPQVNIVKKTEVQTGGFSKESILPKRNSDKLIARKKDWDPKKYGGFDSPTVAYSVLVVAKVEKGKSKKLKSVKELLGITIMERSSFEKNPIDFLEAKGYKEVKKDLIIKLPKYSLFELENGRKRMLASAGELQKGNELALPSKYVNFLYLASHYEKLKGSPEDNEQKQLFVEQHKHYLDEIIEQISEFSKRVILADANLDKVLSAYNKHRDKPIREQAENIIHLFTLTNLGAPAAFKYFDTTIDRKRYTSTKEVLDATLIHQSITGLYETRIDLSQLGGDGGEAAAKPAPGSSGGTLNIEDEYRLHETSKGPDVPLGSTWLSDFPQAWAETGGMGLAFRQAPLIISLKATSTPVSIKQYPMSQEARLGIKPHIQRLLDQGILVPCQSPWNTPLLPVKKPGTNDYRPVQDLREVNKRVEDIHPTVPNPYNLLSGLPPSHQWYTVLDLKDAFFCLRLHPTSQSLFAFEWKDPEMGISGQLTWTRLPQGFKNSPTLFNEALHRDLADFRIQHPDLILLQYVDDLLLAATSELDCQQGTRALLQTLGDLGYRASAKKAQICQKQVKYLGYLLKEGQRWLTEARKETVMGQPTPKTPRQLREFLGKAGLCRLFIPGFAEMAAPLYPLTKPGTLFKWGPDQQKAYQEIKQALLTAPALGLPDLTKPFELFVDEKQGYAKGVLTQKLGPWRRPVAYLSKKLDPVAAGWPPCLRMVAAIAVLTKDVGKLTMGQPLVILAPHAVEALVKQPPDRWLSNARMTHYQALLLDTDRVQFGPIVALNPATLLPLPEEGLQHDCLDILAEAHGTRPDLTDQPLPDADHTWYTDGSSFLQEGQRRAGAAVTTETEVIWAKALPAGTSAQRAELIALTQALKMAAGKKLNVYTDSRYAFATAHIHGEIYRRRGWLTSEGKEIKNKDEILALLKALFLPKRLSIIHCPGHQKGNHAEARGNRMADQAAREVATRETPETSTLLAGKRTADGSEFEKRTADGSEFESPKKKAKVE

SEQ ID NO: 7623 - protein, 2096 aa, synthetic construct
MPAAKRVKLDGGDKKYSIGLDIGTNSVGWAVITDEYKVPSKKFKVLGNTDRHSIKKNLIGALLFDSGETAEATRLKRTARRRYTRRKNRICYLQEIFSNEMAKVDDSFFHRLEESFLVEEDKKHERHPIFGNIVDEVAYHEKYPTIYHLRKKLVDSTDKADLRLIYLALAHMIKFRGHFLIEGDLNPDNSDVDKLFIQLVQTYNQLFEENPINASGVDAKAILSARLSKSRRLENLIAQLPGEKKNGLFGNLIALSLGLTPNFKSNFDLAEDAKLQLSKDTYDDDLDNLLAQIGDQYADLFLAAKNLSDAILLSDILRVNTEITKAPLSASMIKRYDEHHQDLTLLKALVRQQLPEKYKEIFFDQSKNGYAGYIDGGASQEEFYKFIKPILEKMDGTEELLVKLNREDLLRKQRTFDNGSIPHQIHLGELHAILRRQEDFYPFLKDNREKIEKILTFRIPYYVGPLARGNSRFAWMTRKSEETITPWNFEEVVDKGASAQSFIERMTNFDKNLPNEKVLPKHSLLYEYFTVYNELTKVKYVTEGMRKPAFLSGEQKKAIVDLLFKTNRKVTVKQLKEDYFKKIECFDSVEISGVEDRFNASLGTYHDLLKIIKDKDFLDNEENEDILEDIVLTLTLFEDREMIEERLKTYAHLFDDKVMKQLKRRRYTGWGRLSRKLINGIRDKQSGKTILDFLKSDGFANRNFMQLIHDDSLTFKEDIQKAQVSGQGDSLHEHIANLAGSPAIKKGILQTVKVVDELVKVMGRHKPENIVIEMARENQTTQKGQKNSRERMKRIEEGIKELGSQILKEHPVENTQLQNEKLYLYYLQNGRDMYVDQELDINRLSDYDVDHIVPQSFLKDDSIDNKVLTRSDKARGKSDNVPSEEVVKKMKNYWRQLLNAKLITQRKFDNLTKAERGGLSELDKAGFIKRQLVETRQITKHVAQILDSRMNTKYDENDKLIREVKVITLKSKLVSDFRKDFQFYKVREINNYHHAHDAYLNAVVGTALIKKYPKLESEFVYGDYKVYDVRKMIAKSEQEIGKATAKYFFYSNIMNFFKTEITLANGEIRKRPLIETNGETGEIVWDKGRDFATVRKVLSMPQVNIVKKTEVQTGGFSKESILPKRNSDKLIARKKDWDPKKYGGFDSPTVAYSVLVVAKVEKGKSKKLKSVKELLGITIMERSSFEKNPIDFLEAKGYKEVKKDLIIKLPKYSLFELENGRKRMLASAGELQKGNELALPSKYVNFLYLASHYEKLKGSPEDNEQKQLFVEQHKHYLDEIIEQISEFSKRVILADANLDKVLSAYNKHRDKPIREQAENIIHLFTLTNLGAPAAFKYFDTTIDRKRYTSTKEVLDATLIHQSITGLYETRIDLSQLGGDGGEAAAKPAPGSSGGTLNIEDEHRLHETSKEPDVSLGSTWLSDFPQAWAETGGMGLAVRQAPLIIPLKATSTPVSIKQYPMSQEARLGIKPHIQRLLDQGILVPCQSPWNTPLLPVKKPGTNDYRPVQDLREVNKRVEDIHPTVPNPYNLLSGLPPSHQWYTVLDLKDAFFCLRLHPTSQPLFAFEWRDPEMGISGQLTWTRLPQGFKNSPTLFDEALHRDLADFRIQHPDLILLQYVDDLLLAATSELDCQQGTRALLQTLGNLGYRASAKKAQICQKQVKYLGYLLKEGQRWLTEARKETVMGQPTPKTPRQLREFLGTAGFCRLWIPGFAEMAAPLYPLTKTGTLFNWGPDQQKAYQEIKQALLTAPALGLPDLTKPFELFVDEKQGYAKGVLTQKLGPWRRPVAYLSKKLDPVAAGWPPCLRMVAAIAVLTKDAGKLTMGQPLVILAPHAVEALVKQPPDRWLSNARMTHYQALLLDTDRVQFGPVVALNPATLLPLPEEGLQHNCLDILAEAHGTRPDLTDQPLPDADHTWYTDGSSLLQEGQRKAGAAVTTETEVIWAKALPAGTSAQRAELIALTQALKMAEGKKLNVYTDSRYAFATAHIHGEIYRRRGLLTSEGKEIKNKDEILALLKALFLPKRLSIIHCPGHQKGHSAEARGNRMADQAARKAAITETPDTSTLLAGKRTADGSEFEKRTADGSEFESPKKKAKVE

SEQ ID NO: 7624 - protein, 2090 aa, synthetic construct
MPAAKRVKLDGGDKKYSIGLDIGTNSVGWAVITDEYKVPSKKFKVLGNTDRHSIKKNLIGALLFDSGETAEATRLKRTARRRYTRRKNRICYLQEIFSNEMAKVDDSFFHRLEESFLVEEDKKHERHPIFGNIVDEVAYHEKYPTIYHLRKKLVDSTDKADLRLIYLALAHMIKFRGHFLIEGDLNPDNSDVDKLFIQLVQTYNQLFEENPINASGVDAKAILSARLSKSRRLENLIAQLPGEKKNGLFGNLIALSLGLTPNFKSNFDLAEDAKLQLSKDTYDDDLDNLLAQIGDQYADLFLAAKNLSDAILLSDILRVNTEITKAPLSASMIKRYDEHHQDLTLLKALVRQQLPEKYKEIFFDQSKNGYAGYIDGGASQEEFYKFIKPILEKMDGTEELLVKLNREDLLRKQRTFDNGSIPHQIHLGELHAILRRQEDFYPFLKDNREKIEKILTFRIPYYVGPLARGNSRFAWMTRKSEETITPWNFEEVVDKGASAQSFIERMTNFDKNLPNEKVLPKHSLLYEYFTVYNELTKVKYVTEGMRKPAFLSGEQKKAIVDLLFKTNRKVTVKQLKEDYFKKIECFDSVEISGVEDRFNASLGTYHDLLKIIKDKDFLDNEENEDILEDIVLTLTLFEDREMIEERLKTYAHLFDDKVMKQLKRRRYTGWGRLSRKLINGIRDKQSGKTILDFLKSDGFANRNFMQLIHDDSLTFKEDIQKAQVSGQGDSLHEHIANLAGSPAIKKGILQTVKVVDELVKVMGRHKPENIVIEMARENQTTQKGQKNSRERMKRIEEGIKELGSQILKEHPVENTQLQNEKLYLYYLQNGRDMYVDQELDINRLSDYDVDHIVPQSFLKDDSIDNKVLTRSDKARGKSDNVPSEEVVKKMKNYWRQLLNAKLITQRKFDNLTKAERGGLSELDKAGFIKRQLVETRQITKHVAQILDSRMNTKYDENDKLIREVKVITLKSKLVSDFRKDFQFYKVREINNYHHAHDAYLNAVVGTALIKKYPKLESEFVYGDYKVYDVRKMIAKSEQEIGKATAKYFFYSNIMNFFKTEITLANGEIRKRPLIETNGETGEIVWDKGRDFATVRKVLSMPQVNIVKKTEVQTGGFSKESILPKRNSDKLIARKKDWDPKKYGGFDSPTVAYSVLVVAKVEKGKSKKLKSVKELLGITIMERSSFEKNPIDFLEAKGYKEVKKDLIIKLPKYSLFELENGRKRMLASAGELQKGNELALPSKYVNFLYLASHYEKLKGSPEDNEQKQLFVEQHKHYLDEIIEQISEFSKRVILADANLDKVLSAYNKHRDKPIREQAENIIHLFTLTNLGAPAAFKYFDTTIDRKRYTSTKEVLDATLIHQSITGLYETRIDLSQLGGDGGEAAAKPAPGSSGGTLQLDDEYRLYSPLVKPDQNIQFWLEQFPQAWAETAGMGLAKQVPPQVIQLKASATPVSVRQYPLSKEAQEGIRPHVQRLIQQGILVPVQSPWNTPLLPVRKPGTNDYRPVQDLREVNKRVQDIHPTVPNPYNLLCALPPQRSWYTVLDLKDAFFCLRLHPTSQPLFAFEWRDPGTGRTGQLTWTRLPQGFKNSPTIFDEALHRDLANFRIQHPQVTLLQYVDDLLLAGATKQDCLEGTKALLLELSDLGYRASAKKAQICRREVTYLGYSLRDGQRWLTEARKKTVVQIPAPTTAKQVREFLGTAGFCRLWIPGFATLAAPLYPLTKEKGEFSWAPEHQKAFDAIKKALLSAPALALPDVTKPFTLYVDERKGVARGVLTQTLGPWRRPVAYLSKKLDPVASGWPVCLKAIAAVAILVKDADKLTLGQNITVIAPHALENIVRQPPDRWMTNARMTHYQSLLLTERVTFAPPAALNPATLLPEETDEPVTHDCHQLLIEETGVRKDLTDIPLTGEVLTWFTDGSSYVVEGKRMAGAAVVDGTRTIWASSLPEGTSAQKAELMALTQALRLAEGKSINIYTDSRYAFATAHVHGAIYKQRGLLTSAGREIKNKEEILSLLEALHLPKRLAIIHCPGHQKAKDPISRGNQMADRVAKQAAQGVNLLAGKRTADGSEFEKRTADGSEFESPKKKAKVE

SEQ ID NO: 7625 - protein, 2096 aa, synthetic construct
MPAAKRVKLDGGDKKYSIGLDIGTNSVGWAVITDEYKVPSKKFKVLGNTDRHSIKKNLIGALLFDSGETAEATRLKRTARRRYTRRKNRICYLQEIFSNEMAKVDDSFFHRLEESFLVEEDKKHERHPIFGNIVDEVAYHEKYPTIYHLRKKLVDSTDKADLRLIYLALAHMIKFRGHFLIEGDLNPDNSDVDKLFIQLVQTYNQLFEENPINASGVDAKAILSARLSKSRRLENLIAQLPGEKKNGLFGNLIALSLGLTPNFKSNFDLAEDAKLQLSKDTYDDDLDNLLAQIGDQYADLFLAAKNLSDAILLSDILRVNTEITKAPLSASMIKRYDEHHQDLTLLKALVRQQLPEKYKEIFFDQSKNGYAGYIDGGASQEEFYKFIKPILEKMDGTEELLVKLNREDLLRKQRTFDNGSIPHQIHLGELHAILRRQEDFYPFLKDNREKIEKILTFRIPYYVGPLARGNSRFAWMTRKSEETITPWNFEEVVDKGASAQSFIERMTNFDKNLPNEKVLPKHSLLYEYFTVYNELTKVKYVTEGMRKPAFLSGEQKKAIVDLLFKTNRKVTVKQLKEDYFKKIECFDSVEISGVEDRFNASLGTYHDLLKIIKDKDFLDNEENEDILEDIVLTLTLFEDREMIEERLKTYAHLFDDKVMKQLKRRRYTGWGRLSRKLINGIRDKQSGKTILDFLKSDGFANRNFMQLIHDDSLTFKEDIQKAQVSGQGDSLHEHIANLAGSPAIKKGILQTVKVVDELVKVMGRHKPENIVIEMARENQTTQKGQKNSRERMKRIEEGIKELGSQILKEHPVENTQLQNEKLYLYYLQNGRDMYVDQELDINRLSDYDVDHIVPQSFLKDDSIDNKVLTRSDKARGKSDNVPSEEVVKKMKNYWRQLLNAKLITQRKFDNLTKAERGGLSELDKAGFIKRQLVETRQITKHVAQILDSRMNTKYDENDKLIREVKVITLKSKLVSDFRKDFQFYKVREINNYHHAHDAYLNAVVGTALIKKYPKLESEFVYGDYKVYDVRKMIAKSEQEIGKATAKYFFYSNIMNFFKTEITLANGEIRKRPLIETNGETGEIVWDKGRDFATVRKVLSMPQVNIVKKTEVQTGGFSKESILPKRNSDKLIARKKDWDPKKYGGFDSPTVAYSVLVVAKVEKGKSKKLKSVKELLGITIMERSSFEKNPIDFLEAKGYKEVKKDLIIKLPKYSLFELENGRKRMLASAGELQKGNELALPSKYVNFLYLASHYEKLKGSPEDNEQKQLFVEQHKHYLDEIIEQISEFSKRVILADANLDKVLSAYNKHRDKPIREQAENIIHLFTLTNLGAPAAFKYFDTTIDRKRYTSTKEVLDATLIHQSITGLYETRIDLSQLGGDGGEAAAKPAPGSSGGTLNIEDEYRLHETSKEPDVPLGSTWLSDFPQAWAETGGMGLAVRQAPLIIPLKATSTPVSIKQYPMSQEARLGIKPHIQRLLDQGILVPCQSPWNTPLLPVKKPGTNDYRPVQDLREVNKRVEDIHPTVPNPYNLLSGLPPSHQWYTVLDLKDAFFCLRLHPTSQPLFAFEWRDPEMGISGQLTWTRLPQGFKNSPTLFNEALHRDLADFRIQHPDLILLQYVDDLLLAATSEQDCQRGTRALLQTLGNLGYRASAKKAQICQKQVKYLGYLLKEGQRWLTEARKETVMGQPTPKTPRQLREFLGTAGFCRLWIPGFAEMAAPLYPLTKPGTLFNWGPDQQKAYQEIKQALLTAPALGLPDLTKPFELFVDEKQGYAKGVLTQKLGPWRRPVAYLSKKLDPVAAGWPPCLRMVAAIAVLTKDAGKLTMGQPLVILAPHAVEALVKQPPDRWLSNARMTHYQAMLLDTDRVQFGPVVALNPATLLPLPEKEAPHDCLEILAETHGTRPDLTDQPIPDADYTWYTDGSSFLQEGQRRAGAAVTTETEVIWARALPAGTSAQRAELIALTQALKMAEGKKLNVYTDSRYAFATAHVHGEIYRRRGWLTSEGREIKNKNEILALLKALFLPKRLSIIHCPGHQKGNSAEARGNRMADQAAREAAMKAVLETSTLLAGKRTADGSEFEKRTADGSEFESPKKKAKVE

SEQ ID NO: 7626 - protein, 2098 aa, synthetic construct
MPAAKRVKLDGGDKKYSIGLDIGTNSVGWAVITDEYKVPSKKFKVLGNTDRHSIKKNLIGALLFDSGETAEATRLKRTARRRYTRRKNRICYLQEIFSNEMAKVDDSFFHRLEESFLVEEDKKHERHPIFGNIVDEVAYHEKYPTIYHLRKKLVDSTDKADLRLIYLALAHMIKFRGHFLIEGDLNPDNSDVDKLFIQLVQTYNQLFEENPINASGVDAKAILSARLSKSRRLENLIAQLPGEKKNGLFGNLIALSLGLTPNFKSNFDLAEDAKLQLSKDTYDDDLDNLLAQIGDQYADLFLAAKNLSDAILLSDILRVNTEITKAPLSASMIKRYDEHHQDLTLLKALVRQQLPEKYKEIFFDQSKNGYAGYIDGGASQEEFYKFIKPILEKMDGTEELLVKLNREDLLRKQRTFDNGSIPHQIHLGELHAILRRQEDFYPFLKDNREKIEKILTFRIPYYVGPLARGNSRFAWMTRKSEETITPWNFEEVVDKGASAQSFIERMTNFDKNLPNEKVLPKHSLLYEYFTVYNELTKVKYVTEGMRKPAFLSGEQKKAIVDLLFKTNRKVTVKQLKEDYFKKIECFDSVEISGVEDRFNASLGTYHDLLKIIKDKDFLDNEENEDILEDIVLTLTLFEDREMIEERLKTYAHLFDDKVMKQLKRRRYTGWGRLSRKLINGIRDKQSGKTILDFLKSDGFANRNFMQLIHDDSLTFKEDIQKAQVSGQGDSLHEHIANLAGSPAIKKGILQTVKVVDELVKVMGRHKPENIVIEMARENQTTQKGQKNSRERMKRIEEGIKELGSQILKEHPVENTQLQNEKLYLYYLQNGRDMYVDQELDINRLSDYDVDHIVPQSFLKDDSIDNKVLTRSDKARGKSDNVPSEEVVKKMKNYWRQLLNAKLITQRKFDNLTKAERGGLSELDKAGFIKRQLVETRQITKHVAQILDSRMNTKYDENDKLIREVKVITLKSKLVSDFRKDFQFYKVREINNYHHAHDAYLNAVVGTALIKKYPKLESEFVYGDYKVYDVRKMIAKSEQEIGKATAKYFFYSNIMNFFKTEITLANGEIRKRPLIETNGETGEIVWDKGRDFATVRKVLSMPQVNIVKKTEVQTGGFSKESILPKRNSDKLIARKKDWDPKKYGGFDSPTVAYSVLVVAKVEKGKSKKLKSVKELLGITIMERSSFEKNPIDFLEAKGYKEVKKDLIIKLPKYSLFELENGRKRMLASAGELQKGNELALPSKYVNFLYLASHYEKLKGSPEDNEQKQLFVEQHKHYLDEIIEQISEFSKRVILADANLDKVLSAYNKHRDKPIREQAENIIHLFTLTNLGAPAAFKYFDTTIDRKRYTSTKEVLDATLIHQSITGLYETRIDLSQLGGDGGPAPGSSEAAAKGGTAPLEEEYRLFLEAPIQNVTLLEQWKREIPKVWAEINPPGLASTQAPIHVQLLSTALPVRVRQYPITLEAKRSLRETIRKFRAAGILRPVHSPWNTPLLPVRKSGTSEYRMVQDLREVNKRVETIHPTVPNPYTLLSLLPPDRIWYSVLDLKDAFFCIPLAPESQLIFAFEWADAEEGESGQLTWTRLPQGFKNSPTLFNEALNRDLQGFRLDHPSVSLLQYVDDLLIAADTQAACLSATRDLLMTLAELGYRVSGKKAQLCQEEVTYLGFKIHKGSRSLSNSRTQAILQIPVPKTKRQVREFLGTIGYCRLWIPGFAELAQPLYAATRPGNDPLVWGEKEEEAFQSLKLALTQPPALALPSLDKPFQLFVEETSGAAKGVLTQALGPWKRPVAYLSKRLDPVAAGWPRCLRAIAAAALLTREASKLTFGQDIEITSSHNLESLLRSPPDKWLTNARITQYQVLLLDPPRVRFKQTAALNPATLLPETDDTLPIHHCLDTLDSLTSTRPDLTDQPLAQAEATLFTDGSSYIRDGKRYAGAAVVTLDSVIWAEPLPIGTSAQKAELIALTKALEWSKDKSVNIYTDSRYAFATLHVHGMIYRERGWLTAGGKAIKNAPEILALLTAVWLPKRVAVMHCKGHQKDDAPTSTGNRRADEVAREVAIRPLSTQATISAGKRTADGSEFEKRTADGSEFESPKKKAKVE

SEQ ID NO: 7627 - protein, 2098 aa, synthetic construct
MPAAKRVKLDGGDKKYSIGLDIGTNSVGWAVITDEYKVPSKKFKVLGNTDRHSIKKNLIGALLFDSGETAEATRLKRTARRRYTRRKNRICYLQEIFSNEMAKVDDSFFHRLEESFLVEEDKKHERHPIFGNIVDEVAYHEKYPTIYHLRKKLVDSTDKADLRLIYLALAHMIKFRGHFLIEGDLNPDNSDVDKLFIQLVQTYNQLFEENPINASGVDAKAILSARLSKSRRLENLIAQLPGEKKNGLFGNLIALSLGLTPNFKSNFDLAEDAKLQLSKDTYDDDLDNLLAQIGDQYADLFLAAKNLSDAILLSDILRVNTEITKAPLSASMIKRYDEHHQDLTLLKALVRQQLPEKYKEIFFDQSKNGYAGYIDGGASQEEFYKFIKPILEKMDGTEELLVKLNREDLLRKQRTFDNGSIPHQIHLGELHAILRRQEDFYPFLKDNREKIEKILTFRIPYYVGPLARGNSRFAWMTRKSEETITPWNFEEVVDKGASAQSFIERMTNFDKNLPNEKVLPKHSLLYEYFTVYNELTKVKYVTEGMRKPAFLSGEQKKAIVDLLFKTNRKVTVKQLKEDYFKKIECFDSVEISGVEDRFNASLGTYHDLLKIIKDKDFLDNEENEDILEDIVLTLTLFEDREMIEERLKTYAHLFDDKVMKQLKRRRYTGWGRLSRKLINGIRDKQSGKTILDFLKSDGFANRNFMQLIHDDSLTFKEDIQKAQVSGQGDSLHEHIANLAGSPAIKKGILQTVKVVDELVKVMGRHKPENIVIEMARENQTTQKGQKNSRERMKRIEEGIKELGSQILKEHPVENTQLQNEKLYLYYLQNGRDMYVDQELDINRLSDYDVDHIVPQSFLKDDSIDNKVLTRSDKARGKSDNVPSEEVVKKMKNYWRQLLNAKLITQRKFDNLTKAERGGLSELDKAGFIKRQLVETRQITKHVAQILDSRMNTKYDENDKLIREVKVITLKSKLVSDFRKDFQFYKVREINNYHHAHDAYLNAVVGTALIKKYPKLESEFVYGDYKVYDVRKMIAKSEQEIGKATAKYFFYSNIMNFFKTEITLANGEIRKRPLIETNGETGEIVWDKGRDFATVRKVLSMPQVNIVKKTEVQTGGFSKESILPKRNSDKLIARKKDWDPKKYGGFDSPTVAYSVLVVAKVEKGKSKKLKSVKELLGITIMERSSFEKNPIDFLEAKGYKEVKKDLIIKLPKYSLFELENGRKRMLASAGELQKGNELALPSKYVNFLYLASHYEKLKGSPEDNEQKQLFVEQHKHYLDEIIEQISEFSKRVILADANLDKVLSAYNKHRDKPIREQAENIIHLFTLTNLGAPAAFKYFDTTIDRKRYTSTKEVLDATLIHQSITGLYETRIDLSQLGGDGGPAPGSSEAAAKGGTAPLEEEYRLFLEAPIQNVTLLEQWKREIPKVWAEINPPGLASTQAPIHVQLLSTALPVRVRQYPITLEAKRSLRETIRKFRAAGILRPVHSPWNTPLLPVRKSGTSEYRMVQDLREVNKRVETIHPTVPNPYTLLSLLPPDRIWYSVLDLKDAFFCIPLAPESQLIFAFEWADAEEGESGQLTWTRLPQGFKNSPTLFNEALNRDLQGFRLDHPSVSLLQYVDDLLIAADTQAACLSATRDLLMTLAELGYRVSGKKAQLCQEEVTYLGFKIHKGSRSLSNSRTQAILQIPVPKTKRQVREFLGKIGYCRLFIPGFAELAQPLYAATRPGNDPLVWGEKEEEAFQSLKLALTQPPALALPSLDKPFQLFVEETSGAAKGVLTQALGPWKRPVAYLSKRLDPVAAGWPRCLRAIAAAALLTREASKLTFGQDIEITSSHNLESLLRSPPDKWLTNARITQYQVLLLDPPRVRFKQTAALNPATLLPETDDTLPIHHCLDTLDSLTSTRPDLTDQPLAQAEATLFTDGSSYIRDGKRYAGAAVVTLDSVIWAEPLPIGTSAQKAELIALTKALEWSKDKSVNIYTDSRYAFATLHVHGMIYRERGWLTAGGKAIKNAPEILALLTAVWLPKRVAVMHCKGHQKDDAPTSTGNRRADEVAREVAIRPLSTQATISAGKRTADGSEFEKRTADGSEFESPKKKAKVE

SEQ ID NO: 7628 - protein, 2087 aa, synthetic construct
MPAAKRVKLDGGDKKYSIGLDIGTNSVGWAVITDEYKVPSKKFKVLGNTDRHSIKKNLIGALLFDSGETAEATRLKRTARRRYTRRKNRICYLQEIFSNEMAKVDDSFFHRLEESFLVEEDKKHERHPIFGNIVDEVAYHEKYPTIYHLRKKLVDSTDKADLRLIYLALAHMIKFRGHFLIEGDLNPDNSDVDKLFIQLVQTYNQLFEENPINASGVDAKAILSARLSKSRRLENLIAQLPGEKKNGLFGNLIALSLGLTPNFKSNFDLAEDAKLQLSKDTYDDDLDNLLAQIGDQYADLFLAAKNLSDAILLSDILRVNTEITKAPLSASMIKRYDEHHQDLTLLKALVRQQLPEKYKEIFFDQSKNGYAGYIDGGASQEEFYKFIKPILEKMDGTEELLVKLNREDLLRKQRTFDNGSIPHQIHLGELHAILRRQEDFYPFLKDNREKIEKILTFRIPYYVGPLARGNSRFAWMTRKSEETITPWNFEEVVDKGASAQSFIERMTNFDKNLPNEKVLPKHSLLYEYFTVYNELTKVKYVTEGMRKPAFLSGEQKKAIVDLLFKTNRKVTVKQLKEDYFKKIECFDSVEISGVEDRFNASLGTYHDLLKIIKDKDFLDNEENEDILEDIVLTLTLFEDREMIEERLKTYAHLFDDKVMKQLKRRRYTGWGRLSRKLINGIRDKQSGKTILDFLKSDGFANRNFMQLIHDDSLTFKEDIQKAQVSGQGDSLHEHIANLAGSPAIKKGILQTVKVVDELVKVMGRHKPENIVIEMARENQTTQKGQKNSRERMKRIEEGIKELGSQILKEHPVENTQLQNEKLYLYYLQNGRDMYVDQELDINRLSDYDVDHIVPQSFLKDDSIDNKVLTRSDKARGKSDNVPSEEVVKKMKNYWRQLLNAKLITQRKFDNLTKAERGGLSELDKAGFIKRQLVETRQITKHVAQILDSRMNTKYDENDKLIREVKVITLKSKLVSDFRKDFQFYKVREINNYHHAHDAYLNAVVGTALIKKYPKLESEFVYGDYKVYDVRKMIAKSEQEIGKATAKYFFYSNIMNFFKTEITLANGEIRKRPLIETNGETGEIVWDKGRDFATVRKVLSMPQVNIVKKTEVQTGGFSKESILPKRNSDKLIARKKDWDPKKYGGFDSPTVAYSVLVVAKVEKGKSKKLKSVKELLGITIMERSSFEKNPIDFLEAKGYKEVKKDLIIKLPKYSLFELENGRKRMLASAGELQKGNELALPSKYVNFLYLASHYEKLKGSPEDNEQKQLFVEQHKHYLDEIIEQISEFSKRVILADANLDKVLSAYNKHRDKPIREQAENIIHLFTLTNLGAPAAFKYFDTTIDRKRYTSTKEVLDATLIHQSITGLYETRIDLSQLGGDGGPAPGSSEAAAKGGVPWILKKPLELTIKLDLEEQQGTLLNNSILSKKGKEELKQLFEKYSALWQSWENQVGHRRIRPHKIATGTVKPTPQKQYHINPKAKPDIQIVINDLLKQGVLIQKESTMNTPVYPVPKPNGRWRMVLDYRAVNKVTPLIAVQNQHSYGILGSLFKGRYKTTIDLSNGFWAHPIVPEDYWITAFTWQGKQYCWTVLPQGFLNSPGLFTGDVVDLLQGIPNVEVYVDDVYISHDSEKEHLEYLDILFNRLKEAGYIISLKKSNIANSIVDFLGFQITNEGRGLTDTFKEKLENITAPTTLKQLQSILGLLNFARNFIPDFTELIAPLYALIPKSTKNYVPWQIEHSTTLETLITKLNGAEYLQGRKGDKTLIMKVNASYTTGYIRYYNEGEKKPISYVSIVFSKTELKFTELEKLLTTVHKGLLKALDLSMGQNIHVYSPIVSMQNIQKTPQTAKKALASRWLSWLSYLEDPRIRFFYDPQMPALKDLPAVDTGKDNKKHPSNFQHIFYTDGSAITSPTKEGHLNAGMGIVYFINKDGNLQKQQEWSISLGNHTAQFAEIAAFEFALKKCLPLGGNILVVTDSNYVAKAYNEELDVWASNGFVNNRKKPLKHISKWKSVADLKRLRPDVVVTHEPGHQKLDSSPHAYGNNLADQLATQASFKVHAGKRTADGSEFEKRTADGSEFESPKKKAKVE

SEQ ID NO: 7629 - protein, 2095 aa, synthetic construct
MPAAKRVKLDGGDKKYSIGLDIGTNSVGWAVITDEYKVPSKKFKVLGNTDRHSIKKNLIGALLFDSGETAEATRLKRTARRRYTRRKNRICYLQEIFSNEMAKVDDSFFHRLEESFLVEEDKKHERHPIFGNIVDEVAYHEKYPTIYHLRKKLVDSTDKADLRLIYLALAHMIKFRGHFLIEGDLNPDNSDVDKLFIQLVQTYNQLFEENPINASGVDAKAILSARLSKSRRLENLIAQLPGEKKNGLFGNLIALSLGLTPNFKSNFDLAEDAKLQLSKDTYDDDLDNLLAQIGDQYADLFLAAKNLSDAILLSDILRVNTEITKAPLSASMIKRYDEHHQDLTLLKALVRQQLPEKYKEIFFDQSKNGYAGYIDGGASQEEFYKFIKPILEKMDGTEELLVKLNREDLLRKQRTFDNGSIPHQIHLGELHAILRRQEDFYPFLKDNREKIEKILTFRIPYYVGPLARGNSRFAWMTRKSEETITPWNFEEVVDKGASAQSFIERMTNFDKNLPNEKVLPKHSLLYEYFTVYNELTKVKYVTEGMRKPAFLSGEQKKAIVDLLFKTNRKVTVKQLKEDYFKKIECFDSVEISGVEDRFNASLGTYHDLLKIIKDKDFLDNEENEDILEDIVLTLTLFEDREMIEERLKTYAHLFDDKVMKQLKRRRYTGWGRLSRKLINGIRDKQSGKTILDFLKSDGFANRNFMQLIHDDSLTFKEDIQKAQVSGQGDSLHEHIANLAGSPAIKKGILQTVKVVDELVKVMGRHKPENIVIEMARENQTTQKGQKNSRERMKRIEEGIKELGSQILKEHPVENTQLQNEKLYLYYLQNGRDMYVDQELDINRLSDYDVDHIVPQSFLKDDSIDNKVLTRSDKARGKSDNVPSEEVVKKMKNYWRQLLNAKLITQRKFDNLTKAERGGLSELDKAGFIKRQLVETRQITKHVAQILDSRMNTKYDENDKLIREVKVITLKSKLVSDFRKDFQFYKVREINNYHHAHDAYLNAVVGTALIKKYPKLESEFVYGDYKVYDVRKMIAKSEQEIGKATAKYFFYSNIMNFFKTEITLANGEIRKRPLIETNGETGEIVWDKGRDFATVRKVLSMPQVNIVKKTEVQTGGFSKESILPKRNSDKLIARKKDWDPKKYGGFDSPTVAYSVLVVAKVEKGKSKKLKSVKELLGITIMERSSFEKNPIDFLEAKGYKEVKKDLIIKLPKYSLFELENGRKRMLASAGELQKGNELALPSKYVNFLYLASHYEKLKGSPEDNEQKQLFVEQHKHYLDEIIEQISEFSKRVILADANLDKVLSAYNKHRDKPIREQAENIIHLFTLTNLGAPAAFKYFDTTIDRKRYTSTKEVLDATLIHQSITGLYETRIDLSQLGGDGGPAPGSSEAAAKGGTLQLEEEYRLFEPESTQKQEMDIWLKNFPQAWAETGGMGTAHCQAPVLIQLKATATPISIRQYPMPHEAYQGIKPHIRRMLDQGILKPCQSPWNTPLLPVKKPGTEDYRPVQDLREVNKRVEDIHPTVPNPYNLLSTLPPSHPWYTVLDLKDAFFCLRLHSESQLLFAFEWRDPEIGLSGQLTWTRLPQGFKNSPTLFNEALHSDLADFRVRYPALVLLQYVDDLLLAAATRTECLEGTKALLETLGNKGYRASAKKAQICLQEVTYLGYSLKDGQRWLTKARKEAILSIPVPKNSRQVREFLGTAGYCRLWIPGFAELAAPLYPLTRPGTLFQWGTEQQLAFEDIKKALLSSPALGLPDITKPFELFIDENSGFAKGVLVQKLGPWKRPVAYLSKKLDTVASGWPPCLRMVAAIAILVKDAGKLTLGQPLTILTSHPVEALVRQPPNKWLSNARMTHYQAMLLDAERVHFGPTVSLNPATLLPLPSGGNHHDCLQILAETHGTRPDLTDQPLPDADLTWYTDGSSFIRNGEREAGAAVTTESEVIWAAPLPPGTSAQRAELIALTQALKMAEGKKLTVYTDSRYAFATTHVHGEIYRRRGWLTSEGKEIKNKNEILALLEALFLPKRLSIIHCPGHQKGDSPQAKGNRLADDTAKKAATETHSSLTVLPAGKRTADGSEFEKRTADGSEFESPKKKAKVE

SEQ ID NO: 7630 - protein, 2094 aa, synthetic construct
MPAAKRVKLDGGDKKYSIGLDIGTNSVGWAVITDEYKVPSKKFKVLGNTDRHSIKKNLIGALLFDSGETAEATRLKRTARRRYTRRKNRICYLQEIFSNEMAKVDDSFFHRLEESFLVEEDKKHERHPIFGNIVDEVAYHEKYPTIYHLRKKLVDSTDKADLRLIYLALAHMIKFRGHFLIEGDLNPDNSDVDKLFIQLVQTYNQLFEENPINASGVDAKAILSARLSKSRRLENLIAQLPGEKKNGLFGNLIALSLGLTPNFKSNFDLAEDAKLQLSKDTYDDDLDNLLAQIGDQYADLFLAAKNLSDAILLSDILRVNTEITKAPLSASMIKRYDEHHQDLTLLKALVRQQLPEKYKEIFFDQSKNGYAGYIDGGASQEEFYKFIKPILEKMDGTEELLVKLNREDLLRKQRTFDNGSIPHQIHLGELHAILRRQEDFYPFLKDNREKIEKILTFRIPYYVGPLARGNSRFAWMTRKSEETITPWNFEEVVDKGASAQSFIERMTNFDKNLPNEKVLPKHSLLYEYFTVYNELTKVKYVTEGMRKPAFLSGEQKKAIVDLLFKTNRKVTVKQLKEDYFKKIECFDSVEISGVEDRFNASLGTYHDLLKIIKDKDFLDNEENEDILEDIVLTLTLFEDREMIEERLKTYAHLFDDKVMKQLKRRRYTGWGRLSRKLINGIRDKQSGKTILDFLKSDGFANRNFMQLIHDDSLTFKEDIQKAQVSGQGDSLHEHIANLAGSPAIKKGILQTVKVVDELVKVMGRHKPENIVIEMARENQTTQKGQKNSRERMKRIEEGIKELGSQILKEHPVENTQLQNEKLYLYYLQNGRDMYVDQELDINRLSDYDVDHIVPQSFLKDDSIDNKVLTRSDKARGKSDNVPSEEVVKKMKNYWRQLLNAKLITQRKFDNLTKAERGGLSELDKAGFIKRQLVETRQITKHVAQILDSRMNTKYDENDKLIREVKVITLKSKLVSDFRKDFQFYKVREINNYHHAHDAYLNAVVGTALIKKYPKLESEFVYGDYKVYDVRKMIAKSEQEIGKATAKYFFYSNIMNFFKTEITLANGEIRKRPLIETNGETGEIVWDKGRDFATVRKVLSMPQVNIVKKTEVQTGGFSKESILPKRNSDKLIARKKDWDPKKYGGFDSPTVAYSVLVVAKVEKGKSKKLKSVKELLGITIMERSSFEKNPIDFLEAKGYKEVKKDLIIKLPKYSLFELENGRKRMLASAGELQKGNELALPSKYVNFLYLASHYEKLKGSPEDNEQKQLFVEQHKHYLDEIIEQISEFSKRVILADANLDKVLSAYNKHRDKPIREQAENIIHLFTLTNLGAPAAFKYFDTTIDRKRYTSTKEVLDATLIHQSITGLYETRIDLSQLGGDGGPAPGSSEAAAKGGVLNLEEEYRLHEKPVPSSIDPSWLQLFPTVWAERAGMGLANQVPPVVVELRSGASPVAVRQYPMSKEAREGIRPHIQKFLDLGVLVPCRSPWNTPLLPVKKPGTNDYRPVQDLREINKRVQDIHPTVPNPYNLLSSLPPSYTWYSVLDLKDAFFCLRLHPNSQPLFAFEWKDPEKGNTGQLTWTRLPQGFKNSPTLFNEALHRDLAPFRALNPQVVLLQYVDDLLVAAPTYEDCKKGTQKLLQELSKLGYRVSAKKAQLCQREVTYLGYLLKEGKRWLTPARKATVMKIPVPTTPRQVREFLGKAGFCRLFIPGFASLAAPLYPLTKPSIPFIWTEEHQQAFDHIKKALLSAPALALPDLTKPFTLYIDERAGVARGVLTQTLGPWRRPVAYLSKKLDPVASGWPTCLKAVAAVALLLKDADKLTLGQNVTVIASHSLESIVRQPPDRWMTNARMTHYQSLLLNERVSFAPPAVLNPATLLPVESEATPVHRCSEILAEETGTRRDLEDQPLPGVPTWYTDGSSFITEGKRRAGAPIVDGKRTVWASSLPEGTSAQKAELVALTQALRLAEGKNINIYTDSRYAFATAHIHGAIYKQRGWLTSAGKDIKNKEEILALLEAIHLPRRVAIIHCPGHQRGSNPVATGNRRADEAAKQAALSTRVLAGTTKPAGKRTADGSEFEKRTADGSEFESPKKKAKVE

SEQ ID NO: 7631 - protein, 2218 aa, synthetic construct
MPAAKRVKLDGGDKKYSIGLDIGTNSVGWAVITDEYKVPSKKFKVLGNTDRHSIKKNLIGALLFDSGETAEATRLKRTARRRYTRRKNRICYLQEIFSNEMAKVDDSFFHRLEESFLVEEDKKHERHPIFGNIVDEVAYHEKYPTIYHLRKKLVDSTDKADLRLIYLALAHMIKFRGHFLIEGDLNPDNSDVDKLFIQLVQTYNQLFEENPINASGVDAKAILSARLSKSRRLENLIAQLPGEKKNGLFGNLIALSLGLTPNFKSNFDLAEDAKLQLSKDTYDDDLDNLLAQIGDQYADLFLAAKNLSDAILLSDILRVNTEITKAPLSASMIKRYDEHHQDLTLLKALVRQQLPEKYKEIFFDQSKNGYAGYIDGGASQEEFYKFIKPILEKMDGTEELLVKLNREDLLRKQRTFDNGSIPHQIHLGELHAILRRQEDFYPFLKDNREKIEKILTFRIPYYVGPLARGNSRFAWMTRKSEETITPWNFEEVVDKGASAQSFIERMTNFDKNLPNEKVLPKHSLLYEYFTVYNELTKVKYVTEGMRKPAFLSGEQKKAIVDLLFKTNRKVTVKQLKEDYFKKIECFDSVEISGVEDRFNASLGTYHDLLKIIKDKDFLDNEENEDILEDIVLTLTLFEDREMIEERLKTYAHLFDDKVMKQLKRRRYTGWGRLSRKLINGIRDKQSGKTILDFLKSDGFANRNFMQLIHDDSLTFKEDIQKAQVSGQGDSLHEHIANLAGSPAIKKGILQTVKVVDELVKVMGRHKPENIVIEMARENQTTQKGQKNSRERMKRIEEGIKELGSQILKEHPVENTQLQNEKLYLYYLQNGRDMYVDQELDINRLSDYDVDHIVPQSFLKDDSIDNKVLTRSDKARGKSDNVPSEEVVKKMKNYWRQLLNAKLITQRKFDNLTKAERGGLSELDKAGFIKRQLVETRQITKHVAQILDSRMNTKYDENDKLIREVKVITLKSKLVSDFRKDFQFYKVREINNYHHAHDAYLNAVVGTALIKKYPKLESEFVYGDYKVYDVRKMIAKSEQEIGKATAKYFFYSNIMNFFKTEITLANGEIRKRPLIETNGETGEIVWDKGRDFATVRKVLSMPQVNIVKKTEVQTGGFSKESILPKRNSDKLIARKKDWDPKKYGGFDSPTVAYSVLVVAKVEKGKSKKLKSVKELLGITIMERSSFEKNPIDFLEAKGYKEVKKDLIIKLPKYSLFELENGRKRMLASAGELQKGNELALPSKYVNFLYLASHYEKLKGSPEDNEQKQLFVEQHKHYLDEIIEQISEFSKRVILADANLDKVLSAYNKHRDKPIREQAENIIHLFTLTNLGAPAAFKYFDTTIDRKRYTSTKEVLDATLIHQSITGLYETRIDLSQLGGDGGPAPGSSEAAAKGGTLGDQGSRGSDPLPEPRVTLTVEGIPTEFLVNTGAEHSVLTKPMGKMGSKRTVVAGATGSKVYPWTTKRLLKIGQKQVTHSFLVIPECPAPLLGRDLLTKLKAQIQFSTEGPQVTWEDRPAMCLVLNLEEEYRLHEKPVPPSIDPSWLQLFPMVWAEKAGMGLANQVPPVVVELKSDASPVAVRQYPMSKEAREGIRPHIQRFLDLGILVPCQSPWNTPLLPVKKPGTNDYRPVQDLREVNKRVQDIHPTVPNPYNLLSSLPPSHTWYSVLDLKDAFFCLKLHPNSQPLFAFEWRDPEKGNTGQLTWTRLPQGFKNSPTLFDEALHRDLASFRALNPQVVMLQYVDDLLVAAPTYRDCKEGTRRLLQELSKLGYRVSAKKAQLCREEVTYLGYLLKGGKRWLTPARKATVMKIPTPTTPRQVREFLGTAGFCRLWIPGFASLAAPLYPLTREKVPFTWTEAHQEAFGRIKEALLSAPALALPDLTKPFALYVDEKEGVARGVLTQTLGPWRRPVAYLSKKLDPVASGWPTCLKAIAAVALLLKDADKLTLGQNVLVIAPHNLESIVRQPPDRWMTNARMTHYQSLLLNERVSFAPPAILNPATLLPVESDDTPIHICSEILAEETGTRPDLRDQPLPGVPAWYTDGSSFIMDGRRQAGAAIVDNKRTVWASNLPEGTSAQKAELIALTQALRLAEGKSINIYTDSRYAFATAHVHGAIYKQRGLLTSAGKDIKNKEEILALLEAIHLPKRVAIIHCPGHQRGTDPVATGNRKADEAAKQAAQSTRILTETTKNAGKRTADGSEFEKRTADGSEFESPKKKAKVE

SEQ ID NO: 7632 - protein, 2127 aa, synthetic construct
MPAAKRVKLDGGDKKYSIGLDIGTNSVGWAVITDEYKVPSKKFKVLGNTDRHSIKKNLIGALLFDSGETAEATRLKRTARRRYTRRKNRICYLQEIFSNEMAKVDDSFFHRLEESFLVEEDKKHERHPIFGNIVDEVAYHEKYPTIYHLRKKLVDSTDKADLRLIYLALAHMIKFRGHFLIEGDLNPDNSDVDKLFIQLVQTYNQLFEENPINASGVDAKAILSARLSKSRRLENLIAQLPGEKKNGLFGNLIALSLGLTPNFKSNFDLAEDAKLQLSKDTYDDDLDNLLAQIGDQYADLFLAAKNLSDAILLSDILRVNTEITKAPLSASMIKRYDEHHQDLTLLKALVRQQLPEKYKEIFFDQSKNGYAGYIDGGASQEEFYKFIKPILEKMDGTEELLVKLNREDLLRKQRTFDNGSIPHQIHLGELHAILRRQEDFYPFLKDNREKIEKILTFRIPYYVGPLARGNSRFAWMTRKSEETITPWNFEEVVDKGASAQSFIERMTNFDKNLPNEKVLPKHSLLYEYFTVYNELTKVKYVTEGMRKPAFLSGEQKKAIVDLLFKTNRKVTVKQLKEDYFKKIECFDSVEISGVEDRFNASLGTYHDLLKIIKDKDFLDNEENEDILEDIVLTLTLFEDREMIEERLKTYAHLFDDKVMKQLKRRRYTGWGRLSRKLINGIRDKQSGKTILDFLKSDGFANRNFMQLIHDDSLTFKEDIQKAQVSGQGDSLHEHIANLAGSPAIKKGILQTVKVVDELVKVMGRHKPENIVIEMARENQTTQKGQKNSRERMKRIEEGIKELGSQILKEHPVENTQLQNEKLYLYYLQNGRDMYVDQELDINRLSDYDVDHIVPQSFLKDDSIDNKVLTRSDKARGKSDNVPSEEVVKKMKNYWRQLLNAKLITQRKFDNLTKAERGGLSELDKAGFIKRQLVETRQITKHVAQILDSRMNTKYDENDKLIREVKVITLKSKLVSDFRKDFQFYKVREINNYHHAHDAYLNAVVGTALIKKYPKLESEFVYGDYKVYDVRKMIAKSEQEIGKATAKYFFYSNIMNFFKTEITLANGEIRKRPLIETNGETGEIVWDKGRDFATVRKVLSMPQVNIVKKTEVQTGGFSKESILPKRNSDKLIARKKDWDPKKYGGFDSPTVAYSVLVVAKVEKGKSKKLKSVKELLGITIMERSSFEKNPIDFLEAKGYKEVKKDLIIKLPKYSLFELENGRKRMLASAGELQKGNELALPSKYVNFLYLASHYEKLKGSPEDNEQKQLFVEQHKHYLDEIIEQISEFSKRVILADANLDKVLSAYNKHRDKPIREQAENIIHLFTLTNLGAPAAFKYFDTTIDRKRYTSTKEVLDATLIHQSITGLYETRIDLSQLGGDGGPAPGSSEAAAKGGLLGRDLLTKLKAQIQFSTEGPQVTWEDRPAMCLVLNLEEEYRLHEKPVPPSIDPSWLQLFPMVWAEKAGMGLANQVPPVVVELKSDASPVAVRQYPMSKEAREGIRPHIQRFLDLGILVPCQSPWNTPLLPVKKPGTNDYRPVQDLREVNKRVQDIHPTVPNPYNLLSSLPPSHTWYSVLDLKDAFFCLKLHPNSQPLFAFEWRDPEKGNTGQLTWTRLPQGFKNSPTLFNEALHRDLASFRALNPQVVMLQYVDDLLVAAPTYRDCKEGTRRLLQELSKLGYRVSAKKAQLCREEVTYLGYLLKGGKRWLTPARKATVMKIPTPTTPRQVREFLGTAGFCRLWIPGFASLAAPLYPLTRPKVPFTWTEAHQEAFGRIKEALLSAPALALPDLTKPFALYVDEKEGVARGVLTQTLGPWRRPVAYLSKKLDPVASGWPTCLKAIAAVALLLKDADKLTLGQNVLVIAPHNLESIVRQPPDRWMTNARMTHYQSLLLNERVSFAPPAILNPATLLPVESDDTPIHICSEILAEETGTRPDLRDQPLPGVPAWYTDGSSFIMDGRRQAGAAIVDNKRTVWASNLPEGTSAQKAELIALTQALRLAEGKSINIYTDSRYAFATAHVHGAIYKQRGWLTSAGKDIKNKEEILALLEAIHLPKRVAIIHCPGHQRGTDPVATGNRKADEAAKQAAQSTRILTETTKNAGKRTADGSEFEKRTADGSEFESPKKKAKVE

SEQ ID NO: 7633 - protein, 2127 aa, synthetic construct
MPAAKRVKLDGGDKKYSIGLDIGTNSVGWAVITDEYKVPSKKFKVLGNTDRHSIKKNLIGALLFDSGETAEATRLKRTARRRYTRRKNRICYLQEIFSNEMAKVDDSFFHRLEESFLVEEDKKHERHPIFGNIVDEVAYHEKYPTIYHLRKKLVDSTDKADLRLIYLALAHMIKFRGHFLIEGDLNPDNSDVDKLFIQLVQTYNQLFEENPINASGVDAKAILSARLSKSRRLENLIAQLPGEKKNGLFGNLIALSLGLTPNFKSNFDLAEDAKLQLSKDTYDDDLDNLLAQIGDQYADLFLAAKNLSDAILLSDILRVNTEITKAPLSASMIKRYDEHHQDLTLLKALVRQQLPEKYKEIFFDQSKNGYAGYIDGGASQEEFYKFIKPILEKMDGTEELLVKLNREDLLRKQRTFDNGSIPHQIHLGELHAILRRQEDFYPFLKDNREKIEKILTFRIPYYVGPLARGNSRFAWMTRKSEETITPWNFEEVVDKGASAQSFIERMTNFDKNLPNEKVLPKHSLLYEYFTVYNELTKVKYVTEGMRKPAFLSGEQKKAIVDLLFKTNRKVTVKQLKEDYFKKIECFDSVEISGVEDRFNASLGTYHDLLKIIKDKDFLDNEENEDILEDIVLTLTLFEDREMIEERLKTYAHLFDDKVMKQLKRRRYTGWGRLSRKLINGIRDKQSGKTILDFLKSDGFANRNFMQLIHDDSLTFKEDIQKAQVSGQGDSLHEHIANLAGSPAIKKGILQTVKVVDELVKVMGRHKPENIVIEMARENQTTQKGQKNSRERMKRIEEGIKELGSQILKEHPVENTQLQNEKLYLYYLQNGRDMYVDQELDINRLSDYDVDHIVPQSFLKDDSIDNKVLTRSDKARGKSDNVPSEEVVKKMKNYWRQLLNAKLITQRKFDNLTKAERGGLSELDKAGFIKRQLVETRQITKHVAQILDSRMNTKYDENDKLIREVKVITLKSKLVSDFRKDFQFYKVREINNYHHAHDAYLNAVVGTALIKKYPKLESEFVYGDYKVYDVRKMIAKSEQEIGKATAKYFFYSNIMNFFKTEITLANGEIRKRPLIETNGETGEIVWDKGRDFATVRKVLSMPQVNIVKKTEVQTGGFSKESILPKRNSDKLIARKKDWDPKKYGGFDSPTVAYSVLVVAKVEKGKSKKLKSVKELLGITIMERSSFEKNPIDFLEAKGYKEVKKDLIIKLPKYSLFELENGRKRMLASAGELQKGNELALPSKYVNFLYLASHYEKLKGSPEDNEQKQLFVEQHKHYLDEIIEQISEFSKRVILADANLDKVLSAYNKHRDKPIREQAENIIHLFTLTNLGAPAAFKYFDTTIDRKRYTSTKEVLDATLIHQSITGLYETRIDLSQLGGDGGPAPGSSEAAAKGGLLGRDLLTKLKAQIQFSTEGPQVTWEDRPAMCLVLNLEEEYRLHEKPVPPSIDPSWLQLFPMVWAEKAGMGLANQVPPVVVELKSDASPVAVRQYPMSKEAREGIRPHIQRFLDLGILVPCQSPWNTPLLPVKKPGTNDYRPVQDLREVNKRVQDIHPTVPNPYNLLSSLPPSHTWYSVLDLKDAFFCLKLHPNSQPLFAFEWRDPEKGNTGQLTWTRLPQGFKNSPTLFNEALHRDLASFRALNPQVVMLQYVDDLLVAAPTYRDCKEGTRRLLQELSKLGYRVSAKKAQLCREEVTYLGYLLKGGKRWLTPARKATVMKIPTPTTPRQVREFLGKAGFCRLFIPGFASLAAPLYPLTRPKVPFTWTEAHQEAFGRIKEALLSAPALALPDLTKPFALYVDEKEGVARGVLTQTLGPWRRPVAYLSKKLDPVASGWPTCLKAIAAVALLLKDADKLTLGQNVLVIAPHNLESIVRQPPDRWMTNARMTHYQSLLLNERVSFAPPAILNPATLLPVESDDTPIHICSEILAEETGTRPDLRDQPLPGVPAWYTDGSSFIMDGRRQAGAAIVDNKRTVWASNLPEGTSAQKAELIALTQALRLAEGKSINIYTDSRYAFATAHVHGAIYKQRGWLTSAGKDIKNKEEILALLEAIHLPKRVAIIHCPGHQRGTDPVATGNRKADEAAKQAAQSTRILTETTKNAGKRTADGSEFEKRTADGSEFESPKKKAKVE

SEQ ID NO: 7634 - protein, 2218 aa, synthetic construct
MPAAKRVKLDGGDKKYSIGLDIGTNSVGWAVITDEYKVPSKKFKVLGNTDRHSIKKNLIGALLFDSGETAEATRLKRTARRRYTRRKNRICYLQEIFSNEMAKVDDSFFHRLEESFLVEEDKKHERHPIFGNIVDEVAYHEKYPTIYHLRKKLVDSTDKADLRLIYLALAHMIKFRGHFLIEGDLNPDNSDVDKLFIQLVQTYNQLFEENPINASGVDAKAILSARLSKSRRLENLIAQLPGEKKNGLFGNLIALSLGLTPNFKSNFDLAEDAKLQLSKDTYDDDLDNLLAQIGDQYADLFLAAKNLSDAILLSDILRVNTEITKAPLSASMIKRYDEHHQDLTLLKALVRQQLPEKYKEIFFDQSKNGYAGYIDGGASQEEFYKFIKPILEKMDGTEELLVKLNREDLLRKQRTFDNGSIPHQIHLGELHAILRRQEDFYPFLKDNREKIEKILTFRIPYYVGPLARGNSRFAWMTRKSEETITPWNFEEVVDKGASAQSFIERMTNFDKNLPNEKVLPKHSLLYEYFTVYNELTKVKYVTEGMRKPAFLSGEQKKAIVDLLFKTNRKVTVKQLKEDYFKKIECFDSVEISGVEDRFNASLGTYHDLLKIIKDKDFLDNEENEDILEDIVLTLTLFEDREMIEERLKTYAHLFDDKVMKQLKRRRYTGWGRLSRKLINGIRDKQSGKTILDFLKSDGFANRNFMQLIHDDSLTFKEDIQKAQVSGQGDSLHEHIANLAGSPAIKKGILQTVKVVDELVKVMGRHKPENIVIEMARENQTTQKGQKNSRERMKRIEEGIKELGSQILKEHPVENTQLQNEKLYLYYLQNGRDMYVDQELDINRLSDYDVDHIVPQSFLKDDSIDNKVLTRSDKARGKSDNVPSEEVVKKMKNYWRQLLNAKLITQRKFDNLTKAERGGLSELDKAGFIKRQLVETRQITKHVAQILDSRMNTKYDENDKLIREVKVITLKSKLVSDFRKDFQFYKVREINNYHHAHDAYLNAVVGTALIKKYPKLESEFVYGDYKVYDVRKMIAKSEQEIGKATAKYFFYSNIMNFFKTEITLANGEIRKRPLIETNGETGEIVWDKGRDFATVRKVLSMPQVNIVKKTEVQTGGFSKESILPKRNSDKLIARKKDWDPKKYGGFDSPTVAYSVLVVAKVEKGKSKKLKSVKELLGITIMERSSFEKNPIDFLEAKGYKEVKKDLIIKLPKYSLFELENGRKRMLASAGELQKGNELALPSKYVNFLYLASHYEKLKGSPEDNEQKQLFVEQHKHYLDEIIEQISEFSKRVILADANLDKVLSAYNKHRDKPIREQAENIIHLFTLTNLGAPAAFKYFDTTIDRKRYTSTKEVLDATLIHQSITGLYETRIDLSQLGGDGGPAPGSSEAAAKGGTLGDQGSRGSDPLPEPRVTLTVEGIPTEFLVNTGAEHSVLTKPMGKMGSKRTVVAGATGSKVYPWTTKRLLKIGQKQVTHSFLVIPECPAPLLGRDLLTKLKAQIQFSTEGPQVTWEDRPAMCLVLNLEEEYRLHEKPVPPSIDPSWLQLFPMVWAEKAGMGLANQVPPVVVELKSDASPVAVRQYPMSKEAREGIRPHIQRFLDLGILVPCQSPWNTPLLPVKKPGTNDYRPVQDLREVNKRVQDIHPTVPNPYNLLSSLPPSHTWYSVLDLKDAFFCLKLHPNSQPLFAFEWRDPEKGNTGQLTWTRLPQGFKNSPTLFNEALHRDLASFRALNPQVVMLQYVDDLLVAAPTYRDCKEGTRRLLQELSKLGYRVSAKKAQLCREEVTYLGYLLKGGKRWLTPARKATVMKIPTPTTPRQVREFLGTAGFCRLWIPGFASLAAPLYPLTRPKVPFTWTEAHQEAFGRIKEALLSAPALALPDLTKPFALYVDEKEGVARGVLTQTLGPWRRPVAYLSKKLDPVASGWPTCLKAIAAVALLLKDADKLTLGQNVLVIAPHNLESIVRQPPDRWMTNARMTHYQSLLLNERVSFAPPAILNPATLLPVESDDTPIHICSEILAEETGTRPDLRDQPLPGVPAWYTDGSSFIMDGRRQAGAAIVDNKRTVWASNLPEGTSAQKAELIALTQALRLAEGKSINIYTDSRYAFATAHVHGAIYKQRGWLTSAGKDIKNKEEILALLEAIHLPKRVAIIHCPGHQRGTDPVATGNRKADEAAKQAAQSTRILTETTKNAGKRTADGSEFEKRTADGSEFESPKKKAKVE

SEQ ID NO: 7635 - protein, 2218 aa, synthetic construct
MPAAKRVKLDGGDKKYSIGLDIGTNSVGWAVITDEYKVPSKKFKVLGNTDRHSIKKNLIGALLFDSGETAEATRLKRTARRRYTRRKNRICYLQEIFSNEMAKVDDSFFHRLEESFLVEEDKKHERHPIFGNIVDEVAYHEKYPTIYHLRKKLVDSTDKADLRLIYLALAHMIKFRGHFLIEGDLNPDNSDVDKLFIQLVQTYNQLFEENPINASGVDAKAILSARLSKSRRLENLIAQLPGEKKNGLFGNLIALSLGLTPNFKSNFDLAEDAKLQLSKDTYDDDLDNLLAQIGDQYADLFLAAKNLSDAILLSDILRVNTEITKAPLSASMIKRYDEHHQDLTLLKALVRQQLPEKYKEIFFDQSKNGYAGYIDGGASQEEFYKFIKPILEKMDGTEELLVKLNREDLLRKQRTFDNGSIPHQIHLGELHAILRRQEDFYPFLKDNREKIEKILTFRIPYYVGPLARGNSRFAWMTRKSEETITPWNFEEVVDKGASAQSFIERMTNFDKNLPNEKVLPKHSLLYEYFTVYNELTKVKYVTEGMRKPAFLSGEQKKAIVDLLFKTNRKVTVKQLKEDYFKKIECFDSVEISGVEDRFNASLGTYHDLLKIIKDKDFLDNEENEDILEDIVLTLTLFEDREMIEERLKTYAHLFDDKVMKQLKRRRYTGWGRLSRKLINGIRDKQSGKTILDFLKSDGFANRNFMQLIHDDSLTFKEDIQKAQVSGQGDSLHEHIANLAGSPAIKKGILQTVKVVDELVKVMGRHKPENIVIEMARENQTTQKGQKNSRERMKRIEEGIKELGSQILKEHPVENTQLQNEKLYLYYLQNGRDMYVDQELDINRLSDYDVDHIVPQSFLKDDSIDNKVLTRSDKARGKSDNVPSEEVVKKMKNYWRQLLNAKLITQRKFDNLTKAERGGLSELDKAGFIKRQLVETRQITKHVAQILDSRMNTKYDENDKLIREVKVITLKSKLVSDFRKDFQFYKVREINNYHHAHDAYLNAVVGTALIKKYPKLESEFVYGDYKVYDVRKMIAKSEQEIGKATAKYFFYSNIMNFFKTEITLANGEIRKRPLIETNGETGEIVWDKGRDFATVRKVLSMPQVNIVKKTEVQTGGFSKESILPKRNSDKLIARKKDWDPKKYGGFDSPTVAYSVLVVAKVEKGKSKKLKSVKELLGITIMERSSFEKNPIDFLEAKGYKEVKKDLIIKLPKYSLFELENGRKRMLASAGELQKGNELALPSKYVNFLYLASHYEKLKGSPEDNEQKQLFVEQHKHYLDEIIEQISEFSKRVILADANLDKVLSAYNKHRDKPIREQAENIIHLFTLTNLGAPAAFKYFDTTIDRKRYTSTKEVLDATLIHQSITGLYETRIDLSQLGGDGGPAPGSSEAAAKGGTLGDQGSRGSDPLPEPRVTLTVEGIPTEFLVNTGAEHSVLTKPMGKMGSKRTVVAGATGSKVYPWTTKRLLKIGQKQVTHSFLVIPECPAPLLGRDLLTKLKAQIQFSTEGPQVTWEDRPAMCLVLNLEEEYRLHEKPVPPSIDPSWLQLFPMVWAEKAGMGLANQVPPVVVELKSDASPVAVRQYPMSKEAREGIRPHIQRFLDLGILVPCQSPWNTPLLPVKKPGTNDYRPVQDLREVNKRVQDIHPTVPNPYNLLSSLPPSHTWYSVLDLKDAFFCLKLHPNSQPLFAFEWRDPEKGNTGQLTWTRLPQGFKNSPTLFNEALHRDLASFRALNPQVVMLQYVDDLLVAAPTYRDCKEGTRRLLQELSKLGYRVSAKKAQLCREEVTYLGYLLKGGKRWLTPARKATVMKIPTPTTPRQVREFLGKAGFCRLFIPGFASLAAPLYPLTRPKVPFTWTEAHQEAFGRIKEALLSAPALALPDLTKPFALYVDEKEGVARGVLTQTLGPWRRPVAYLSKKLDPVASGWPTCLKAIAAVALLLKDADKLTLGQNVLVIAPHNLESIVRQPPDRWMTNARMTHYQSLLLNERVSFAPPAILNPATLLPVESDDTPIHICSEILAEETGTRPDLRDQPLPGVPAWYTDGSSFIMDGRRQAGAAIVDNKRTVWASNLPEGTSAQKAELIALTQALRLAEGKSINIYTDSRYAFATAHVHGAIYKQRGWLTSAGKDIKNKEEILALLEAIHLPKRVAIIHCPGHQRGTDPVATGNRKADEAAKQAAQSTRILTETTKNAGKRTADGSEFEKRTADGSEFESPKKKAKVE

SEQ ID NO: 7636 - protein, 2096 aa, synthetic construct
MPAAKRVKLDGGDKKYSIGLDIGTNSVGWAVITDEYKVPSKKFKVLGNTDRHSIKKNLIGALLFDSGETAEATRLKRTARRRYTRRKNRICYLQEIFSNEMAKVDDSFFHRLEESFLVEEDKKHERHPIFGNIVDEVAYHEKYPTIYHLRKKLVDSTDKADLRLIYLALAHMIKFRGHFLIEGDLNPDNSDVDKLFIQLVQTYNQLFEENPINASGVDAKAILSARLSKSRRLENLIAQLPGEKKNGLFGNLIALSLGLTPNFKSNFDLAEDAKLQLSKDTYDDDLDNLLAQIGDQYADLFLAAKNLSDAILLSDILRVNTEITKAPLSASMIKRYDEHHQDLTLLKALVRQQLPEKYKEIFFDQSKNGYAGYIDGGASQEEFYKFIKPILEKMDGTEELLVKLNREDLLRKQRTFDNGSIPHQIHLGELHAILRRQEDFYPFLKDNREKIEKILTFRIPYYVGPLARGNSRFAWMTRKSEETITPWNFEEVVDKGASAQSFIERMTNFDKNLPNEKVLPKHSLLYEYFTVYNELTKVKYVTEGMRKPAFLSGEQKKAIVDLLFKTNRKVTVKQLKEDYFKKIECFDSVEISGVEDRFNASLGTYHDLLKIIKDKDFLDNEENEDILEDIVLTLTLFEDREMIEERLKTYAHLFDDKVMKQLKRRRYTGWGRLSRKLINGIRDKQSGKTILDFLKSDGFANRNFMQLIHDDSLTFKEDIQKAQVSGQGDSLHEHIANLAGSPAIKKGILQTVKVVDELVKVMGRHKPENIVIEMARENQTTQKGQKNSRERMKRIEEGIKELGSQILKEHPVENTQLQNEKLYLYYLQNGRDMYVDQELDINRLSDYDVDHIVPQSFLKDDSIDNKVLTRSDKARGKSDNVPSEEVVKKMKNYWRQLLNAKLITQRKFDNLTKAERGGLSELDKAGFIKRQLVETRQITKHVAQILDSRMNTKYDENDKLIREVKVITLKSKLVSDFRKDFQFYKVREINNYHHAHDAYLNAVVGTALIKKYPKLESEFVYGDYKVYDVRKMIAKSEQEIGKATAKYFFYSNIMNFFKTEITLANGEIRKRPLIETNGETGEIVWDKGRDFATVRKVLSMPQVNIVKKTEVQTGGFSKESILPKRNSDKLIARKKDWDPKKYGGFDSPTVAYSVLVVAKVEKGKSKKLKSVKELLGITIMERSSFEKNPIDFLEAKGYKEVKKDLIIKLPKYSLFELENGRKRMLASAGELQKGNELALPSKYVNFLYLASHYEKLKGSPEDNEQKQLFVEQHKHYLDEIIEQISEFSKRVILADANLDKVLSAYNKHRDKPIREQAENIIHLFTLTNLGAPAAFKYFDTTIDRKRYTSTKEVLDATLIHQSITGLYETRIDLSQLGGDGGPAPGSSEAAAKGGTLGIEDEYRLHETSTEPDVSLGSTWLSDFPQAWAETGGMGLAVRQAPLIIPLKATSTPVSIQQYPMSHEARLGIKPHIQRLLDQGILVPCQSPWNTPLLPVKKPGTNDYRPVQDLREVNKRVEDIHPTVPNPYNLLSGLPPSHQWYTVLDLKDAFFCLRLHPTSQPLFAFEWRDPGMGISGQLTWTRLPQGFKNSPTLFNEALHRDLADFRIQHPDLILLQYVDDILLAATSELDCQQGTRALLQTLGDLGYRASAKKAQICQKQVKYLGYLLREGQRWLTEARKETVMGQPVPKTPRQLREFLGTAGFCRLWIPGFAEMAAPLYPLTKPGTLFSWGPDQQKAYQEIKQALLTAPALGLPDLTKPFELFVDEKQGYAKGVLTQKLGPWRRPVAYLSKKLDPVAAGWPPCLRMVAAIAVLTKDAGKLTMGQPLVILAPHAVEALVKQPPDRWLSNARMTHYQAMLLDTDRVQFGPVVALNPATLLPLPEEGAPHDCLEILAETHGTRPDLTDQPIPDADHTWYTDGSSFLQEGQRKAGAAVTTETEVIWAGALPAGTSAQRAELIALTQALKMAEGKRLNVYTDSRYAFATAHIHGEIYRRRGWLTSEGREIKNKSEILALLKALFLPKRLSIIHCLGHQKGDSAEARGNRLADQAAREAAIKTPPDTSTLLAGKRTADGSEFEKRTADGSEFESPKKKAKVE

SEQ ID NO: 7637 - protein, 2096 aa, synthetic construct
MPAAKRVKLDGGDKKYSIGLDIGTNSVGWAVITDEYKVPSKKFKVLGNTDRHSIKKNLIGALLFDSGETAEATRLKRTARRRYTRRKNRICYLQEIFSNEMAKVDDSFFHRLEESFLVEEDKKHERHPIFGNIVDEVAYHEKYPTIYHLRKKLVDSTDKADLRLIYLALAHMIKFRGHFLIEGDLNPDNSDVDKLFIQLVQTYNQLFEENPINASGVDAKAILSARLSKSRRLENLIAQLPGEKKNGLFGNLIALSLGLTPNFKSNFDLAEDAKLQLSKDTYDDDLDNLLAQIGDQYADLFLAAKNLSDAILLSDILRVNTEITKAPLSASMIKRYDEHHQDLTLLKALVRQQLPEKYKEIFFDQSKNGYAGYIDGGASQEEFYKFIKPILEKMDGTEELLVKLNREDLLRKQRTFDNGSIPHQIHLGELHAILRRQEDFYPFLKDNREKIEKILTFRIPYYVGPLARGNSRFAWMTRKSEETITPWNFEEVVDKGASAQSFIERMTNFDKNLPNEKVLPKHSLLYEYFTVYNELTKVKYVTEGMRKPAFLSGEQKKAIVDLLFKTNRKVTVKQLKEDYFKKIECFDSVEISGVEDRFNASLGTYHDLLKIIKDKDFLDNEENEDILEDIVLTLTLFEDREMIEERLKTYAHLFDDKVMKQLKRRRYTGWGRLSRKLINGIRDKQSGKTILDFLKSDGFANRNFMQLIHDDSLTFKEDIQKAQVSGQGDSLHEHIANLAGSPAIKKGILQTVKVVDELVKVMGRHKPENIVIEMARENQTTQKGQKNSRERMKRIEEGIKELGSQILKEHPVENTQLQNEKLYLYYLQNGRDMYVDQELDINRLSDYDVDHIVPQSFLKDDSIDNKVLTRSDKARGKSDNVPSEEVVKKMKNYWRQLLNAKLITQRKFDNLTKAERGGLSELDKAGFIKRQLVETRQITKHVAQILDSRMNTKYDENDKLIREVKVITLKSKLVSDFRKDFQFYKVREINNYHHAHDAYLNAVVGTALIKKYPKLESEFVYGDYKVYDVRKMIAKSEQEIGKATAKYFFYSNIMNFFKTEITLANGEIRKRPLIETNGETGEIVWDKGRDFATVRKVLSMPQVNIVKKTEVQTGGFSKESILPKRNSDKLIARKKDWDPKKYGGFDSPTVAYSVLVVAKVEKGKSKKLKSVKELLGITIMERSSFEKNPIDFLEAKGYKEVKKDLIIKLPKYSLFELENGRKRMLASAGELQKGNELALPSKYVNFLYLASHYEKLKGSPEDNEQKQLFVEQHKHYLDEIIEQISEFSKRVILADANLDKVLSAYNKHRDKPIREQAENIIHLFTLTNLGAPAAFKYFDTTIDRKRYTSTKEVLDATLIHQSITGLYETRIDLSQLGGDGGPAPGSSEAAAKGGTLNIEDEYRLHETSKEPDVSLGSTWLSDFPQAWAETGGMGLAVRQAPLIIPLKATSTPVSIKQYPMSQEARLGIKPHIQRLLDQGILVPCQSPWNTPLLPVKKPGTNDYRPVQDLREVNKRVEDIHPTVPNPYNLLSGLPPSHQWYTVLDLKDAFFCLRLHPTSQPLFAFEWRDPEMGISGQLTWTRLPQGFKNSPTLFDEALHRDLAGFRIQHPDLILLQYVDDLLLAATSELDCQQGTRALLQTLGDLGYRASAKKAQICQKQVKYLGYLLKEGQRWLTEARKETVMGQPIPKTPRQLREFLGTAGFCRLWIPGFAEMAAPLYPLTKTGTLFNWGPDQQKAFQEIKQALLTAPALGLPDLTKPFELFVDEKQGYAKGVLTQKLGPWRRPVAYLSKKLDPVAAGWPPCLRMVAAIAVLTKDAGKLTMGQPLVILAPHAVEALVKQPPDRWLSNARMTHYQALLLDTDRVQFGPVVALNPATLLPLPEEGLQHDCLDILAEAHGTRSDLMDQPLPDADHTWYTDGSSFLQEGQRKAGAAVTTETEVIWARALPAGTSAQRAELIALTQALKMAEGKKLNVYTDSRYAFATAHIHGEIYRRRGLLTSEGKEIKNKDEILALLKALFLPKRLSIIHCPGHQKGNSAEARGNRMADQAAREVATRETPETSTLLAGKRTADGSEFEKRTADGSEFESPKKKAKVE

SEQ ID NO: 7638 - protein, 2096 aa, synthetic construct
MPAAKRVKLDGGDKKYSIGLDIGTNSVGWAVITDEYKVPSKKFKVLGNTDRHSIKKNLIGALLFDSGETAEATRLKRTARRRYTRRKNRICYLQEIFSNEMAKVDDSFFHRLEESFLVEEDKKHERHPIFGNIVDEVAYHEKYPTIYHLRKKLVDSTDKADLRLIYLALAHMIKFRGHFLIEGDLNPDNSDVDKLFIQLVQTYNQLFEENPINASGVDAKAILSARLSKSRRLENLIAQLPGEKKNGLFGNLIALSLGLTPNFKSNFDLAEDAKLQLSKDTYDDDLDNLLAQIGDQYADLFLAAKNLSDAILLSDILRVNTEITKAPLSASMIKRYDEHHQDLTLLKALVRQQLPEKYKEIFFDQSKNGYAGYIDGGASQEEFYKFIKPILEKMDGTEELLVKLNREDLLRKQRTFDNGSIPHQIHLGELHAILRRQEDFYPFLKDNREKIEKILTFRIPYYVGPLARGNSRFAWMTRKSEETITPWNFEEVVDKGASAQSFIERMTNFDKNLPNEKVLPKHSLLYEYFTVYNELTKVKYVTEGMRKPAFLSGEQKKAIVDLLFKTNRKVTVKQLKEDYFKKIECFDSVEISGVEDRFNASLGTYHDLLKIIKDKDFLDNEENEDILEDIVLTLTLFEDREMIEERLKTYAHLFDDKVMKQLKRRRYTGWGRLSRKLINGIRDKQSGKTILDFLKSDGFANRNFMQLIHDDSLTFKEDIQKAQVSGQGDSLHEHIANLAGSPAIKKGILQTVKVVDELVKVMGRHKPENIVIEMARENQTTQKGQKNSRERMKRIEEGIKELGSQILKEHPVENTQLQNEKLYLYYLQNGRDMYVDQELDINRLSDYDVDHIVPQSFLKDDSIDNKVLTRSDKARGKSDNVPSEEVVKKMKNYWRQLLNAKLITQRKFDNLTKAERGGLSELDKAGFIKRQLVETRQITKHVAQILDSRMNTKYDENDKLIREVKVITLKSKLVSDFRKDFQFYKVREINNYHHAHDAYLNAVVGTALIKKYPKLESEFVYGDYKVYDVRKMIAKSEQEIGKATAKYFFYSNIMNFFKTEITLANGEIRKRPLIETNGETGEIVWDKGRDFATVRKVLSMPQVNIVKKTEVQTGGFSKESILPKRNSDKLIARKKDWDPKKYGGFDSPTVAYSVLVVAKVEKGKSKKLKSVKELLGITIMERSSFEKNPIDFLEAKGYKEVKKDLIIKLPKYSLFELENGRKRMLASAGELQKGNELALPSKYVNFLYLASHYEKLKGSPEDNEQKQLFVEQHKHYLDEIIEQISEFSKRVILADANLDKVLSAYNKHRDKPIREQAENIIHLFTLTNLGAPAAFKYFDTTIDRKRYTSTKEVLDATLIHQSITGLYETRIDLSQLGGDGGPAPGSSEAAAKGGTLNIEDEHRLHETSKEPDVSLGSTWLSDFPQAWAETGGMGLAVRQAPLIIPLKATSTPVSIKQYPMSQEARLGIKPHIQRLLDQGILVPCQSPWNTPLLPVKKPGTNDYRPVQDLREVNKRVEDIHPTVPNPYNLLSGLPPSHQWYTVLDLKDAFFCLRLHPTSQPLFAFEWRDPEMGISGQLTWTRLPQGFKNSPTLFDEALHRDLADFRIQHPDLILLQYVDDLLLAATSELDCQQGTRALLQTLGNLGYRASAKKAQICQKQVKYLGYLLKEGQRWLTEARKETVMGQPTPKTPRQLREFLGTAGFCRLWIPGFAEMAAPLYPLTKTGTLFNWGPDQQKAYQEIKQALLTAPALGLPDLTKPFELFVDEKQGYAKGVLTQKLGPWRRPVAYLSKKLDPVAAGWPPCLRMVAAIAVLTKDAGKLTMGQPLVILAPHAVEALVKQPPDRWLSNARMTHYQALLLDTDRVQFGPVVALNPATLLPLPEEGLQHNCLDILAEAHGTRPDLTDQPLPDADHTWYTDGSSLLQEGQRKAGAAVTTETEVIWAKALPAGTSAQRAELIALTQALKMAEGKKLNVYTDSRYAFATAHIHGEIYRRRGLLTSEGKEIKNKDEILALLKALFLPKRLSIIHCPGHQKGHSAEARGNRMADQAARKAAITETPDTSTLLAGKRTADGSEFEKRTADGSEFESPKKKAKVE

SEQ ID NO: 7639 - protein, 2096 aa, synthetic construct
MPAAKRVKLDGGDKKYSIGLDIGTNSVGWAVITDEYKVPSKKFKVLGNTDRHSIKKNLIGALLFDSGETAEATRLKRTARRRYTRRKNRICYLQEIFSNEMAKVDDSFFHRLEESFLVEEDKKHERHPIFGNIVDEVAYHEKYPTIYHLRKKLVDSTDKADLRLIYLALAHMIKFRGHFLIEGDLNPDNSDVDKLFIQLVQTYNQLFEENPINASGVDAKAILSARLSKSRRLENLIAQLPGEKKNGLFGNLIALSLGLTPNFKSNFDLAEDAKLQLSKDTYDDDLDNLLAQIGDQYADLFLAAKNLSDAILLSDILRVNTEITKAPLSASMIKRYDEHHQDLTLLKALVRQQLPEKYKEIFFDQSKNGYAGYIDGGASQEEFYKFIKPILEKMDGTEELLVKLNREDLLRKQRTFDNGSIPHQIHLGELHAILRRQEDFYPFLKDNREKIEKILTFRIPYYVGPLARGNSRFAWMTRKSEETITPWNFEEVVDKGASAQSFIERMTNFDKNLPNEKVLPKHSLLYEYFTVYNELTKVKYVTEGMRKPAFLSGEQKKAIVDLLFKTNRKVTVKQLKEDYFKKIECFDSVEISGVEDRFNASLGTYHDLLKIIKDKDFLDNEENEDILEDIVLTLTLFEDREMIEERLKTYAHLFDDKVMKQLKRRRYTGWGRLSRKLINGIRDKQSGKTILDFLKSDGFANRNFMQLIHDDSLTFKEDIQKAQVSGQGDSLHEHIANLAGSPAIKKGILQTVKVVDELVKVMGRHKPENIVIEMARENQTTQKGQKNSRERMKRIEEGIKELGSQILKEHPVENTQLQNEKLYLYYLQNGRDMYVDQELDINRLSDYDVDHIVPQSFLKDDSIDNKVLTRSDKARGKSDNVPSEEVVKKMKNYWRQLLNAKLITQRKFDNLTKAERGGLSELDKAGFIKRQLVETRQITKHVAQILDSRMNTKYDENDKLIREVKVITLKSKLVSDFRKDFQFYKVREINNYHHAHDAYLNAVVGTALIKKYPKLESEFVYGDYKVYDVRKMIAKSEQEIGKATAKYFFYSNIMNFFKTEITLANGEIRKRPLIETNGETGEIVWDKGRDFATVRKVLSMPQVNIVKKTEVQTGGFSKESILPKRNSDKLIARKKDWDPKKYGGFDSPTVAYSVLVVAKVEKGKSKKLKSVKELLGITIMERSSFEKNPIDFLEAKGYKEVKKDLIIKLPKYSLFELENGRKRMLASAGELQKGNELALPSKYVNFLYLASHYEKLKGSPEDNEQKQLFVEQHKHYLDEIIEQISEFSKRVILADANLDKVLSAYNKHRDKPIREQAENIIHLFTLTNLGAPAAFKYFDTTIDRKRYTSTKEVLDATLIHQSITGLYETRIDLSQLGGDGGPAPGSSEAAAKGGTLNIEDEYRLHETSKEPDVPLGSTWLSDFPQAWAETGGMGLAVRQAPLIIPLKATSTPVSIKQYPMSQEARLGIKPHIQRLLDQGILVPCQSPWNTPLLPVKKPGTNDYRPVQDLREVNKRVEDIHPTVPNPYNLLSGLPPSHQWYTVLDLKDAFFCLRLHPTSQPLFAFEWRDPEMGISGQLTWTRLPQGFKNSPTLFNEALHRDLADFRIQHPDLILLQYVDDLLLAATSEQDCQRGTRALLQTLGNLGYRASAKKAQICQKQVKYLGYLLKEGQRWLTEARKETVMGQPTPKTPRQLREFLGKAGFCRLFIPGFAEMAAPLYPLTKPGTLFNWGPDQQKAYQEIKQALLTAPALGLPDLTKPFELFVDEKQGYAKGVLTQKLGPWRRPVAYLSKKLDPVAAGWPPCLRMVAAIAVLTKDAGKLTMGQPLVILAPHAVEALVKQPPDRWLSNARMTHYQAMLLDTDRVQFGPVVALNPATLLPLPEKEAPHDCLEILAETHGTRPDLTDQPIPDADYTWYTDGSSFLQEGQRRAGAAVTTETEVIWARALPAGTSAQRAELIALTQALKMAEGKKLNVYTDSRYAFATAHVHGEIYRRRGWLTSEGREIKNKNEILALLKALFLPKRLSIIHCPGHQKGNSAEARGNRMADQAAREAAMKAVLETSTLLAGKRTADGSEFEKRTADGSEFESPKKKAKVE

SEQ ID NO: 7640 - protein, 2102 aa, synthetic construct
MPAAKRVKLDGGDKKYSIGLDIGTNSVGWAVITDEYKVPSKKFKVLGNTDRHSIKKNLIGALLFDSGETAEATRLKRTARRRYTRRKNRICYLQEIFSNEMAKVDDSFFHRLEESFLVEEDKKHERHPIFGNIVDEVAYHEKYPTIYHLRKKLVDSTDKADLRLIYLALAHMIKFRGHFLIEGDLNPDNSDVDKLFIQLVQTYNQLFEENPINASGVDAKAILSARLSKSRRLENLIAQLPGEKKNGLFGNLIALSLGLTPNFKSNFDLAEDAKLQLSKDTYDDDLDNLLAQIGDQYADLFLAAKNLSDAILLSDILRVNTEITKAPLSASMIKRYDEHHQDLTLLKALVRQQLPEKYKEIFFDQSKNGYAGYIDGGASQEEFYKFIKPILEKMDGTEELLVKLNREDLLRKQRTFDNGSIPHQIHLGELHAILRRQEDFYPFLKDNREKIEKILTFRIPYYVGPLARGNSRFAWMTRKSEETITPWNFEEVVDKGASAQSFIERMTNFDKNLPNEKVLPKHSLLYEYFTVYNELTKVKYVTEGMRKPAFLSGEQKKAIVDLLFKTNRKVTVKQLKEDYFKKIECFDSVEISGVEDRFNASLGTYHDLLKIIKDKDFLDNEENEDILEDIVLTLTLFEDREMIEERLKTYAHLFDDKVMKQLKRRRYTGWGRLSRKLINGIRDKQSGKTILDFLKSDGFANRNFMQLIHDDSLTFKEDIQKAQVSGQGDSLHEHIANLAGSPAIKKGILQTVKVVDELVKVMGRHKPENIVIEMARENQTTQKGQKNSRERMKRIEEGIKELGSQILKEHPVENTQLQNEKLYLYYLQNGRDMYVDQELDINRLSDYDVDHIVPQSFLKDDSIDNKVLTRSDKARGKSDNVPSEEVVKKMKNYWRQLLNAKLITQRKFDNLTKAERGGLSELDKAGFIKRQLVETRQITKHVAQILDSRMNTKYDENDKLIREVKVITLKSKLVSDFRKDFQFYKVREINNYHHAHDAYLNAVVGTALIKKYPKLESEFVYGDYKVYDVRKMIAKSEQEIGKATAKYFFYSNIMNFFKTEITLANGEIRKRPLIETNGETGEIVWDKGRDFATVRKVLSMPQVNIVKKTEVQTGGFSKESILPKRNSDKLIARKKDWDPKKYGGFDSPTVAYSVLVVAKVEKGKSKKLKSVKELLGITIMERSSFEKNPIDFLEAKGYKEVKKDLIIKLPKYSLFELENGRKRMLASAGELQKGNELALPSKYVNFLYLASHYEKLKGSPEDNEQKQLFVEQHKHYLDEIIEQISEFSKRVILADANLDKVLSAYNKHRDKPIREQAENIIHLFTLTNLGAPAAFKYFDTTIDRKRYTSTKEVLDATLIHQSITGLYETRIDLSQLGGDGGPAPEAAAKGSSGGTVSLQDEHRLFDIPVTTSLPDVWLQDFPQAWAETGGLGRAKCQAPIIIDLKPTAVPVSIKQYPMSLEAHMGIRQHIIKFLELGVLRPCRSPWNTPLLPVKKPGTQDYRPVQDLREINKRTVDIHPTVPNPYNLLSTLKPDYSWYTVLDLKDAFFCLPLAPQSQELFAFEWKDPERGISGQLTWTRLPQGFKNSPTLFDEALHRDLTDFRTQHPEVTLLQYVDDLLLAAPTKKACTQGTRHLLQELGEKGYRASAKKAQICQTKVTYLGYILSEGKRWLTPGRIETVARIPPPRNPREVREFLGTAGFCRLWIPGFAELAAPLYALTKESTPFTWQTEHQLAFEALKKALLSAPALGLPDTSKPFTLFLDERQGIAKGVLTQKLGPWKRPVAYLSKKLDPVAAGWPPCLRIMAATAMLVKDSAKLTLGQPLTVITPHTLEAIVRQPPDRWITNARLTHYQALLLDTDRVQFGPPVTLNPATLLPVPENQPSPHDCRQVLAETHGTREDLKDQELPDADHTWYTDGSSYLDSGTRRAGAAVVDGHNTIWAQSLPPGTSAQKAELIALTKALELSKGKKANIYTDSRYAFATAHTHGSIYERRGLLTSEGKEIKNKAEIIALLKALFLPQEVAIIHCPGHQKGQDPVAVGNRQADRVARQAAMAEVLTLATEPDNTSHITAGKRTADGSEFEKRTADGSEFESPKKKAKVE

SEQ ID NO: 7641 - protein, 2095 aa, synthetic construct
MPAAKRVKLDGGDKKYSIGLDIGTNSVGWAVITDEYKVPSKKFKVLGNTDRHSIKKNLIGALLFDSGETAEATRLKRTARRRYTRRKNRICYLQEIFSNEMAKVDDSFFHRLEESFLVEEDKKHERHPIFGNIVDEVAYHEKYPTIYHLRKKLVDSTDKADLRLIYLALAHMIKFRGHFLIEGDLNPDNSDVDKLFIQLVQTYNQLFEENPINASGVDAKAILSARLSKSRRLENLIAQLPGEKKNGLFGNLIALSLGLTPNFKSNFDLAEDAKLQLSKDTYDDDLDNLLAQIGDQYADLFLAAKNLSDAILLSDILRVNTEITKAPLSASMIKRYDEHHQDLTLLKALVRQQLPEKYKEIFFDQSKNGYAGYIDGGASQEEFYKFIKPILEKMDGTEELLVKLNREDLLRKQRTFDNGSIPHQIHLGELHAILRRQEDFYPFLKDNREKIEKILTFRIPYYVGPLARGNSRFAWMTRKSEETITPWNFEEVVDKGASAQSFIERMTNFDKNLPNEKVLPKHSLLYEYFTVYNELTKVKYVTEGMRKPAFLSGEQKKAIVDLLFKTNRKVTVKQLKEDYFKKIECFDSVEISGVEDRFNASLGTYHDLLKIIKDKDFLDNEENEDILEDIVLTLTLFEDREMIEERLKTYAHLFDDKVMKQLKRRRYTGWGRLSRKLINGIRDKQSGKTILDFLKSDGFANRNFMQLIHDDSLTFKEDIQKAQVSGQGDSLHEHIANLAGSPAIKKGILQTVKVVDELVKVMGRHKPENIVIEMARENQTTQKGQKNSRERMKRIEEGIKELGSQILKEHPVENTQLQNEKLYLYYLQNGRDMYVDQELDINRLSDYDVDHIVPQSFLKDDSIDNKVLTRSDKARGKSDNVPSEEVVKKMKNYWRQLLNAKLITQRKFDNLTKAERGGLSELDKAGFIKRQLVETRQITKHVAQILDSRMNTKYDENDKLIREVKVITLKSKLVSDFRKDFQFYKVREINNYHHAHDAYLNAVVGTALIKKYPKLESEFVYGDYKVYDVRKMIAKSEQEIGKATAKYFFYSNIMNFFKTEITLANGEIRKRPLIETNGETGEIVWDKGRDFATVRKVLSMPQVNIVKKTEVQTGGFSKESILPKRNSDKLIARKKDWDPKKYGGFDSPTVAYSVLVVAKVEKGKSKKLKSVKELLGITIMERSSFEKNPIDFLEAKGYKEVKKDLIIKLPKYSLFELENGRKRMLASAGELQKGNELALPSKYVNFLYLASHYEKLKGSPEDNEQKQLFVEQHKHYLDEIIEQISEFSKRVILADANLDKVLSAYNKHRDKPIREQAENIIHLFTLTNLGAPAAFKYFDTTIDRKRYTSTKEVLDATLIHQSITGLYETRIDLSQLGGDGGPAPEAAAKGSSGGTLQLEEEYRLFEPESTQKQEMDIWLKNFPQAWAETGGMGTAHCQAPVLIQLKATATPISIRQYPMPHEAYQGIKPHIRRMLDQGILKPCQSPWNTPLLPVKKPGTEDYRPVQDLREVNKRVEDIHPTVPNPYNLLSTLPPSHPWYTVLDLKDAFFCLRLHSESQLLFAFEWRDPEIGLSGQLTWTRLPQGFKNSPTLFNEALHSDLADFRVRYPALVLLQYVDDLLLAAATRTECLEGTKALLETLGNKGYRASAKKAQICLQEVTYLGYSLKDGQRWLTKARKEAILSIPVPKNSRQVREFLGTAGYCRLWIPGFAELAAPLYPLTRPGTLFQWGTEQQLAFEDIKKALLSSPALGLPDITKPFELFIDENSGFAKGVLVQKLGPWKRPVAYLSKKLDTVASGWPPCLRMVAAIAILVKDAGKLTLGQPLTILTSHPVEALVRQPPNKWLSNARMTHYQAMLLDAERVHFGPTVSLNPATLLPLPSGGNHHDCLQILAETHGTRPDLTDQPLPDADLTWYTDGSSFIRNGEREAGAAVTTESEVIWAAPLPPGTSAQRAELIALTQALKMAEGKKLTVYTDSRYAFATTHVHGEIYRRRGWLTSEGKEIKNKNEILALLEALFLPKRLSIIHCPGHQKGDSPQAKGNRLADDTAKKAATETHSSLTVLPAGKRTADGSEFEKRTADGSEFESPKKKAKVE

SEQ ID NO: 7642 - protein, 2176 aa, synthetic construct
MPAAKRVKLDGGDKKYSIGLDIGTNSVGWAVITDEYKVPSKKFKVLGNTDRHSIKKNLIGALLFDSGETAEATRLKRTARRRYTRRKNRICYLQEIFSNEMAKVDDSFFHRLEESFLVEEDKKHERHPIFGNIVDEVAYHEKYPTIYHLRKKLVDSTDKADLRLIYLALAHMIKFRGHFLIEGDLNPDNSDVDKLFIQLVQTYNQLFEENPINASGVDAKAILSARLSKSRRLENLIAQLPGEKKNGLFGNLIALSLGLTPNFKSNFDLAEDAKLQLSKDTYDDDLDNLLAQIGDQYADLFLAAKNLSDAILLSDILRVNTEITKAPLSASMIKRYDEHHQDLTLLKALVRQQLPEKYKEIFFDQSKNGYAGYIDGGASQEEFYKFIKPILEKMDGTEELLVKLNREDLLRKQRTFDNGSIPHQIHLGELHAILRRQEDFYPFLKDNREKIEKILTFRIPYYVGPLARGNSRFAWMTRKSEETITPWNFEEVVDKGASAQSFIERMTNFDKNLPNEKVLPKHSLLYEYFTVYNELTKVKYVTEGMRKPAFLSGEQKKAIVDLLFKTNRKVTVKQLKEDYFKKIECFDSVEISGVEDRFNASLGTYHDLLKIIKDKDFLDNEENEDILEDIVLTLTLFEDREMIEERLKTYAHLFDDKVMKQLKRRRYTGWGRLSRKLINGIRDKQSGKTILDFLKSDGFANRNFMQLIHDDSLTFKEDIQKAQVSGQGDSLHEHIANLAGSPAIKKGILQTVKVVDELVKVMGRHKPENIVIEMARENQTTQKGQKNSRERMKRIEEGIKELGSQILKEHPVENTQLQNEKLYLYYLQNGRDMYVDQELDINRLSDYDVDHIVPQSFLKDDSIDNKVLTRSDKARGKSDNVPSEEVVKKMKNYWRQLLNAKLITQRKFDNLTKAERGGLSELDKAGFIKRQLVETRQITKHVAQILDSRMNTKYDENDKLIREVKVITLKSKLVSDFRKDFQFYKVREINNYHHAHDAYLNAVVGTALIKKYPKLESEFVYGDYKVYDVRKMIAKSEQEIGKATAKYFFYSNIMNFFKTEITLANGEIRKRPLIETNGETGEIVWDKGRDFATVRKVLSMPQVNIVKKTEVQTGGFSKESILPKRNSDKLIARKKDWDPKKYGGFDSPTVAYSVLVVAKVEKGKSKKLKSVKELLGITIMERSSFEKNPIDFLEAKGYKEVKKDLIIKLPKYSLFELENGRKRMLASAGELQKGNELALPSKYVNFLYLASHYEKLKGSPEDNEQKQLFVEQHKHYLDEIIEQISEFSKRVILADANLDKVLSAYNKHRDKPIREQAENIIHLFTLTNLGAPAAFKYFDTTIDRKRYTSTKEVLDATLIHQSITGLYETRIDLSQLGGDGGPAPEAAAKGSSGGMNPLQLLQPLPAEIKGTKLLAHWNSGATITCIPESFLEDEQPIKKTLIKTIHGEKQQNVYYVTFKVKGRKVEAEVIASPYEYILLSPTDVPWLTQQPLQLTILVPLQEYQEKILSKTALPEDQKQQLKTLFVKYDNLWQHWENQVGHRKIRPHNIATGDYPPRPQKQYPINPKAKPSIQIVIDDLLKQGVLTPQNSTMNTPVYPVPKPDGRWRMVLDYREVNKTIPLTAAQNQHSAGILATIVRQKYKTTLDLANGFWAHPITPESYWLTAFTWQGKQYCWTRLPQGFLNSPALFNADVVDLLKEIPNVQVYVDDIYLSHDDPKEHVQQLEKVFQILLQAGYVVSLKKSEIGQKTVEFLGFNITKEGRGLTDTFKTKLLNITPPKDLKQLQSILGLLNFARNFIPNFAELVQPLYNLIAPAKGKYIEWSEENTKQLNMVIEALNTASNLEERLPEQRLVIKVNTSPSAGYVRYYNETGKKPIMYLNYVFSKAELKFSMLEKLLTTMHKALIKAMDLAMGQEILVYSPIVSMTKIQKTPLPERKALPIRWITWMTYLEDPRIQFHYDKTLPELKHIPDVYTSSQSPVKHPSQYEGVFYTDGSAIKSPDPTKSNNAGMGIVHATYKPEYQVLNQWSIPLGNHTAQMAEIAAVEFACKKALKIPGPVLVITDSFYVAESANKELPYWKSNGFVNNKKKPLKHISKWKSIAECLSMKPDITIQHEKGISLQIPVFILKGNALADKLATQGSYVVNAGKRTADGSEFEKRTADGSEFESPKKKAKVE

SEQ ID NO: 7643 - protein, 2096 aa, synthetic construct
MPAAKRVKLDGGDKKYSIGLDIGTNSVGWAVITDEYKVPSKKFKVLGNTDRHSIKKNLIGALLFDSGETAEATRLKRTARRRYTRRKNRICYLQEIFSNEMAKVDDSFFHRLEESFLVEEDKKHERHPIFGNIVDEVAYHEKYPTIYHLRKKLVDSTDKADLRLIYLALAHMIKFRGHFLIEGDLNPDNSDVDKLFIQLVQTYNQLFEENPINASGVDAKAILSARLSKSRRLENLIAQLPGEKKNGLFGNLIALSLGLTPNFKSNFDLAEDAKLQLSKDTYDDDLDNLLAQIGDQYADLFLAAKNLSDAILLSDILRVNTEITKAPLSASMIKRYDEHHQDLTLLKALVRQQLPEKYKEIFFDQSKNGYAGYIDGGASQEEFYKFIKPILEKMDGTEELLVKLNREDLLRKQRTFDNGSIPHQIHLGELHAILRRQEDFYPFLKDNREKIEKILTFRIPYYVGPLARGNSRFAWMTRKSEETITPWNFEEVVDKGASAQSFIERMTNFDKNLPNEKVLPKHSLLYEYFTVYNELTKVKYVTEGMRKPAFLSGEQKKAIVDLLFKTNRKVTVKQLKEDYFKKIECFDSVEISGVEDRFNASLGTYHDLLKIIKDKDFLDNEENEDILEDIVLTLTLFEDREMIEERLKTYAHLFDDKVMKQLKRRRYTGWGRLSRKLINGIRDKQSGKTILDFLKSDGFANRNFMQLIHDDSLTFKEDIQKAQVSGQGDSLHEHIANLAGSPAIKKGILQTVKVVDELVKVMGRHKPENIVIEMARENQTTQKGQKNSRERMKRIEEGIKELGSQILKEHPVENTQLQNEKLYLYYLQNGRDMYVDQELDINRLSDYDVDHIVPQSFLKDDSIDNKVLTRSDKARGKSDNVPSEEVVKKMKNYWRQLLNAKLITQRKFDNLTKAERGGLSELDKAGFIKRQLVETRQITKHVAQILDSRMNTKYDENDKLIREVKVITLKSKLVSDFRKDFQFYKVREINNYHHAHDAYLNAVVGTALIKKYPKLESEFVYGDYKVYDVRKMIAKSEQEIGKATAKYFFYSNIMNFFKTEITLANGEIRKRPLIETNGETGEIVWDKGRDFATVRKVLSMPQVNIVKKTEVQTGGFSKESILPKRNSDKLIARKKDWDPKKYGGFDSPTVAYSVLVVAKVEKGKSKKLKSVKELLGITIMERSSFEKNPIDFLEAKGYKEVKKDLIIKLPKYSLFELENGRKRMLASAGELQKGNELALPSKYVNFLYLASHYEKLKGSPEDNEQKQLFVEQHKHYLDEIIEQISEFSKRVILADANLDKVLSAYNKHRDKPIREQAENIIHLFTLTNLGAPAAFKYFDTTIDRKRYTSTKEVLDATLIHQSITGLYETRIDLSQLGGDGGPAPEAAAKGSSGGTLGIEDEYRLHETSTEPDVSLGSTWLSDFPQAWAETGGMGLAVRQAPLIIPLKATSTPVSIQQYPMSHEARLGIKPHIQRLLDQGILVPCQSPWNTPLLPVKKPGTNDYRPVQDLREVNKRVEDIHPTVPNPYNLLSGLPPSHQWYTVLDLKDAFFCLRLHPTSQPLFAFEWRDPGMGISGQLTWTRLPQGFKNSPTLFNEALHRDLADFRIQHPDLILLQYVDDILLAATSELDCQQGTRALLQTLGDLGYRASAKKAQICQKQVKYLGYLLREGQRWLTEARKETVMGQPVPKTPRQLREFLGTAGFCRLWIPGFAEMAAPLYPLTKPGTLFSWGPDQQKAYQEIKQALLTAPALGLPDLTKPFELFVDEKQGYAKGVLTQKLGPWRRPVAYLSKKLDPVAAGWPPCLRMVAAIAVLTKDAGKLTMGQPLVILAPHAVEALVKQPPDRWLSNARMTHYQAMLLDTDRVQFGPVVALNPATLLPLPEEGAPHDCLEILAETHGTRPDLTDQPIPDADHTWYTDGSSFLQEGQRKAGAAVTTETEVIWAGALPAGTSAQRAELIALTQALKMAEGKRLNVYTDSRYAFATAHIHGEIYRRRGWLTSEGREIKNKSEILALLKALFLPKRLSIIHCLGHQKGDSAEARGNRLADQAAREAAIKTPPDTSTLLAGKRTADGSEFEKRTADGSEFESPKKKAKVE

SEQ ID NO: 7644 - protein, 2096 aa, synthetic construct; identical to SEQ ID NO: 7643

SEQ ID NO: 7645 - protein, 2096 aa, synthetic construct
MPAAKRVKLDGGDKKYSIGLDIGTNSVGWAVITDEYKVPSKKFKVLGNTDRHSIKKNLIGALLFDSGETAEATRLKRTARRRYTRRKNRICYLQEIFSNEMAKVDDSFFHRLEESFLVEEDKKHERHPIFGNIVDEVAYHEKYPTIYHLRKKLVDSTDKADLRLIYLALAHMIKFRGHFLIEGDLNPDNSDVDKLFIQLVQTYNQLFEENPINASGVDAKAILSARLSKSRRLENLIAQLPGEKKNGLFGNLIALSLGLTPNFKSNFDLAEDAKLQLSKDTYDDDLDNLLAQIGDQYADLFLAAKNLSDAILLSDILRVNTEITKAPLSASMIKRYDEHHQDLTLLKALVRQQLPEKYKEIFFDQSKNGYAGYIDGGASQEEFYKFIKPILEKMDGTEELLVKLNREDLLRKQRTFDNGSIPHQIHLGELHAILRRQEDFYPFLKDNREKIEKILTFRIPYYVGPLARGNSRFAWMTRKSEETITPWNFEEVVDKGASAQSFIERMTNFDKNLPNEKVLPKHSLLYEYFTVYNELTKVKYVTEGMRKPAFLSGEQKKAIVDLLFKTNRKVTVKQLKEDYFKKIECFDSVEISGVEDRFNASLGTYHDLLKIIKDKDFLDNEENEDILEDIVLTLTLFEDREMIEERLKTYAHLFDDKVMKQLKRRRYTGWGRLSRKLINGIRDKQSGKTILDFLKSDGFANRNFMQLIHDDSLTFKEDIQKAQVSGQGDSLHEHIANLAGSPAIKKGILQTVKVVDELVKVMGRHKPENIVIEMARENQTTQKGQKNSRERMKRIEEGIKELGSQILKEHPVENTQLQNEKLYLYYLQNGRDMYVDQELDINRLSDYDVDHIVPQSFLKDDSIDNKVLTRSDKARGKSDNVPSEEVVKKMKNYWRQLLNAKLITQRKFDNLTKAERGGLSELDKAGFIKRQLVETRQITKHVAQILDSRMNTKYDENDKLIREVKVITLKSKLVSDFRKDFQFYKVREINNYHHAHDAYLNAVVGTALIKKYPKLESEFVYGDYKVYDVRKMIAKSEQEIGKATAKYFFYSNIMNFFKTEITLANGEIRKRPLIETNGETGEIVWDKGRDFATVRKVLSMPQVNIVKKTEVQTGGFSKESILPKRNSDKLIARKKDWDPKKYGGFDSPTVAYSVLVVAKVEKGKSKKLKSVKELLGITIMERSSFEKNPIDFLEAKGYKEVKKDLIIKLPKYSLFELENGRKRMLASAGELQKGNELALPSKYVNFLYLASHYEKLKGSPEDNEQKQLFVEQHKHYLDEIIEQISEFSKRVILADANLDKVLSAYNKHRDKPIREQAENIIHLFTLTNLGAPAAFKYFDTTIDRKRYTSTKEVLDATLIHQSITGLYETRIDLSQLGGDGGPAPEAAAKGSSGGTLNIEDEYRLHETSKGPDVPLGSTWLSDFPQAWAETGGMGLAVRQAPLIIPLKATSTPVSIKQYPMSQEARLGIKPHIQRLLDQGILVPCQSPWNTPLLPVKKPGTNDYRPVQDLREVNKRVEDIHPTVPNPYNLLSGLPPSHQWYTVLDLKDAFFCLRLHPTSQSLFAFEWRDPEMGISGQLTWTRLPQGFKNSPTLFDEALHRDLADFRIQHPDLILLQYVDDLLLAATSELDCQQGTRALLQTLGDLGYRASAKKAQICQKQVKYLGYLLKEGQRWLTEARKETVMGQPTPKTPRQLREFLGTAGFCRLWIPGFAEMAAPLYPLTKTGTLFEWGPDQQKAYQEIKQALLTAPALGLPDLTKPFELFVDEKQGYAKGVLTQKLGPWRRPVAYLSKKLDPVAAGWPPCLRMVAAIAVLTKDAGKLTMGQPLVILAPHAVEALVKQPPDRWLSNARMTHYQALLLDTDRVQFGPIVALNPATLLPLPEEGLQHDCLDILAEAHGTRPDLTDQPLPDADHTWYTDGSSFLQEGQRKAGAAVTTETEVVWAKALPAGTSAQRAELIALTQALKMAEGKKLNVYTDSRYAFATAHIHGEIYRRRGLLTSEGKEIKNKDEILALLKALFLPKRLSIIHCPGHQKGNRAEARGNRMADQAAREVATRETPETSTLLAGKRTADGSEFEKRTADGSEFESPKKKAKVE

SEQ ID NO: 7646 - protein, 2090 aa, synthetic construct
MPAAKRVKLDGGDKKYSIGLDIGTNSVGWAVITDEYKVPSKKFKVLGNTDRHSIKKNLIGALLFDSGETAEATRLKRTARRRYTRRKNRICYLQEIFSNEMAKVDDSFFHRLEESFLVEEDKKHERHPIFGNIVDEVAYHEKYPTIYHLRKKLVDSTDKADLRLIYLALAHMIKFRGHFLIEGDLNPDNSDVDKLFIQLVQTYNQLFEENPINASGVDAKAILSARLSKSRRLENLIAQLPGEKKNGLFGNLIALSLGLTPNFKSNFDLAEDAKLQLSKDTYDDDLDNLLAQIGDQYADLFLAAKNLSDAILLSDILRVNTEITKAPLSASMIKRYDEHHQDLTLLKALVRQQLPEKYKEIFFDQSKNGYAGYIDGGASQEEFYKFIKPILEKMDGTEELLVKLNREDLLRKQRTFDNGSIPHQIHLGELHAILRRQEDFYPFLKDNREKIEKILTFRIPYYVGPLARGNSRFAWMTRKSEETITPWNFEEVVDKGASAQSFIERMTNFDKNLPNEKVLPKHSLLYEYFTVYNELTKVKYVTEGMRKPAFLSGEQKKAIVDLLFKTNRKVTVKQLKEDYFKKIECFDSVEISGVEDRFNASLGTYHDLLKIIKDKDFLDNEENEDILEDIVLTLTLFEDREMIEERLKTYAHLFDDKVMKQLKRRRYTGWGRLSRKLINGIRDKQSGKTILDFLKSDGFANRNFMQLIHDDSLTFKEDIQKAQVSGQGDSLHEHIANLAGSPAIKKGILQTVKVVDELVKVMGRHKPENIVIEMARENQTTQKGQKNSRERMKRIEEGIKELGSQILKEHPVENTQLQNEKLYLYYLQNGRDMYVDQELDINRLSDYDVDHIVPQSFLKDDSIDNKVLTRSDKARGKSDNVPSEEVVKKMKNYWRQLLNAKLITQRKFDNLTKAERGGLSELDKAGFIKRQLVETRQITKHVAQILDSRMNTKYDENDKLIREVKVITLKSKLVSDFRKDFQFYKVREINNYHHAHDAYLNAVVGTALIKKYPKLESEFVYGDYKVYDVRKMIAKSEQEIGKATAKYFFYSNIMNFFKTEITLANGEIRKRPLIETNGETGEIVWDKGRDFATVRKVLSMPQVNIVKKTEVQTGGFSKESILPKRNSDKLIARKKDWDPKKYGGFDSPTVAYSVLVVAKVEKGKSKKLKSVKELLGITIMERSSFEKNPIDFLEAKGYKEVKKDLIIKLPKYSLFELENGRKRMLASAGELQKGNELALPSKYVNFLYLASHYEKLKGSPEDNEQKQLFVEQHKHYLDEIIEQISEFSKRVILADANLDKVLSAYNKHRDKPIREQAENIIHLFTLTNLGAPAAFKYFDTTIDRKRYTSTKEVLDATLIHQSITGLYETRIDLSQLGGDGGPAPEAAAKGSSGGTLQLDDEYRLYSPLVKPDQNIQFWLEQFPQAWAETAGMGLAKQVPPQVIQLKASATPVSVRQYPLSKEAQEGIRPHVQRLIQQGILVPVQSPWNTPLLPVRKPGTNDYRPVQDLREVNKRVQDIHPTVPNPYNLLCALPPQRSWYTVLDLKDAFFCLRLHPTSQPLFAFEWRDPGTGRTGQLTWTRLPQGFKNSPTIFDEALHRDLANFRIQHPQVTLLQYVDDLLLAGATKQDCLEGTKALLLELSDLGYRASAKKAQICRREVTYLGYSLRDGQRWLTEARKKTVVQIPAPTTAKQVREFLGTAGFCRLWIPGFATLAAPLYPLTKEKGEFSWAPEHQKAFDAIKKALLSAPALALPDVTKPFTLYVDERKGVARGVLTQTLGPWRRPVAYLSKKLDPVASGWPVCLKAIAAVAILVKDADKLTLGQNITVIAPHALENIVRQPPDRWMTNARMTHYQSLLLTERVTFAPPAALNPATLLPEETDEPVTHDCHQLLIEETGVRKDLTDIPLTGEVLTWFTDGSSYVVEGKRMAGAAVVDGTRTIWASSLPEGTSAQKAELMALTQALRLAEGKSINIYTDSRYAFATAHVHGAIYKQRGLLTSAGREIKNKEEILSLLEALHLPKRLAIIHCPGHQKAKDPISRGNQMADRVAKQAAQGVNLLAGKRTADGSEFEKRTADGSEFESPKKKAKVE

SEQ ID NO: 7647 - protein, 2087 aa, synthetic construct
MPAAKRVKLDGGDKKYSIGLDIGTNSVGWAVITDEYKVPSKKFKVLGNTDRHSIKKNLIGALLFDSGETAEATRLKRTARRRYTRRKNRICYLQEIFSNEMAKVDDSFFHRLEESFLVEEDKKHERHPIFGNIVDEVAYHEKYPTIYHLRKKLVDSTDKADLRLIYLALAHMIKFRGHFLIEGDLNPDNSDVDKLFIQLVQTYNQLFEENPINASGVDAKAILSARLSKSRRLENLIAQLPGEKKNGLFGNLIALSLGLTPNFKSNFDLAEDAKLQLSKDTYDDDLDNLLAQIGDQYADLFLAAKNLSDAILLSDILRVNTEITKAPLSASMIKRYDEHHQDLTLLKALVRQQLPEKYKEIFFDQSKNGYAGYIDGGASQEEFYKFIKPILEKMDGTEELLVKLNREDLLRKQRTFDNGSIPHQIHLGELHAILRRQEDFYPFLKDNREKIEKILTFRIPYYVGPLARGNSRFAWMTRKSEETITPWNFEEVVDKGASAQSFIERMTNFDKNLPNEKVLPKHSLLYEYFTVYNELTKVKYVTEGMRKPAFLSGEQKKAIVDLLFKTNRKVTVKQLKEDYFKKIECFDSVEISGVEDRFNASLGTYHDLLKIIKDKDFLDNEENEDILEDIVLTLTLFEDREMIEERLKTYAHLFDDKVMKQLKRRRYTGWGRLSRKLINGIRDKQSGKTILDFLKSDGFANRNFMQLIHDDSLTFKEDIQKAQVSGQGDSLHEHIANLAGSPAIKKGILQTVKVVDELVKVMGRHKPENIVIEMARENQTTQKGQKNSRERMKRIEEGIKELGSQILKEHPVENTQLQNEKLYLYYLQNGRDMYVDQELDINRLSDYDVDHIVPQSFLKDDSIDNKVLTRSDKARGKSDNVPSEEVVKKMKNYWRQLLNAKLITQRKFDNLTKAERGGLSELDKAGFIKRQLVETRQITKHVAQILDSRMNTKYDENDKLIREVKVITLKSKLVSDFRKDFQFYKVREINNYHHAHDAYLNAVVGTALIKKYPKLESEFVYGDYKVYDVRKMIAKSEQEIGKATAKYFFYSNIMNFFKTEITLANGEIRKRPLIETNGETGEIVWDKGRDFATVRKVLSMPQVNIVKKTEVQTGGFSKESILPKRNSDKLIARKKDWDPKKYGGFDSPTVAYSVLVVAKVEKGKSKKLKSVKELLGITIMERSSFEKNPIDFLEAKGYKEVKKDLIIKLPKYSLFELENGRKRMLASAGELQKGNELALPSKYVNFLYLASHYEKLKGSPEDNEQKQLFVEQHKHYLDEIIEQISEFSKRVILADANLDKVLSAYNKHRDKPIREQAENIIHLFTLTNLGAPAAFKYFDTTIDRKRYTSTKEVLDATLIHQSITGLYETRIDLSQLGGDGGPAPEAAAKGSSGGIPWLMKKPLQLTTLVPLQEYEERLLKQTMLTGSYKEKLQSLFLKYDALWQHWENQVGHRRIKPHHIATGTVNPRPQKQYPINPKAKASIQTVINDLLKQGVLIQQNSIMNTPVYPVPKPDGKWRMVLDYREVNKTIPLIAAQNQHSAGILSSIFRGKYKTTLDLSNGFWAHSITPESYWLTAFTWLGQQYCWTRLPQGFLNSPALFNADVVDLLKEVPNVQVYVDDIYISHDDPREHLEQLEKVFSLLLNAGYVVSLKKSEIAQHEVEFLGFNITKEGRGLTETFKQKLLNITPPRDLKQLQSILGLLNFARNFIPNFSELVKPLYNIIATAPGKYITWTTDNSQQLQNIISMLNSAENLEERNPEVRLIMKVNTSPSAGYIRFYNEFAKRPIMYLNYVYTKAEVKFTNTEKLLTTIHKGLIKALDLGMGQEILVYSPIVSMTKIQKTPLPERKALPIRWITWMSYLEDPRIQFHYDKTLPELQQVPTVTDDIIAKIKHPSEFSMVFYTDGSAIKHPNVNKSHNAGMGIAQVQFKPEFTVINTWSIPLGDHTAQLAEVAAVEFACKKALKIDGPVLIVTDSFYVAESVNKELPYWQSNGFFNNKKKPLKHVSKWKSIADCIQLKPDIIIIHEKGHQPTASTFHTEGNNLADKLATQGSYVVNAGKRTADGSEFEKRTADGSEFESPKKKAKVE

SEQ ID NO: 7648 - protein, 2176 aa, synthetic construct
MPAAKRVKLDGGDKKYSIGLDIGTNSVGWAVITDEYKVPSKKFKVLGNTDRHSIKKNLIGALLFDSGETAEATRLKRTARRRYTRRKNRICYLQEIFSNEMAKVDDSFFHRLEESFLVEEDKKHERHPIFGNIVDEVAYHEKYPTIYHLRKKLVDSTDKADLRLIYLALAHMIKFRGHFLIEGDLNPDNSDVDKLFIQLVQTYNQLFEENPINASGVDAKAILSARLSKSRRLENLIAQLPGEKKNGLFGNLIALSLGLTPNFKSNFDLAEDAKLQLSKDTYDDDLDNLLAQIGDQYADLFLAAKNLSDAILLSDILRVNTEITKAPLSASMIKRYDEHHQDLTLLKALVRQQLPEKYKEIFFDQSKNGYAGYIDGGASQEEFYKFIKPILEKMDGTEELLVKLNREDLLRKQRTFDNGSIPHQIHLGELHAILRRQEDFYPFLKDNREKIEKILTFRIPYYVGPLARGNSRFAWMTRKSEETITPWNFEEVVDKGASAQSFIERMTNFDKNLPNEKVLPKHSLLYEYFTVYNELTKVKYVTEGMRKPAFLSGEQKKAIVDLLFKTNRKVTVKQLKEDYFKKIECFDSVEISGVEDRFNASLGTYHDLLKIIKDKDFLDNEENEDILEDIVLTLTLFEDREMIEERLKTYAHLFDDKVMKQLKRRRYTGWGRLSRKLINGIRDKQSGKTILDFLKSDGFANRNFMQLIHDDSLTFKEDIQKAQVSGQGDSLHEHIANLAGSPAIKKGILQTVKVVDELVKVMGRHKPENIVIEMARENQTTQKGQKNSRERMKRIEEGIKELGSQILKEHPVENTQLQNEKLYLYYLQNGRDMYVDQELDINRLSDYDVDHIVPQSFLKDDSIDNKVLTRSDKARGKSDNVPSEEVVKKMKNYWRQLLNAKLITQRKFDNLTKAERGGLSELDKAGFIKRQLVETRQITKHVAQILDSRMNTKYDENDKLIREVKVITLKSKLVSDFRKDFQFYKVREINNYHHAHDAYLNAVVGTALIKKYPKLESEFVYGDYKVYDVRKMIAKSEQEIGKATAKYFFYSNIMNFFKTEITLANGEIRKRPLIETNGETGEIVWDKGRDFATVRKVLSMPQVNIVKKTEVQTGGFSKESILPKRNSDKLIARKKDWDPKKYGGFDSPTVAYSVLVVAKVEKGKSKKLKSVKELLGITIMERSSFEKNPIDFLEAKGYKEVKKDLIIKLPKYSLFELENGRKRMLASAGELQKGNELALPSKYVNFLYLASHYEKLKGSPEDNEQKQLFVEQHKHYLDEIIEQISEFSKRVILADANLDKVLSAYNKHRDKPIREQAENIIHLFTLTNLGAPAAFKYFDTTIDRKRYTSTKEVLDATLIHQSITGLYETRIDLSQLGGDGGPAPEAAAKGSSGGMNPLQLLQPLPAEVKGTKLLAHWNSGATITCIPESFLEDEQPIKQTLIKTIHGEKQQNVYYLTFKVKGRKVEAEVIASPYEYILLSPTDVPWLTQQPLQLTILVPLQEYQDRILNKTALPEEQKQQLKALFTKYDNLWQHWENQVGHRKIRPHNIATGDYPPRPQKQYPINPKAKPSIQIVIDDLLKQGVLTPQNSTMNTPVYPVPKPDGRWRMVLDYREVNKTIPLTAAQNQHSAGILATIVRQKYKTTLDLANGFWAHPITPDSYWLTAFTWQGKQYCWTRLPQGFLNSPALFNADAVDLLKEVPNVQVYVDDIYLSHDNPHEHIQQLEKVFQILLQAGYVVSLKKSEIGQRTVEFLGFNITKEGRGLTDTFKTKLLNVTPPKDLKQLQSILGKLNFARNFIPNFAELVQTLYNLIASSPGKYIEWTEDNTKQLNKVIEALNTASNLEERLPDQRLVIKVNTSPSAGYVRYYNESGKKPIMYLNYVFSKAELKFSMLEKLLTTMHKALIKAMDLAMGQEILVYSPIVSMTKIQKTPLPERKALPIRWITWMTYLEDPRIQFHYDKTLPELKHIPDVYTSSIPPLKHPSQYEGVFCTDGSAIKSPDPTKSNNAGMGIVHAIYNPEYKILNQWSIPLGHHTAQMAEIAAVEFACKKALKVPGPVLVITDSFYVAESANKELPYWKSNGFVNNKKEPLKHISKWKSIAECLSIKPDITIQHEKGHQPINTSIHTEGNALADKLATQGSYVVNAGKRTADGSEFEKRTADGSEFESPKKKAKVE

SEQ ID NO: 7649 - protein, 2096 aa, synthetic construct
MPAAKRVKLDGGDKKYSIGLDIGTNSVGWAVITDEYKVPSKKFKVLGNTDRHSIKKNLIGALLFDSGETAEATRLKRTARRRYTRRKNRICYLQEIFSNEMAKVDDSFFHRLEESFLVEEDKKHERHPIFGNIVDEVAYHEKYPTIYHLRKKLVDSTDKADLRLIYLALAHMIKFRGHFLIEGDLNPDNSDVDKLFIQLVQTYNQLFEENPINASGVDAKAILSARLSKSRRLENLIAQLPGEKKNGLFGNLIALSLGLTPNFKSNFDLAEDAKLQLSKDTYDDDLDNLLAQIGDQYADLFLAAKNLSDAILLSDILRVNTEITKAPLSASMIKRYDEHHQDLTLLKALVRQQLPEKYKEIFFDQSKNGYAGYIDGGASQEEFYKFIKPILEKMDGTEELLVKLNREDLLRKQRTFDNGSIPHQIHLGELHAILRRQEDFYPFLKDNREKIEKILTFRIPYYVGPLARGNSRFAWMTRKSEETITPWNFEEVVDKGASAQSFIERMTNFDKNLPNEKVLPKHSLLYEYFTVYNELTKVKYVTEGMRKPAFLSGEQKKAIVDLLFKTNRKVTVKQLKEDYFKKIECFDSVEISGVEDRFNASLGTYHDLLKIIKDKDFLDNEENEDILEDIVLTLTLFEDREMIEERLKTYAHLFDDKVMKQLKRRRYTGWGRLSRKLINGIRDKQSGKTILDFLKSDGFANRNFMQLIHDDSLTFKEDIQKAQVSGQGDSLHEHIANLAGSPAIKKGILQTVKVVDELVKVMGRHKPENIVIEMARENQTTQKGQKNSRERMKRIEEGIKELGSQILKEHPVENTQLQNEKLYLYYLQNGRDMYVDQELDINRLSDYDVDHIVPQSFLKDDSIDNKVLTRSDKARGKSDNVPSEEVVKKMKNYWRQLLNAKLITQRKFDNLTKAERGGLSELDKAGFIKRQLVETRQITKHVAQILDSRMNTKYDENDKLIREVKVITLKSKLVSDFRKDFQFYKVREINNYHHAHDAYLNAVVGTALIKKYPKLESEFVYGDYKVYDVRKMIAKSEQEIGKATAKYFFYSNIMNFFKTEITLANGEIRKRPLIETNGETGEIVWDKGRDFATVRKVLSMPQVNIVKKTEVQTGGFSKESILPKRNSDKLIARKKDWDPKKYGGFDSPTVAYSVLVVAKVEKGKSKKLKSVKELLGITIMERSSFEKNPIDFLEAKGYKEVKKDLIIKLPKYSLFELENGRKRMLASAGELQKGNELALPSKYVNFLYLASHYEKLKGSPEDNEQKQLFVEQHKHYLDEIIEQISEFSKRVILADANLDKVLSAYNKHRDKPIREQAENIIHLFTLTNLGAPAAFKYFDTTIDRKRYTSTKEVLDATLIHQSITGLYETRIDLSQLGGDGGPAPEAAAKGSSGGTLNIEDEYRLHETSKEPDVPLGSTWLSDFPQAWAETGGMGLAVRQAPLIIPLKATSTPVSIKQYPMSQEARLGIKPHIQRLLDQGILVPCQSPWNTPLLPVKKPGTNDYRPVQDLREVNKRVEDIHPTVPNPYNLLSGLPPSHQWYTVLDLKDAFFCLRLHPTSQPLFAFEWRDPEMGISGQLTWTRLPQGFKNSPTLFNEALHRDLADFRIQHPDLILLQYVDDLLLAATSEQDCQRGTRALLQTLGNLGYRASAKKAQICQKQVKYLGYLLKEGQRWLTEARKETVMGQPTPKTPRQLREFLGTAGFCRLWIPGFAEMAAPLYPLTKPGTLFNWGPDQQKAYQEIKQALLTAPALGLPDLTKPFELFVDEKQGYAKGVLTQKLGPWRRPVAYLSKKLDPVAAGWPPCLRMVAAIAVLTKDAGKLTMGQPLVILAPHAVEALVKQPPDRWLSNARMTHYQAMLLDTDRVQFGPVVALNPATLLPLPEKEAPHDCLEILAETHGTRPDLTDQPIPDADYTWYTDGSSFLQEGQRRAGAAVTTETEVIWARALPAGTSAQRAELIALTQALKMAEGKKLNVYTDSRYAFATAHVHGEIYRRRGWLTSEGREIKNKNEILALLKALFLPKRLSIIHCPGHQKGNSAEARGNRMADQAAREAAMKAVLETSTLLAGKRTADGSEFEKRTADGSEFESPKKKAKVE

SEQ ID NO: 7650 - protein, 2122 aa, synthetic construct
MPAAKRVKLDGGDKKYSIGLDIGTNSVGWAVITDEYKVPSKKFKVLGNTDRHSIKKNLIGALLFDSGETAEATRLKRTARRRYTRRKNRICYLQEIFSNEMAKVDDSFFHRLEESFLVEEDKKHERHPIFGNIVDEVAYHEKYPTIYHLRKKLVDSTDKADLRLIYLALAHMIKFRGHFLIEGDLNPDNSDVDKLFIQLVQTYNQLFEENPINASGVDAKAILSARLSKSRRLENLIAQLPGEKKNGLFGNLIALSLGLTPNFKSNFDLAEDAKLQLSKDTYDDDLDNLLAQIGDQYADLFLAAKNLSDAILLSDILRVNTEITKAPLSASMIKRYDEHHQDLTLLKALVRQQLPEKYKEIFFDQSKNGYAGYIDGGASQEEFYKFIKPILEKMDGTEELLVKLNREDLLRKQRTFDNGSIPHQIHLGELHAILRRQEDFYPFLKDNREKIEKILTFRIPYYVGPLARGNSRFAWMTRKSEETITPWNFEEVVDKGASAQSFIERMTNFDKNLPNEKVLPKHSLLYEYFTVYNELTKVKYVTEGMRKPAFLSGEQKKAIVDLLFKTNRKVTVKQLKEDYFKKIECFDSVEISGVEDRFNASLGTYHDLLKIIKDKDFLDNEENEDILEDIVLTLTLFEDREMIEERLKTYAHLFDDKVMKQLKRRRYTGWGRLSRKLINGIRDKQSGKTILDFLKSDGFANRNFMQLIHDDSLTFKEDIQKAQVSGQGDSLHEHIANLAGSPAIKKGILQTVKVVDELVKVMGRHKPENIVIEMARENQTTQKGQKNSRERMKRIEEGIKELGSQILKEHPVENTQLQNEKLYLYYLQNGRDMYVDQELDINRLSDYDVDHIVPQSFLKDDSIDNKVLTRSDKARGKSDNVPSEEVVKKMKNYWRQLLNAKLITQRKFDNLTKAERGGLSELDKAGFIKRQLVETRQITKHVAQILDSRMNTKYDENDKLIREVKVITLKSKLVSDFRKDFQFYKVREINNYHHAHDAYLNAVVGTALIKKYPKLESEFVYGDYKVYDVRKMIAKSEQEIGKATAKYFFYSNIMNFFKTEITLANGEIRKRPLIETNGETGEIVWDKGRDFATVRKVLSMPQVNIVKKTEVQTGGFSKESILPKRNSDKLIARKKDWDPKKYGGFDSPTVAYSVLVVAKVEKGKSKKLKSVKELLGITIMERSSFEKNPIDFLEAKGYKEVKKDLIIKLPKYSLFELENGRKRMLASAGELQKGNELALPSKYVNFLYLASHYEKLKGSPEDNEQKQLFVEQHKHYLDEIIEQISEFSKRVILADANLDKVLSAYNKHRDKPIREQAENIIHLFTLTNLGAPAAFKYFDTTIDRKRYTSTKEVLDATLIHQSITGLYETRIDLSQLGGDGGAEAAAKEAAAKEAAAKEAAAKALEAEAAAKEAAAKEAAAKEAAAKAGGVPWILKKPLELTIKLDLEEQQGTLLNNSILSKKGKEELKQLFEKYSALWQSWENQVGHRRIRPHKIATGTVKPTPQKQYHINPKAKPDIQIVINDLLKQGVLIQKESTMNTPVYPVPKPNGRWRMVLDYRAVNKVTPLIAVQNQHSYGILGSLFKGRYKTTIDLSNGFWAHPIVPEDYWITAFTWQGKQYCWTVLPQGFLNSPGLFTGDVVDLLQGIPNVEVYVDDVYISHDSEKEHLEYLDILFNRLKEAGYIISLKKSNIANSIVDFLGFQITNEGRGLTDTFKEKLENITAPTTLKQLQSILGLLNFARNFIPDFTELIAPLYALIPKSTKNYVPWQIEHSTTLETLITKLNGAEYLQGRKGDKTLIMKVNASYTTGYIRYYNEGEKKPISYVSIVFSKTELKFTELEKLLTTVHKGLLKALDLSMGQNIHVYSPIVSMQNIQKTPQTAKKALASRWLSWLSYLEDPRIRFFYDPQMPALKDLPAVDTGKDNKKHPSNFQHIFYTDGSAITSPTKEGHLNAGMGIVYFINKDGNLQKQQEWSISLGNHTAQFAEIAAFEFALKKCLPLGGNILVVTDSNYVAKAYNEELDVWASNGFVNNRKKPLKHISKWKSVADLKRLRPDVVVTHEPGHQKLDSSPHAYGNNLADQLATQASFKVHAGKRTADGSEFEKRTADGSEFESPKKKAKVE

SEQ ID NO: 7651 - protein, 2122 aa, synthetic construct
MPAAKRVKLDGGDKKYSIGLDIGTNSVGWAVITDEYKVPSKKFKVLGNTDRHSIKKNLIGALLFDSGETAEATRLKRTARRRYTRRKNRICYLQEIFSNEMAKVDDSFFHRLEESFLVEEDKKHERHPIFGNIVDEVAYHEKYPTIYHLRKKLVDSTDKADLRLIYLALAHMIKFRGHFLIEGDLNPDNSDVDKLFIQLVQTYNQLFEENPINASGVDAKAILSARLSKSRRLENLIAQLPGEKKNGLFGNLIALSLGLTPNFKSNFDLAEDAKLQLSKDTYDDDLDNLLAQIGDQYADLFLAAKNLSDAILLSDILRVNTEITKAPLSASMIKRYDEHHQDLTLLKALVRQQLPEKYKEIFFDQSKNGYAGYIDGGASQEEFYKFIKPILEKMDGTEELLVKLNREDLLRKQRTFDNGSIPHQIHLGELHAILRRQEDFYPFLKDNREKIEKILTFRIPYYVGPLARGNSRFAWMTRKSEETITPWNFEEVVDKGASAQSFIERMTNFDKNLPNEKVLPKHSLLYEYFTVYNELTKVKYVTEGMRKPAFLSGEQKKAIVDLLFKTNRKVTVKQLKEDYFKKIECFDSVEISGVEDRFNASLGTYHDLLKIIKDKDFLDNEENEDILEDIVLTLTLFEDREMIEERLKTYAHLFDDKVMKQLKRRRYTGWGRLSRKLINGIRDKQSGKTILDFLKSDGFANRNFMQLIHDDSLTFKEDIQKAQVSGQGDSLHEHIANLAGSPAIKKGILQTVKVVDELVKVMGRHKPENIVIEMARENQTTQKGQKNSRERMKRIEEGIKELGSQILKEHPVENTQLQNEKLYLYYLQNGRDMYVDQELDINRLSDYDVDHIVPQSFLKDDSIDNKVLTRSDKARGKSDNVPSEEVVKKMKNYWRQLLNAKLITQRKFDNLTKAERGGLSELDKAGFIKRQLVETRQITKHVAQILDSRMNTKYDENDKLIREVKVITLKSKLVSDFRKDFQFYKVREINNYHHAHDAYLNAVVGTALIKKYPKLESEFVYGDYKVYDVRKMIAKSEQEIGKATAKYFFYSNIMNFFKTEITLANGEIRKRPLIETNGETGEIVWDKGRDFATVRKVLSMPQVNIVKKTEVQTGGFSKESILPKRNSDKLIARKKDWDPKKYGGFDSPTVAYSVLVVAKVEKGKSKKLKSVKELLGITIMERSSFEKNPIDFLEAKGYKEVKKDLIIKLPKYSLFELENGRKRMLASAGELQKGNELALPSKYVNFLYLASHYEKLKGSPEDNEQKQLFVEQHKHYLDEIIEQISEFSKRVILADANLDKVLSAYNKHRDKPIREQAENIIHLFTLTNLGAPAAFKYFDTTIDRKRYTSTKEVLDATLIHQSITGLYETRIDLSQLGGDGGAEAAAKEAAAKEAAAKEAAAKALEAEAAAKEAAAKEAAAKEAAAKAGGVPWILKKPLELTIKLDLEEQQGTLLNNSILSKKGKEELKQLFEKYSALWQSWENQVGHRRIRPHKIATGTVKPTPQKQYHINPKAKPDIQIVINDLLKQGVLIQKESTMNTPVYPVPKPNGRWRMVLDYRAVNKVTPLIAVQNQHSYGILGSLFKGRYKTTIDLSNGFWAHPIVPEDYWITAFTWQGKQYCWTVLPQGFLNSPGLFNGDVVDLLQGIPNVEVYVDDVYISHDSEKEHLEYLDILFNRLKEAGYIISLKKSNIANSIVDFLGFQITNEGRGLTDTFKEKLENITAPTTLKQLQSILGKLNFARNFIPDFTELIAPLYALIPKSPKNYVPWQIEHSTTLETLITKLNGAEYLQGRKGDKTLIMKVNASYTTGYIRYYNEGEKKPISYVSIVFSKTELKFTELEKLLTTVHKGLLKALDLSMGQNIHVYSPIVSMQNIQKTPQTAKKALASRWLSWLSYLEDPRIRFFYDPQMPALKDLPAVDTGKDNKKHPSNFQHIFYTDGSAITSPTKEGHLNAGMGIVYFINKDGNLQKQQEWSISLGNHTAQFAEIAAFEFALKKCLPLGGNILVVTDSNYVAKAYNEELDVWASNGFVNNRKKPLKHISKWKSVADLKRLRPDVVVTHEPGHQKLDSSPHAYGNNLADQLATQASFKVHAGKRTADGSEFEKRTADGSEFESPKKKAKVE

SEQ ID NO: 7652 - protein, 2122 aa, synthetic construct
MPAAKRVKLDGGDKKYSIGLDIGTNSVGWAVITDEYKVPSKKFKVLGNTDRHSIKKNLIGALLFDSGETAEATRLKRTARRRYTRRKNRICYLQEIFSNEMAKVDDSFFHRLEESFLVEEDKKHERHPIFGNIVDEVAYHEKYPTIYHLRKKLVDSTDKADLRLIYLALAHMIKFRGHFLIEGDLNPDNSDVDKLFIQLVQTYNQLFEENPINASGVDAKAILSARLSKSRRLENLIAQLPGEKKNGLFGNLIALSLGLTPNFKSNFDLAEDAKLQLSKDTYDDDLDNLLAQIGDQYADLFLAAKNLSDAILLSDILRVNTEITKAPLSASMIKRYDEHHQDLTLLKALVRQQLPEKYKEIFFDQSKNGYAGYIDGGASQEEFYKFIKPILEKMDGTEELLVKLNREDLLRKQRTFDNGSIPHQIHLGELHAILRRQEDFYPFLKDNREKIEKILTFRIPYYVGPLARGNSRFAWMTRKSEETITPWNFEEVVDKGASAQSFIERMTNFDKNLPNEKVLPKHSLLYEYFTVYNELTKVKYVTEGMRKPAFLSGEQKKAIVDLLFKTNRKVTVKQLKEDYFKKIECFDSVEISGVEDRFNASLGTYHDLLKIIKDKDFLDNEENEDILEDIVLTLTLFEDREMIEERLKTYAHLFDDKVMKQLKRRRYTGWGRLSRKLINGIRDKQSGKTILDFLKSDGFANRNFMQLIHDDSLTFKEDIQKAQVSGQGDSLHEHIANLAGSPAIKKGILQTVKVVDELVKVMGRHKPENIVIEMARENQTTQKGQKNSRERMKRIEEGIKELGSQILKEHPVENTQLQNEKLYLYYLQNGRDMYVDQELDINRLSDYDVDHIVPQSFLKDDSIDNKVLTRSDKARGKSDNVPSEEVVKKMKNYWRQLLNAKLITQRKFDNLTKAERGGLSELDKAGFIKRQLVETRQITKHVAQILDSRMNTKYDENDKLIREVKVITLKSKLVSDFRKDFQFYKVREINNYHHAHDAYLNAVVGTALIKKYPKLESEFVYGDYKVYDVRKMIAKSEQEIGKATAKYFFYSNIMNFFKTEITLANGEIRKRPLIETNGETGEIVWDKGRDFATVRKVLSMPQVNIVKKTEVQTGGFSKESILPKRNSDKLIARKKDWDPKKYGGFDSPTVAYSVLVVAKVEKGKSKKLKSVKELLGITIMERSSFEKNPIDFLEAKGYKEVKKDLIIKLPKYSLFELENGRKRMLASAGELQKGNELALPSKYVNFLYLASHYEKLKGSPEDNEQKQLFVEQHKHYLDEIIEQISEFSKRVILADANLDKVLSAYNKHRDKPIREQAENIIHLFTLTNLGAPAAFKYFDTTIDRKRYTSTKEVLDATLIHQSITGLYETRIDLSQLGGDGGAEAAAKEAAAKEAAAKEAAAKALEAEAAAKEAAAKEAAAKEAAAKAGGVPWLTQQPLQLTILVPLQEYQEKILSKTALPEDQKQQLKTLFVKYDNLWQHWENQVGHRKIRPHNIATGDYPPRPQKQYPINPKAKPSIQIVIDDLLKQGVLTPQNSTMNTPVYPVPKPDGRWRMVLDYREVNKTIPLTAAQNQHSAGILATIVRQKYKTTLDLANGFWAHPITPESYWLTAFTWQGKQYCWTRLPQGFLNSPALFTADVVDLLKEIPNVQVYVDDIYLSHDDPKEHVQQLEKVFQILLQAGYVVSLKKSEIGQKTVEFLGFNITKEGRGLTDTFKTKLLNITPPKDLKQLQSILGLLNFARNFIPNFAELVQPLYNLIASAKGKYIEWSEENTKQLNMVIEALNTASNLEERLPEQRLVIKVNTSPSAGYVRYYNETGKKPIMYLNYVFSKAELKFSMLEKLLTTMHKALIKAMDLAMGQEILVYSPIVSMTKIQKTPLPERKALPIRWITWMTYLEDPRIQFHYDKTLPELKHIPDVYTSSQSPVKHPSQYEGVFYTDGSAIKSPDPTKSNNAGMGIVHATYKPEYQVLNQWSIPLGNHTAQMAEIAAVEFACKKALKIPGPVLVITDSFYVAESANKELPYWKSNGFVNNKKKPLKHISKWKSIAECLSMKPDITIQHEKGISLQIPVFILKGNALADKLATQGSYVVNAGKRTADGSEFEKRTADGSEFESPKKKAKVE

SEQ ID NO: 7653 - protein, 2211 aa, synthetic construct
MPAAKRVKLDGGDKKYSIGLDIGTNSVGWAVITDEYKVPSKKFKVLGNTDRHSIKKNLIGALLFDSGETAEATRLKRTARRRYTRRKNRICYLQEIFSNEMAKVDDSFFHRLEESFLVEEDKKHERHPIFGNIVDEVAYHEKYPTIYHLRKKLVDSTDKADLRLIYLALAHMIKFRGHFLIEGDLNPDNSDVDKLFIQLVQTYNQLFEENPINASGVDAKAILSARLSKSRRLENLIAQLPGEKKNGLFGNLIALSLGLTPNFKSNFDLAEDAKLQLSKDTYDDDLDNLLAQIGDQYADLFLAAKNLSDAILLSDILRVNTEITKAPLSASMIKRYDEHHQDLTLLKALVRQQLPEKYKEIFFDQSKNGYAGYIDGGASQEEFYKFIKPILEKMDGTEELLVKLNREDLLRKQRTFDNGSIPHQIHLGELHAILRRQEDFYPFLKDNREKIEKILTFRIPYYVGPLARGNSRFAWMTRKSEETITPWNFEEVVDKGASAQSFIERMTNFDKNLPNEKVLPKHSLLYEYFTVYNELTKVKYVTEGMRKPAFLSGEQKKAIVDLLFKTNRKVTVKQLKEDYFKKIECFDSVEISGVEDRFNASLGTYHDLLKIIKDKDFLDNEENEDILEDIVLTLTLFEDREMIEERLKTYAHLFDDKVMKQLKRRRYTGWGRLSRKLINGIRDKQSGKTILDFLKSDGFANRNFMQLIHDDSLTFKEDIQKAQVSGQGDSLHEHIANLAGSPAIKKGILQTVKVVDELVKVMGRHKPENIVIEMARENQTTQKGQKNSRERMKRIEEGIKELGSQILKEHPVENTQLQNEKLYLYYLQNGRDMYVDQELDINRLSDYDVDHIVPQSFLKDDSIDNKVLTRSDKARGKSDNVPSEEVVKKMKNYWRQLLNAKLITQRKFDNLTKAERGGLSELDKAGFIKRQLVETRQITKHVAQILDSRMNTKYDENDKLIREVKVITLKSKLVSDFRKDFQFYKVREINNYHHAHDAYLNAVVGTALIKKYPKLESEFVYGDYKVYDVRKMIAKSEQEIGKATAKYFFYSNIMNFFKTEITLANGEIRKRPLIETNGETGEIVWDKGRDFATVRKVLSMPQVNIVKKTEVQTGGFSKESILPKRNSDKLIARKKDWDPKKYGGFDSPTVAYSVLVVAKVEKGKSKKLKSVKELLGITIMERSSFEKNPIDFLEAKGYKEVKKDLIIKLPKYSLFELENGRKRMLASAGELQKGNELALPSKYVNFLYLASHYEKLKGSPEDNEQKQLFVEQHKHYLDEIIEQISEFSKRVILADANLDKVLSAYNKHRDKPIREQAENIIHLFTLTNLGAPAAFKYFDTTIDRKRYTSTKEVLDATLIHQSITGLYETRIDLSQLGGDGGAEAAAKEAAAKEAAAKEAAAKALEAEAAAKEAAAKEAAAKEAAAKAGGMNPLQLLQPLPAEIKGTKLLAHWNSGATITCIPESFLEDEQPIKKTLIKTIHGEKQQNVYYVTFKVKGRKVEAEVIASPYEYILLSPTDVPWLTQQPLQLTILVPLQEYQEKILSKTALPEDQKQQLKTLFVKYDNLWQHWENQVGHRKIRPHNIATGDYPPRPQKQYPINPKAKPSIQIVIDDLLKQGVLTPQNSTMNTPVYPVPKPDGRWRMVLDYREVNKTIPLTAAQNQHSAGILATIVRQKYKTTLDLANGFWAHPITPESYWLTAFTWQGKQYCWTRLPQGFLNSPALFNADVVDLLKEIPNVQVYVDDIYLSHDDPKEHVQQLEKVFQILLQAGYVVSLKKSEIGQKTVEFLGFNITKEGRGLTDTFKTKLLNITPPKDLKQLQSILGLLNFARNFIPNFAELVQPLYNLIAPAKGKYIEWSEENTKQLNMVIEALNTASNLEERLPEQRLVIKVNTSPSAGYVRYYNETGKKPIMYLNYVFSKAELKFSMLEKLLTTMHKALIKAMDLAMGQEILVYSPIVSMTKIQKTPLPERKALPIRWITWMTYLEDPRIQFHYDKTLPELKHIPDVYTSSQSPVKHPSQYEGVFYTDGSAIKSPDPTKSNNAGMGIVHATYKPEYQVLNQWSIPLGNHTAQMAEIAAVEFACKKALKIPGPVLVITDSFYVAESANKELPYWKSNGFVNNKKKPLKHISKWKSIAECLSMKPDITIQHEKGISLQIPVFILKGNALADKLATQGSYVVNAGKRTADGSEFEKRTADGSEFESPKKKAKVE

SEQ ID NO: 7654 - protein, 2211 aa, synthetic construct
MPAAKRVKLDGGDKKYSIGLDIGTNSVGWAVITDEYKVPSKKFKVLGNTDRHSIKKNLIGALLFDSGETAEATRLKRTARRRYTRRKNRICYLQEIFSNEMAKVDDSFFHRLEESFLVEEDKKHERHPIFGNIVDEVAYHEKYPTIYHLRKKLVDSTDKADLRLIYLALAHMIKFRGHFLIEGDLNPDNSDVDKLFIQLVQTYNQLFEENPINASGVDAKAILSARLSKSRRLENLIAQLPGEKKNGLFGNLIALSLGLTPNFKSNFDLAEDAKLQLSKDTYDDDLDNLLAQIGDQYADLFLAAKNLSDAILLSDILRVNTEITKAPLSASMIKRYDEHHQDLTLLKALVRQQLPEKYKEIFFDQSKNGYAGYIDGGASQEEFYKFIKPILEKMDGTEELLVKLNREDLLRKQRTFDNGSIPHQIHLGELHAILRRQEDFYPFLKDNREKIEKILTFRIPYYVGPLARGNSRFAWMTRKSEETITPWNFEEVVDKGASAQSFIERMTNFDKNLPNEKVLPKHSLLYEYFTVYNELTKVKYVTEGMRKPAFLSGEQKKAIVDLLFKTNRKVTVKQLKEDYFKKIECFDSVEISGVEDRFNASLGTYHDLLKIIKDKDFLDNEENEDILEDIVLTLTLFEDREMIEERLKTYAHLFDDKVMKQLKRRRYTGWGRLSRKLINGIRDKQSGKTILDFLKSDGFANRNFMQLIHDDSLTFKEDIQKAQVSGQGDSLHEHIANLAGSPAIKKGILQTVKVVDELVKVMGRHKPENIVIEMARENQTTQKGQKNSRERMKRIEEGIKELGSQILKEHPVENTQLQNEKLYLYYLQNGRDMYVDQELDINRLSDYDVDHIVPQSFLKDDSIDNKVLTRSDKARGKSDNVPSEEVVKKMKNYWRQLLNAKLITQRKFDNLTKAERGGLSELDKAGFIKRQLVETRQITKHVAQILDSRMNTKYDENDKLIREVKVITLKSKLVSDFRKDFQFYKVREINNYHHAHDAYLNAVVGTALIKKYPKLESEFVYGDYKVYDVRKMIAKSEQEIGKATAKYFFYSNIMNFFKTEITLANGEIRKRPLIETNGETGEIVWDKGRDFATVRKVLSMPQVNIVKKTEVQTGGFSKESILPKRNSDKLIARKKDWDPKKYGGFDSPTVAYSVLVVAKVEKGKSKKLKSVKELLGITIMERSSFEKNPIDFLEAKGYKEVKKDLIIKLPKYSLFELENGRKRMLASAGELQKGNELALPSKYVNFLYLASHYEKLKGSPEDNEQKQLFVEQHKHYLDEIIEQISEFSKRVILADANLDKVLSAYNKHRDKPIREQAENIIHLFTLTNLGAPAAFKYFDTTIDRKRYTSTKEVLDATLIHQSITGLYETRIDLSQLGGDGGAEAAAKEAAAKEAAAKEAAAKALEAEAAAKEAAAKEAAAKEAAAKAGGMNPLQLLQPLPAEIKGTKLLAHWNSGATITCIPESFLEDEQPIKKTLIKTIHGEKQQNVYYVTFKVKGRKVEAEVIASPYEYILLSPTDVPWLTQQPLQLTILVPLQEYQEKILSKTALPEDQKQQLKTLFVKYDNLWQHWENQVGHRKIRPHNIATGDYPPRPQKQYPINPKAKPSIQIVIDDLLKQGVLTPQNSTMNTPVYPVPKPDGRWRMVLDYREVNKTIPLTAAQNQHSAGILATIVRQKYKTTLDLANGFWAHPITPESYWLTAFTWQGKQYCWTRLPQGFLNSPALFNADVVDLLKEIPNVQVYVDDIYLSHDDPKEHVQQLEKVFQILLQAGYVVSLKKSEIGQKTVEFLGFNITKEGRGLTDTFKTKLLNITPPKDLKQLQSILGKLNFARNFIPNFAELVQPLYNLIAPAKGKYIEWSEENTKQLNMVIEALNTASNLEERLPEQRLVIKVNTSPSAGYVRYYNETGKKPIMYLNYVFSKAELKFSMLEKLLTTMHKALIKAMDLAMGQEILVYSPIVSMTKIQKTPLPERKALPIRWITWMTYLEDPRIQFHYDKTLPELKHIPDVYTSSQSPVKHPSQYEGVFYTDGSAIKSPDPTKSNNAGMGIVHATYKPEYQVLNQWSIPLGNHTAQMAEIAAVEFACKKALKIPGPVLVITDSFYVAESANKELPYWKSNGFVNNKKKPLKHISKWKSIAECLSMKPDITIQHEKGISLQIPVFILKGNALADKLATQGSYVVNAGKRTADGSEFEKRTADGSEFESPKKKAKVE

SEQ ID NO: 7655 - protein, 2162 aa, synthetic construct
MPAAKRVKLDGGDKKYSIGLDIGTNSVGWAVITDEYKVPSKKFKVLGNTDRHSIKKNLIGALLFDSGETAEATRLKRTARRRYTRRKNRICYLQEIFSNEMAKVDDSFFHRLEESFLVEEDKKHERHPIFGNIVDEVAYHEKYPTIYHLRKKLVDSTDKADLRLIYLALAHMIKFRGHFLIEGDLNPDNSDVDKLFIQLVQTYNQLFEENPINASGVDAKAILSARLSKSRRLENLIAQLPGEKKNGLFGNLIALSLGLTPNFKSNFDLAEDAKLQLSKDTYDDDLDNLLAQIGDQYADLFLAAKNLSDAILLSDILRVNTEITKAPLSASMIKRYDEHHQDLTLLKALVRQQLPEKYKEIFFDQSKNGYAGYIDGGASQEEFYKFIKPILEKMDGTEELLVKLNREDLLRKQRTFDNGSIPHQIHLGELHAILRRQEDFYPFLKDNREKIEKILTFRIPYYVGPLARGNSRFAWMTRKSEETITPWNFEEVVDKGASAQSFIERMTNFDKNLPNEKVLPKHSLLYEYFTVYNELTKVKYVTEGMRKPAFLSGEQKKAIVDLLFKTNRKVTVKQLKEDYFKKIECFDSVEISGVEDRFNASLGTYHDLLKIIKDKDFLDNEENEDILEDIVLTLTLFEDREMIEERLKTYAHLFDDKVMKQLKRRRYTGWGRLSRKLINGIRDKQSGKTILDFLKSDGFANRNFMQLIHDDSLTFKEDIQKAQVSGQGDSLHEHIANLAGSPAIKKGILQTVKVVDELVKVMGRHKPENIVIEMARENQTTQKGQKNSRERMKRIEEGIKELGSQILKEHPVENTQLQNEKLYLYYLQNGRDMYVDQELDINRLSDYDVDHIVPQSFLKDDSIDNKVLTRSDKARGKSDNVPSEEVVKKMKNYWRQLLNAKLITQRKFDNLTKAERGGLSELDKAGFIKRQLVETRQITKHVAQILDSRMNTKYDENDKLIREVKVITLKSKLVSDFRKDFQFYKVREINNYHHAHDAYLNAVVGTALIKKYPKLESEFVYGDYKVYDVRKMIAKSEQEIGKATAKYFFYSNIMNFFKTEITLANGEIRKRPLIETNGETGEIVWDKGRDFATVRKVLSMPQVNIVKKTEVQTGGFSKESILPKRNSDKLIARKKDWDPKKYGGFDSPTVAYSVLVVAKVEKGKSKKLKSVKELLGITIMERSSFEKNPIDFLEAKGYKEVKKDLIIKLPKYSLFELENGRKRMLASAGELQKGNELALPSKYVNFLYLASHYEKLKGSPEDNEQKQLFVEQHKHYLDEIIEQISEFSKRVILADANLDKVLSAYNKHRDKPIREQAENIIHLFTLTNLGAPAAFKYFDTTIDRKRYTSTKEVLDATLIHQSITGLYETRIDLSQLGGDGGAEAAAKEAAAKEAAAKEAAAKALEAEAAAKEAAAKEAAAKEAAAKAGGLLGRDLLTKLKAQIQFSTEGPQVTWEDRPAMCLVLNLEEEYRLHEKPVPPSIDPSWLQLFPMVWAEKAGMGLANQVPPVVVELKSDASPVAVRQYPMSKEAREGIRPHIQRFLDLGILVPCQSPWNTPLLPVKKPGTNDYRPVQDLREVNKRVQDIHPTVPNPYNLLSSLPPSHTWYSVLDLKDAFFCLKLHPNSQPLFAFEWRDPEKGNTGQLTWTRLPQGFKNSPTLFDEALHRDLASFRALNPQVVMLQYVDDLLVAAPTYRDCKEGTRRLLQELSKLGYRVSAKKAQLCREEVTYLGYLLKGGKRWLTPARKATVMKIPTPTTPRQVREFLGTAGFCRLWIPGFASLAAPLYPLTREKVPFTWTEAHQEAFGRIKEALLSAPALALPDLTKPFALYVDEKEGVARGVLTQTLGPWRRPVAYLSKKLDPVASGWPTCLKAIAAVALLLKDADKLTLGQNVLVIAPHNLESIVRQPPDRWMTNARMTHYQSLLLNERVSFAPPAILNPATLLPVESDDTPIHICSEILAEETGTRPDLRDQPLPGVPAWYTDGSSFIMDGRRQAGAAIVDNKRTVWASNLPEGTSAQKAELIALTQALRLAEGKSINIYTDSRYAFATAHVHGAIYKQRGLLTSAGKDIKNKEEILALLEAIHLPKRVAIIHCPGHQRGTDPVATGNRKADEAAKQAAQSTRILTETTKNAGKRTADGSEFEKRTADGSEFESPKKKAKVE

SEQ ID NO: 7656 - protein, 2253 aa, synthetic construct
MPAAKRVKLDGGDKKYSIGLDIGTNSVGWAVITDEYKVPSKKFKVLGNTDRHSIKKNLIGALLFDSGETAEATRLKRTARRRYTRRKNRICYLQEIFSNEMAKVDDSFFHRLEESFLVEEDKKHERHPIFGNIVDEVAYHEKYPTIYHLRKKLVDSTDKADLRLIYLALAHMIKFRGHFLIEGDLNPDNSDVDKLFIQLVQTYNQLFEENPINASGVDAKAILSARLSKSRRLENLIAQLPGEKKNGLFGNLIALSLGLTPNFKSNFDLAEDAKLQLSKDTYDDDLDNLLAQIGDQYADLFLAAKNLSDAILLSDILRVNTEITKAPLSASMIKRYDEHHQDLTLLKALVRQQLPEKYKEIFFDQSKNGYAGYIDGGASQEEFYKFIKPILEKMDGTEELLVKLNREDLLRKQRTFDNGSIPHQIHLGELHAILRRQEDFYPFLKDNREKIEKILTFRIPYYVGPLARGNSRFAWMTRKSEETITPWNFEEVVDKGASAQSFIERMTNFDKNLPNEKVLPKHSLLYEYFTVYNELTKVKYVTEGMRKPAFLSGEQKKAIVDLLFKTNRKVTVKQLKEDYFKKIECFDSVEISGVEDRFNASLGTYHDLLKIIKDKDFLDNEENEDILEDIVLTLTLFEDREMIEERLKTYAHLFDDKVMKQLKRRRYTGWGRLSRKLINGIRDKQSGKTILDFLKSDGFANRNFMQLIHDDSLTFKEDIQKAQVSGQGDSLHEHIANLAGSPAIKKGILQTVKVVDELVKVMGRHKPENIVIEMARENQTTQKGQKNSRERMKRIEEGIKELGSQILKEHPVENTQLQNEKLYLYYLQNGRDMYVDQELDINRLSDYDVDHIVPQSFLKDDSIDNKVLTRSDKARGKSDNVPSEEVVKKMKNYWRQLLNAKLITQRKFDNLTKAERGGLSELDKAGFIKRQLVETRQITKHVAQILDSRMNTKYDENDKLIREVKVITLKSKLVSDFRKDFQFYKVREINNYHHAHDAYLNAVVGTALIKKYPKLESEFVYGDYKVYDVRKMIAKSEQEIGKATAKYFFYSNIMNFFKTEITLANGEIRKRPLIETNGETGEIVWDKGRDFATVRKVLSMPQVNIVKKTEVQTGGFSKESILPKRNSDKLIARKKDWDPKKYGGFDSPTVAYSVLVVAKVEKGKSKKLKSVKELLGITIMERSSFEKNPIDFLEAKGYKEVKKDLIIKLPKYSLFELENGRKRMLASAGELQKGNELALPSKYVNFLYLASHYEKLKGSPEDNEQKQLFVEQHKHYLDEIIEQISEFSKRVILADANLDKVLSAYNKHRDKPIREQAENIIHLFTLTNLGAPAAFKYFDTTIDRKRYTSTKEVLDATLIHQSITGLYETRIDLSQLGGDGGAEAAAKEAAAKEAAAKEAAAKALEAEAAAKEAAAKEAAAKEAAAKAGGTLGDQGSRGSDPLPEPRVTLTVEGIPTEFLVNTGAEHSVLTKPMGKMGSKRTVVAGATGSKVYPWTTKRLLKIGQKQVTHSFLVIPECPAPLLGRDLLTKLKAQIQFSTEGPQVTWEDRPAMCLVLNLEEEYRLHEKPVPPSIDPSWLQLFPMVWAEKAGMGLANQVPPVVVELKSDASPVAVRQYPMSKEAREGIRPHIQRFLDLGILVPCQSPWNTPLLPVKKPGTNDYRPVQDLREVNKRVQDIHPTVPNPYNLLSSLPPSHTWYSVLDLKDAFFCLKLHPNSQPLFAFEWRDPEKGNTGQLTWTRLPQGFKNSPTLFNEALHRDLASFRALNPQVVMLQYVDDLLVAAPTYRDCKEGTRRLLQELSKLGYRVSAKKAQLCREEVTYLGYLLKGGKRWLTPARKATVMKIPTPTTPRQVREFLGTAGFCRLWIPGFASLAAPLYPLTRPKVPFTWTEAHQEAFGRIKEALLSAPALALPDLTKPFALYVDEKEGVARGVLTQTLGPWRRPVAYLSKKLDPVASGWPTCLKAIAAVALLLKDADKLTLGQNVLVIAPHNLESIVRQPPDRWMTNARMTHYQSLLLNERVSFAPPAILNPATLLPVESDDTPIHICSEILAEETGTRPDLRDQPLPGVPAWYTDGSSFIMDGRRQAGAAIVDNKRTVWASNLPEGTSAQKAELIALTQALRLAEGKSINIYTDSRYAFATAHVHGAIYKQRGWLTSAGKDIKNKEEILALLEAIHLPKRVAIIHCPGHQRGTDPVATGNRKADEAAKQAAQSTRILTETTKNAGKRTADGSEFEKRTADGSEFESPKKKAKVE

SEQ ID NO: 7657 - protein, 2131 aa, synthetic construct
MPAAKRVKLDGGDKKYSIGLDIGTNSVGWAVITDEYKVPSKKFKVLGNTDRHSIKKNLIGALLFDSGETAEATRLKRTARRRYTRRKNRICYLQEIFSNEMAKVDDSFFHRLEESFLVEEDKKHERHPIFGNIVDEVAYHEKYPTIYHLRKKLVDSTDKADLRLIYLALAHMIKFRGHFLIEGDLNPDNSDVDKLFIQLVQTYNQLFEENPINASGVDAKAILSARLSKSRRLENLIAQLPGEKKNGLFGNLIALSLGLTPNFKSNFDLAEDAKLQLSKDTYDDDLDNLLAQIGDQYADLFLAAKNLSDAILLSDILRVNTEITKAPLSASMIKRYDEHHQDLTLLKALVRQQLPEKYKEIFFDQSKNGYAGYIDGGASQEEFYKFIKPILEKMDGTEELLVKLNREDLLRKQRTFDNGSIPHQIHLGELHAILRRQEDFYPFLKDNREKIEKILTFRIPYYVGPLARGNSRFAWMTRKSEETITPWNFEEVVDKGASAQSFIERMTNFDKNLPNEKVLPKHSLLYEYFTVYNELTKVKYVTEGMRKPAFLSGEQKKAIVDLLFKTNRKVTVKQLKEDYFKKIECFDSVEISGVEDRFNASLGTYHDLLKIIKDKDFLDNEENEDILEDIVLTLTLFEDREMIEERLKTYAHLFDDKVMKQLKRRRYTGWGRLSRKLINGIRDKQSGKTILDFLKSDGFANRNFMQLIHDDSLTFKEDIQKAQVSGQGDSLHEHIANLAGSPAIKKGILQTVKVVDELVKVMGRHKPENIVIEMARENQTTQKGQKNSRERMKRIEEGIKELGSQILKEHPVENTQLQNEKLYLYYLQNGRDMYVDQELDINRLSDYDVDHIVPQSFLKDDSIDNKVLTRSDKARGKSDNVPSEEVVKKMKNYWRQLLNAKLITQRKFDNLTKAERGGLSELDKAGFIKRQLVETRQITKHVAQILDSRMNTKYDENDKLIREVKVITLKSKLVSDFRKDFQFYKVREINNYHHAHDAYLNAVVGTALIKKYPKLESEFVYGDYKVYDVRKMIAKSEQEIGKATAKYFFYSNIMNFFKTEITLANGEIRKRPLIETNGETGEIVWDKGRDFATVRKVLSMPQVNIVKKTEVQTGGFSKESILPKRNSDKLIARKKDWDPKKYGGFDSPTVAYSVLVVAKVEKGKSKKLKSVKELLGITIMERSSFEKNPIDFLEAKGYKEVKKDLIIKLPKYSLFELENGRKRMLASAGELQKGNELALPSKYVNFLYLASHYEKLKGSPEDNEQKQLFVEQHKHYLDEIIEQISEFSKRVILADANLDKVLSAYNKHRDKPIREQAENIIHLFTLTNLGAPAAFKYFDTTIDRKRYTSTKEVLDATLIHQSITGLYETRIDLSQLGGDGGAEAAAKEAAAKEAAAKEAAAKALEAEAAAKEAAAKEAAAKEAAAKAGGTLNLEDEYRLYETSAEPEVSPGSTWLSDFPQAWAETGGMGLAVRQAPLIIPLKATSTPVSIKQYPMSQEAKLGIKPHIQRLLDQGILVPCQSPWNTPLLPVKKPGTNDYRPVQDLREVNKRVEDIHPTVPNPYNLLSGLPPSHRWYTVLDLKDAFFCLRLHPTSQPLFAFEWRDPGMGISGQLTWTRLPQGFKNSPTLFNEALHRDLADFRIQHPDLILLQYVDDILLAATSELDCQQGTRALLLTLGNLGYRASAKKAQLCQKQVKYLGYLLKEGQRWLTEARKETVMGQPTPKTPRQLREFLGTAGFCRLWIPGFAEMAAPLYPLTKPGTLFNWGPDQQKAYQEIKQALLTAPALGLPDLTKPFELFVDEKQGYAKGVLTQKLGPWRRPVAYLSKKLDPVAAGWPPCLRMVAAIAVLRKDAGKLTMGQPLVILAPHAVEALVKQPPDRWLSNARMTHYQAMLLDTDRVQFGPVVALNPATLLPLPEEGAPHDCLEILAETHGTRPDLTDQPIPDADHTWYTDGSSFLQEGQRKAGAAVTTETEVIWARALPAGTSAQRAELIALTQALKMAEGKRLNVYTDSRYAFATAHIHGEIYRRRGWLTSEGREIKNKSEILALLKALFLPKRLSIIHCLGHQKGDSAEARGNRLADQAAREAAIKTPPDTSTLLAGKRTADGSEFEKRTADGSEFESPKKKAKVE

SEQ ID NO: 7658 - protein, 2131 aa, synthetic construct
MPAAKRVKLDGGDKKYSIGLDIGTNSVGWAVITDEYKVPSKKFKVLGNTDRHSIKKNLIGALLFDSGETAEATRLKRTARRRYTRRKNRICYLQEIFSNEMAKVDDSFFHRLEESFLVEEDKKHERHPIFGNIVDEVAYHEKYPTIYHLRKKLVDSTDKADLRLIYLALAHMIKFRGHFLIEGDLNPDNSDVDKLFIQLVQTYNQLFEENPINASGVDAKAILSARLSKSRRLENLIAQLPGEKKNGLFGNLIALSLGLTPNFKSNFDLAEDAKLQLSKDTYDDDLDNLLAQIGDQYADLFLAAKNLSDAILLSDILRVNTEITKAPLSASMIKRYDEHHQDLTLLKALVRQQLPEKYKEIFFDQSKNGYAGYIDGGASQEEFYKFIKPILEKMDGTEELLVKLNREDLLRKQRTFDNGSIPHQIHLGELHAILRRQEDFYPFLKDNREKIEKILTFRIPYYVGPLARGNSRFAWMTRKSEETITPWNFEEVVDKGASAQSFIERMTNFDKNLPNEKVLPKHSLLYEYFTVYNELTKVKYVTEGMRKPAFLSGEQKKAIVDLLFKTNRKVTVKQLKEDYFKKIECFDSVEISGVEDRFNASLGTYHDLLKIIKDKDFLDNEENEDILEDIVLTLTLFEDREMIEERLKTYAHLFDDKVMKQLKRRRYTGWGRLSRKLINGIRDKQSGKTILDFLKSDGFANRNFMQLIHDDSLTFKEDIQKAQVSGQGDSLHEHIANLAGSPAIKKGILQTVKVVDELVKVMGRHKPENIVIEMARENQTTQKGQKNSRERMKRIEEGIKELGSQILKEHPVENTQLQNEKLYLYYLQNGRDMYVDQELDINRLSDYDVDHIVPQSFLKDDSIDNKVLTRSDKARGKSDNVPSEEVVKKMKNYWRQLLNAKLITQRKFDNLTKAERGGLSELDKAGFIKRQLVETRQITKHVAQILDSRMNTKYDENDKLIREVKVITLKSKLVSDFRKDFQFYKVREINNYHHAHDAYLNAVVGTALIKKYPKLESEFVYGDYKVYDVRKMIAKSEQEIGKATAKYFFYSNIMNFFKTEITLANGEIRKRPLIETNGETGEIVWDKGRDFATVRKVLSMPQVNIVKKTEVQTGGFSKESILPKRNSDKLIARKKDWDPKKYGGFDSPTVAYSVLVVAKVEKGKSKKLKSVKELLGITIMERSSFEKNPIDFLEAKGYKEVKKDLIIKLPKYSLFELENGRKRMLASAGELQKGNELALPSKYVNFLYLASHYEKLKGSPEDNEQKQLFVEQHKHYLDEIIEQISEFSKRVILADANLDKVLSAYNKHRDKPIREQAENIIHLFTLTNLGAPAAFKYFDTTIDRKRYTSTKEVLDATLIHQSITGLYETRIDLSQLGGDGGAEAAAKEAAAKEAAAKEAAAKALEAEAAAKEAAAKEAAAKEAAAKAGGTLNIEDEYRLHETSKEPDVSLGSTWLSDFPQAWAETGGMGLAVRQAPLIIPLKATSTPVSIKQYPMSQEARLGIKPHIQRLLDQGILVPCQSPWNTPLLPVKKPGTNDYRPVQDLREVNKRVEDIHPTVPNPYNLLSGLPPSHQWYTVLDLKDAFFCLRLHPTSQPLFAFEWRDPEMGISGQLTWTRLPQGFKNSPTLFNEALHRDLAGFRIQHPDLILLQYVDDLLLAATSELDCQQGTRALLQTLGDLGYRASAKKAQICQKQVKYLGYLLKEGQRWLTEARKETVMGQPIPKTPRQLREFLGTAGFCRLWIPGFAEMAAPLYPLTKPGTLFNWGPDQQKAFQEIKQALLTAPALGLPDLTKPFELFVDEKQGYAKGVLTQKLGPWRRPVAYLSKKLDPVAAGWPPCLRMVAAIAVLTKDAGKLTMGQPLVILAPHAVEALVKQPPDRWLSNARMTHYQALLLDTDRVQFGPVVALNPATLLPLPEEGLQHDCLDILAEAHGTRSDLMDQPLPDADHTWYTDGSSFLQEGQRKAGAAVTTETEVIWARALPAGTSAQRAELIALTQALKMAEGKKLNVYTDSRYAFATAHIHGEIYRRRGWLTSEGKEIKNKDEILALLKALFLPKRLSIIHCPGHQKGNSAEARGNRMADQAAREVATRETPETSTLLAGKRTADGSEFEKRTADGSEFESPKKKAKVE

SEQ ID NO: 7659 - protein, 2131 aa, synthetic construct
MPAAKRVKLDGGDKKYSIGLDIGTNSVGWAVITDEYKVPSKKFKVLGNTDRHSIKKNLIGALLFDSGETAEATRLKRTARRRYTRRKNRICYLQEIFSNEMAKVDDSFFHRLEESFLVEEDKKHERHPIFGNIVDEVAYHEKYPTIYHLRKKLVDSTDKADLRLIYLALAHMIKFRGHFLIEGDLNPDNSDVDKLFIQLVQTYNQLFEENPINASGVDAKAILSARLSKSRRLENLIAQLPGEKKNGLFGNLIALSLGLTPNFKSNFDLAEDAKLQLSKDTYDDDLDNLLAQIGDQYADLFLAAKNLSDAILLSDILRVNTEITKAPLSASMIKRYDEHHQDLTLLKALVRQQLPEKYKEIFFDQSKNGYAGYIDGGASQEEFYKFIKPILEKMDGTEELLVKLNREDLLRKQRTFDNGSIPHQIHLGELHAILRRQEDFYPFLKDNREKIEKILTFRIPYYVGPLARGNSRFAWMTRKSEETITPWNFEEVVDKGASAQSFIERMTNFDKNLPNEKVLPKHSLLYEYFTVYNELTKVKYVTEGMRKPAFLSGEQKKAIVDLLFKTNRKVTVKQLKEDYFKKIECFDSVEISGVEDRFNASLGTYHDLLKIIKDKDFLDNEENEDILEDIVLTLTLFEDREMIEERLKTYAHLFDDKVMKQLKRRRYTGWGRLSRKLINGIRDKQSGKTILDFLKSDGFANRNFMQLIHDDSLTFKEDIQKAQVSGQGDSLHEHIANLAGSPAIKKGILQTVKVVDELVKVMGRHKPENIVIEMARENQTTQKGQKNSRERMKRIEEGIKELGSQILKEHPVENTQLQNEKLYLYYLQNGRDMYVDQELDINRLSDYDVDHIVPQSFLKDDSIDNKVLTRSDKARGKSDNVPSEEVVKKMKNYWRQLLNAKLITQRKFDNLTKAERGGLSELDKAGFIKRQLVETRQITKHVAQILDSRMNTKYDENDKLIREVKVITLKSKLVSDFRKDFQFYKVREINNYHHAHDAYLNAVVGTALIKKYPKLESEFVYGDYKVYDVRKMIAKSEQEIGKATAKYFFYSNIMNFFKTEITLANGEIRKRPLIETNGETGEIVWDKGRDFATVRKVLSMPQVNIVKKTEVQTGGFSKESILPKRNSDKLIARKKDWDPKKYGGFDSPTVAYSVLVVAKVEKGKSKKLKSVKELLGITIMERSSFEKNPIDFLEAKGYKEVKKDLIIKLPKYSLFELENGRKRMLASAGELQKGNELALPSKYVNFLYLASHYEKLKGSPEDNEQKQLFVEQHKHYLDEIIEQISEFSKRVILADANLDKVLSAYNKHRDKPIREQAENIIHLFTLTNLGAPAAFKYFDTTIDRKRYTSTKEVLDATLIHQSITGLYETRIDLSQLGGDGGAEAAAKEAAAKEAAAKEAAAKALEAEAAAKEAAAKEAAAKEAAAKAGGTLNIEDEYRLHETSKGPDVPLGSTWLSDFPQAWAETGGMGLAFRQAPLIISLKATSTPVSIKQYPMSQEARLGIKPHIQRLLDQGILVPCQSPWNTPLLPVKKPGTNDYRPVQDLREVNKRVEDIHPTVPNPYNLLSGLPPSHQWYTVLDLKDAFFCLRLHPTSQSLFAFEWKDPEMGISGQLTWTRLPQGFKNSPTLFNEALHRDLADFRIQHPDLILLQYVDDLLLAATSELDCQQGTRALLQTLGDLGYRASAKKAQICQKQVKYLGYLLKEGQRWLTEARKETVMGQPTPKTPRQLREFLGKAGLCRLFIPGFAEMAAPLYPLTKPGTLFKWGPDQQKAYQEIKQALLTAPALGLPDLTKPFELFVDEKQGYAKGVLTQKLGPWRRPVAYLSKKLDPVAAGWPPCLRMVAAIAVLTKDVGKLTMGQPLVILAPHAVEALVKQPPDRWLSNARMTHYQALLLDTDRVQFGPIVALNPATLLPLPEEGLQHDCLDILAEAHGTRPDLTDQPLPDADHTWYTDGSSFLQEGQRRAGAAVTTETEVIWAKALPAGTSAQRAELIALTQALKMAAGKKLNVYTDSRYAFATAHIHGEIYRRRGWLTSEGKEIKNKDEILALLKALFLPKRLSIIHCPGHQKGNHAEARGNRMADQAAREVATRETPETSTLLAGKRTADGSEFEKRTADGSEFESPKKKAKVE

SEQ ID NO: 7660 - protein, 2131 aa, synthetic construct; identical to SEQ ID NO: 4540

SEQ ID NO: 7661 - protein, 2151 aa, synthetic construct
MPAAKRVKLDGGDKKYSIGLDIGTNSVGWAVITDEYKVPSKKFKVLGNTDRHSIKKNLIGALLFDSGETAEATRLKRTARRRYTRRKNRICYLQEIFSNEMAKVDDSFFHRLEESFLVEEDKKHERHPIFGNIVDEVAYHEKYPTIYHLRKKLVDSTDKADLRLIYLALAHMIKFRGHFLIEGDLNPDNSDVDKLFIQLVQTYNQLFEENPINASGVDAKAILSARLSKSRRLENLIAQLPGEKKNGLFGNLIALSLGLTPNFKSNFDLAEDAKLQLSKDTYDDDLDNLLAQIGDQYADLFLAAKNLSDAILLSDILRVNTEITKAPLSASMIKRYDEHHQDLTLLKALVRQQLPEKYKEIFFDQSKNGYAGYIDGGASQEEFYKFIKPILEKMDGTEELLVKLNREDLLRKQRTFDNGSIPHQIHLGELHAILRRQEDFYPFLKDNREKIEKILTFRIPYYVGPLARGNSRFAWMTRKSEETITPWNFEEVVDKGASAQSFIERMTNFDKNLPNEKVLPKHSLLYEYFTVYNELTKVKYVTEGMRKPAFLSGEQKKAIVDLLFKTNRKVTVKQLKEDYFKKIECFDSVEISGVEDRFNASLGTYHDLLKIIKDKDFLDNEENEDILEDIVLTLTLFEDREMIEERLKTYAHLFDDKVMKQLKRRRYTGWGRLSRKLINGIRDKQSGKTILDFLKSDGFANRNFMQLIHDDSLTFKEDIQKAQVSGQGDSLHEHIANLAGSPAIKKGILQTVKVVDELVKVMGRHKPENIVIEMARENQTTQKGQKNSRERMKRIEEGIKELGSQILKEHPVENTQLQNEKLYLYYLQNGRDMYVDQELDINRLSDYDVDHIVPQSFLKDDSIDNKVLTRSDKARGKSDNVPSEEVVKKMKNYWRQLLNAKLITQRKFDNLTKAERGGLSELDKAGFIKRQLVETRQITKHVAQILDSRMNTKYDENDKLIREVKVITLKSKLVSDFRKDFQFYKVREINNYHHAHDAYLNAVVGTALIKKYPKLESEFVYGDYKVYDVRKMIAKSEQEIGKATAKYFFYSNIMNFFKTEITLANGEIRKRPLIETNGETGEIVWDKGRDFATVRKVLSMPQVNIVKKTEVQTGGFSKESILPKRNSDKLIARKKDWDPKKYGGFDSPTVAYSVLVVAKVEKGKSKKLKSVKELLGITIMERSSFEKNPIDFLEAKGYKEVKKDLIIKLPKYSLFELENGRKRMLASAGELQKGNELALPSKYVNFLYLASHYEKLKGSPEDNEQKQLFVEQHKHYLDEIIEQISEFSKRVILADANLDKVLSAYNKHRDKPIREQAENIIHLFTLTNLGAPAAFKYFDTTIDRKRYTSTKEVLDATLIHQSITGLYETRIDLSQLGGDGGAEAAAKEAAAKEAAAKEAAAKALEAEAAAKEAAAKEAAAKEAAAKAGGWVQEISDSRPMLHIYLNGRRFLGLLNTGADKTCIAGRDWPANWPIHQTESSLQGLGMACGVARSSQPLRWQHEDKSGIIHPFVIPTLPFTLWGRDIMKDIKVRLMTDSPDDSQDLMIGAIESNLFADQISWKSDQPVWLNQWPLKQEKLQALQQLVTEQLQLGHLEESNSPWNTPVFVIKKKSGKWRLLQDLRAVNATMHDMGALQPGLPSPVAVPKGWEIIIIDLQDCFFNIKLHPEDCKRFAFSVPSPNFKRPYQRFQWKVLPQGMKNSPTLCQKFVDKAILTVRDKYQDSYIVHYMDDILLAHPSRSIVDEILTSMIQALNKHGLVVSTEKIQKYDNLKYLGTHIQGDSVSYQKLQIRTDKLRTLNDFQKLLGNINWIRPFLKLTTGELKPLFEILNPDSNPISTRKLTPEACKALQLMNERLSTARVKRLDLSQPWSLCILKTEYTPTACLWQDGVVEWIHLPHISPKVITPYDIFCTQLIIKGRHRSKELFSKDPDYIVVPYTKVQFDLLLQEKEDWPISLLGFLGEVHFHLPKDPLLTFTLQTAIIFPHMTSTTPLEKGIVIFTDGSANGRSVTYIQGREPIIKENTQNTAQQAEIVAVITAFEEVSQPFNLYTDSKYVTGLFPEIETATLSPRTKIYTELKHLQRLIHKRQEKFYIGHIRGHTGLPGPLAQGNAYADSLTRILTAGKRTADGSEFEKRTADGSEFESPKKKAKVE

SEQ ID NO: 7662 - protein, 2122 aa, synthetic construct
MPAAKRVKLDGGDKKYSIGLDIGTNSVGWAVITDEYKVPSKKFKVLGNTDRHSIKKNLIGALLFDSGETAEATRLKRTARRRYTRRKNRICYLQEIFSNEMAKVDDSFFHRLEESFLVEEDKKHERHPIFGNIVDEVAYHEKYPTIYHLRKKLVDSTDKADLRLIYLALAHMIKFRGHFLIEGDLNPDNSDVDKLFIQLVQTYNQLFEENPINASGVDAKAILSARLSKSRRLENLIAQLPGEKKNGLFGNLIALSLGLTPNFKSNFDLAEDAKLQLSKDTYDDDLDNLLAQIGDQYADLFLAAKNLSDAILLSDILRVNTEITKAPLSASMIKRYDEHHQDLTLLKALVRQQLPEKYKEIFFDQSKNGYAGYIDGGASQEEFYKFIKPILEKMDGTEELLVKLNREDLLRKQRTFDNGSIPHQIHLGELHAILRRQEDFYPFLKDNREKIEKILTFRIPYYVGPLARGNSRFAWMTRKSEETITPWNFEEVVDKGASAQSFIERMTNFDKNLPNEKVLPKHSLLYEYFTVYNELTKVKYVTEGMRKPAFLSGEQKKAIVDLLFKTNRKVTVKQLKEDYFKKIECFDSVEISGVEDRFNASLGTYHDLLKIIKDKDFLDNEENEDILEDIVLTLTLFEDREMIEERLKTYAHLFDDKVMKQLKRRRYTGWGRLSRKLINGIRDKQSGKTILDFLKSDGFANRNFMQLIHDDSLTFKEDIQKAQVSGQGDSLHEHIANLAGSPAIKKGILQTVKVVDELVKVMGRHKPENIVIEMARENQTTQKGQKNSRERMKRIEEGIKELGSQILKEHPVENTQLQNEKLYLYYLQNGRDMYVDQELDINRLSDYDVDHIVPQSFLKDDSIDNKVLTRSDKARGKSDNVPSEEVVKKMKNYWRQLLNAKLITQRKFDNLTKAERGGLSELDKAGFIKRQLVETRQITKHVAQILDSRMNTKYDENDKLIREVKVITLKSKLVSDFRKDFQFYKVREINNYHHAHDAYLNAVVGTALIKKYPKLESEFVYGDYKVYDVRKMIAKSEQEIGKATAKYFFYSNIMNFFKTEITLANGEIRKRPLIETNGETGEIVWDKGRDFATVRKVLSMPQVNIVKKTEVQTGGFSKESILPKRNSDKLIARKKDWDPKKYGGFDSPTVAYSVLVVAKVEKGKSKKLKSVKELLGITIMERSSFEKNPIDFLEAKGYKEVKKDLIIKLPKYSLFELENGRKRMLASAGELQKGNELALPSKYVNFLYLASHYEKLKGSPEDNEQKQLFVEQHKHYLDEIIEQISEFSKRVILADANLDKVLSAYNKHRDKPIREQAENIIHLFTLTNLGAPAAFKYFDTTIDRKRYTSTKEVLDATLIHQSITGLYETRIDLSQLGGDGGAEAAAKEAAAKEAAAKEAAAKALEAEAAAKEAAAKEAAAKEAAAKAGGVPWLMKKPLQLTVLVPLHEYQERLLQQTALPKEQKELLQKLFLKYDALWQHWENQVGHRRIKPHNIATGTLAPRPQKQYPINPKAKPSIQIVIDDLLKQGVLIQQNSTMNTPVYPVPKPDGKWRMVLDYREVNKTIPLIAAQNQHSAGILSSIYRGKYKTTLDLTNGFWAHPITPESYWLTAFTWQGKQYCWTRLPQGFLNSPALFTADVVDLLKEIPNVQAYVDDIYISHDDPQEHLEQLEKIFSILLNAGYVVSLKKSEIAQREVEFLGFNITKEGRGLTDTFKQKLLNITPPKDLKQLQSILGLLNFARNFIPNYSELVKPLYTIVANANGKFISWTEDNSNQLQHIISVLNQADNLEERNPETRLIIKVNSSPSAGYIRYYNEGSKRPIMYVNYIFSKAEAKFTQTEKLLTTMHKGLIKAMDLAMGQEILVYSPIVSMTKIQRTPLPERKALPVRWITWMTYLEDPRIQFHYDKSLPELQQIPNVTEDVIAKTKHPSEFAMVFYTDGSAIKHPDVNKSHSAGMGIAQVQFIPEYKIVHQWSIPLGDHTAQLAEIAAVEFACKKALKISGPVLIVTDSFYVAESANKELPYWKSNGFLNNKKKPLRHVSKWKSIAECLQLKPDIIIMHEKGHQQPMTTLHTEGNNLADKLATQGSYVVHAGKRTADGSEFEKRTADGSEFESPKKKAKVE

SEQ ID NO: 7663 - protein, 2122 aa, synthetic construct
MPAAKRVKLDGGDKKYSIGLDIGTNSVGWAVITDEYKVPSKKFKVLGNTDRHSIKKNLIGALLFDSGETAEATRLKRTARRRYTRRKNRICYLQEIFSNEMAKVDDSFFHRLEESFLVEEDKKHERHPIFGNIVDEVAYHEKYPTIYHLRKKLVDSTDKADLRLIYLALAHMIKFRGHFLIEGDLNPDNSDVDKLFIQLVQTYNQLFEENPINASGVDAKAILSARLSKSRRLENLIAQLPGEKKNGLFGNLIALSLGLTPNFKSNFDLAEDAKLQLSKDTYDDDLDNLLAQIGDQYADLFLAAKNLSDAILLSDILRVNTEITKAPLSASMIKRYDEHHQDLTLLKALVRQQLPEKYKEIFFDQSKNGYAGYIDGGASQEEFYKFIKPILEKMDGTEELLVKLNREDLLRKQRTFDNGSIPHQIHLGELHAILRRQEDFYPFLKDNREKIEKILTFRIPYYVGPLARGNSRFAWMTRKSEETITPWNFEEVVDKGASAQSFIERMTNFDKNLPNEKVLPKHSLLYEYFTVYNELTKVKYVTEGMRKPAFLSGEQKKAIVDLLFKTNRKVTVKQLKEDYFKKIECFDSVEISGVEDRFNASLGTYHDLLKIIKDKDFLDNEENEDILEDIVLTLTLFEDREMIEERLKTYAHLFDDKVMKQLKRRRYTGWGRLSRKLINGIRDKQSGKTILDFLKSDGFANRNFMQLIHDDSLTFKEDIQKAQVSGQGDSLHEHIANLAGSPAIKKGILQTVKVVDELVKVMGRHKPENIVIEMARENQTTQKGQKNSRERMKRIEEGIKELGSQILKEHPVENTQLQNEKLYLYYLQNGRDMYVDQELDINRLSDYDVDHIVPQSFLKDDSIDNKVLTRSDKARGKSDNVPSEEVVKKMKNYWRQLLNAKLITQRKFDNLTKAERGGLSELDKAGFIKRQLVETRQITKHVAQILDSRMNTKYDENDKLIREVKVITLKSKLVSDFRKDFQFYKVREINNYHHAHDAYLNAVVGTALIKKYPKLESEFVYGDYKVYDVRKMIAKSEQEIGKATAKYFFYSNIMNFFKTEITLANGEIRKRPLIETNGETGEIVWDKGRDFATVRKVLSMPQVNIVKKTEVQTGGFSKESILPKRNSDKLIARKKDWDPKKYGGFDSPTVAYSVLVVAKVEKGKSKKLKSVKELLGITIMERSSFEKNPIDFLEAKGYKEVKKDLIIKLPKYSLFELENGRKRMLASAGELQKGNELALPSKYVNFLYLASHYEKLKGSPEDNEQKQLFVEQHKHYLDEIIEQISEFSKRVILADANLDKVLSAYNKHRDKPIREQAENIIHLFTLTNLGAPAAFKYFDTTIDRKRYTSTKEVLDATLIHQSITGLYETRIDLSQLGGDGGAEAAAKEAAAKEAAAKEAAAKALEAEAAAKEAAAKEAAAKEAAAKAGGVPWLMKKPLQLTVLVPLHEYQERLLQQTALPKEQKELLQKLFLKYDALWQHWENQVGHRRIKPHNIATGTLAPRPQKQYPINPKAKPSIQIVIDDLLKQGVLIQQNSTMNTPVYPVPKPDGKWRMVLDYREVNKTIPLIAAQNQHSAGILSSIYRGKYKTTLDLTNGFWAHPITPESYWLTAFTWQGKQYCWTRLPQGFLNSPALFNADVVDLLKEIPNVQAYVDDIYISHDDPQEHLEQLEKIFSILLNAGYVVSLKKSEIAQREVEFLGFNITKEGRGLTDTFKQKLLNITPPKDLKQLQSILGLLNFARNFIPNYSELVKPLYTIVAPANGKFISWTEDNSNQLQHIISVLNQADNLEERNPETRLIIKVNSSPSAGYIRYYNEGSKRPIMYVNYIFSKAEAKFTQTEKLLTTMHKGLIKAMDLAMGQEILVYSPIVSMTKIQRTPLPERKALPVRWITWMTYLEDPRIQFHYDKSLPELQQIPNVTEDVIAKTKHPSEFAMVFYTDGSAIKHPDVNKSHSAGMGIAQVQFIPEYKIVHQWSIPLGDHTAQLAEIAAVEFACKKALKISGPVLIVTDSFYVAESANKELPYWKSNGFLNNKKKPLRHVSKWKSIAECLQLKPDIIIMHEKGHQQPMTTLHTEGNNLADKLATQGSYVVHAGKRTADGSEFEKRTADGSEFESPKKKAKVE

SEQ ID NO: 7664 - protein, 2122 aa, synthetic construct
MPAAKRVKLDGGDKKYSIGLDIGTNSVGWAVITDEYKVPSKKFKVLGNTDRHSIKKNLIGALLFDSGETAEATRLKRTARRRYTRRKNRICYLQEIFSNEMAKVDDSFFHRLEESFLVEEDKKHERHPIFGNIVDEVAYHEKYPTIYHLRKKLVDSTDKADLRLIYLALAHMIKFRGHFLIEGDLNPDNSDVDKLFIQLVQTYNQLFEENPINASGVDAKAILSARLSKSRRLENLIAQLPGEKKNGLFGNLIALSLGLTPNFKSNFDLAEDAKLQLSKDTYDDDLDNLLAQIGDQYADLFLAAKNLSDAILLSDILRVNTEITKAPLSASMIKRYDEHHQDLTLLKALVRQQLPEKYKEIFFDQSKNGYAGYIDGGASQEEFYKFIKPILEKMDGTEELLVKLNREDLLRKQRTFDNGSIPHQIHLGELHAILRRQEDFYPFLKDNREKIEKILTFRIPYYVGPLARGNSRFAWMTRKSEETITPWNFEEVVDKGASAQSFIERMTNFDKNLPNEKVLPKHSLLYEYFTVYNELTKVKYVTEGMRKPAFLSGEQKKAIVDLLFKTNRKVTVKQLKEDYFKKIECFDSVEISGVEDRFNASLGTYHDLLKIIKDKDFLDNEENEDILEDIVLTLTLFEDREMIEERLKTYAHLFDDKVMKQLKRRRYTGWGRLSRKLINGIRDKQSGKTILDFLKSDGFANRNFMQLIHDDSLTFKEDIQKAQVSGQGDSLHEHIANLAGSPAIKKGILQTVKVVDELVKVMGRHKPENIVIEMARENQTTQKGQKNSRERMKRIEEGIKELGSQILKEHPVENTQLQNEKLYLYYLQNGRDMYVDQELDINRLSDYDVDHIVPQSFLKDDSIDNKVLTRSDKARGKSDNVPSEEVVKKMKNYWRQLLNAKLITQRKFDNLTKAERGGLSELDKAGFIKRQLVETRQITKHVAQILDSRMNTKYDENDKLIREVKVITLKSKLVSDFRKDFQFYKVREINNYHHAHDAYLNAVVGTALIKKYPKLESEFVYGDYKVYDVRKMIAKSEQEIGKATAKYFFYSNIMNFFKTEITLANGEIRKRPLIETNGETGEIVWDKGRDFATVRKVLSMPQVNIVKKTEVQTGGFSKESILPKRNSDKLIARKKDWDPKKYGGFDSPTVAYSVLVVAKVEKGKSKKLKSVKELLGITIMERSSFEKNPIDFLEAKGYKEVKKDLIIKLPKYSLFELENGRKRMLASAGELQKGNELALPSKYVNFLYLASHYEKLKGSPEDNEQKQLFVEQHKHYLDEIIEQISEFSKRVILADANLDKVLSAYNKHRDKPIREQAENIIHLFTLTNLGAPAAFKYFDTTIDRKRYTSTKEVLDATLIHQSITGLYETRIDLSQLGGDGGAEAAAKEAAAKEAAAKEAAAKALEAEAAAKEAAAKEAAAKEAAAKAGGVPWLMKKPLQLTVLVPLHEYQERLLQQTALPKEQKELLQKLFLKYDALWQHWENQVGHRRIKPHNIATGTLAPRPQKQYPINPKAKPSIQIVIDDLLKQGVLIQQNSTMNTPVYPVPKPDGKWRMVLDYREVNKTIPLIAAQNQHSAGILSSIYRGKYKTTLDLTNGFWAHPITPESYWLTAFTWQGKQYCWTRLPQGFLNSPALFNADVVDLLKEIPNVQAYVDDIYISHDDPQEHLEQLEKIFSILLNAGYVVSLKKSEIAQREVEFLGFNITKEGRGLTDTFKQKLLNITPPKDLKQLQSILGKLNFARNFIPNYSELVKPLYTIVAPANGKFISWTEDNSNQLQHIISVLNQADNLEERNPETRLIIKVNSSPSAGYIRYYNEGSKRPIMYVNYIFSKAEAKFTQTEKLLTTMHKGLIKAMDLAMGQEILVYSPIVSMTKIQRTPLPERKALPVRWITWMTYLEDPRIQFHYDKSLPELQQIPNVTEDVIAKTKHPSEFAMVFYTDGSAIKHPDVNKSHSAGMGIAQVQFIPEYKIVHQWSIPLGDHTAQLAEIAAVEFACKKALKISGPVLIVTDSFYVAESANKELPYWKSNGFLNNKKKPLRHVSKWKSIAECLQLKPDIIIMHEKGHQQPMTTLHTEGNNLADKLATQGSYVVHAGKRTADGSEFEKRTADGSEFESPKKKAKVE

SEQ ID NO: 7665 - protein, 2211 aa, synthetic construct
MPAAKRVKLDGGDKKYSIGLDIGTNSVGWAVITDEYKVPSKKFKVLGNTDRHSIKKNLIGALLFDSGETAEATRLKRTARRRYTRRKNRICYLQEIFSNEMAKVDDSFFHRLEESFLVEEDKKHERHPIFGNIVDEVAYHEKYPTIYHLRKKLVDSTDKADLRLIYLALAHMIKFRGHFLIEGDLNPDNSDVDKLFIQLVQTYNQLFEENPINASGVDAKAILSARLSKSRRLENLIAQLPGEKKNGLFGNLIALSLGLTPNFKSNFDLAEDAKLQLSKDTYDDDLDNLLAQIGDQYADLFLAAKNLSDAILLSDILRVNTEITKAPLSASMIKRYDEHHQDLTLLKALVRQQLPEKYKEIFFDQSKNGYAGYIDGGASQEEFYKFIKPILEKMDGTEELLVKLNREDLLRKQRTFDNGSIPHQIHLGELHAILRRQEDFYPFLKDNREKIEKILTFRIPYYVGPLARGNSRFAWMTRKSEETITPWNFEEVVDKGASAQSFIERMTNFDKNLPNEKVLPKHSLLYEYFTVYNELTKVKYVTEGMRKPAFLSGEQKKAIVDLLFKTNRKVTVKQLKEDYFKKIECFDSVEISGVEDRFNASLGTYHDLLKIIKDKDFLDNEENEDILEDIVLTLTLFEDREMIEERLKTYAHLFDDKVMKQLKRRRYTGWGRLSRKLINGIRDKQSGKTILDFLKSDGFANRNFMQLIHDDSLTFKEDIQKAQVSGQGDSLHEHIANLAGSPAIKKGILQTVKVVDELVKVMGRHKPENIVIEMARENQTTQKGQKNSRERMKRIEEGIKELGSQILKEHPVENTQLQNEKLYLYYLQNGRDMYVDQELDINRLSDYDVDHIVPQSFLKDDSIDNKVLTRSDKARGKSDNVPSEEVVKKMKNYWRQLLNAKLITQRKFDNLTKAERGGLSELDKAGFIKRQLVETRQITKHVAQILDSRMNTKYDENDKLIREVKVITLKSKLVSDFRKDFQFYKVREINNYHHAHDAYLNAVVGTALIKKYPKLESEFVYGDYKVYDVRKMIAKSEQEIGKATAKYFFYSNIMNFFKTEITLANGEIRKRPLIETNGETGEIVWDKGRDFATVRKVLSMPQVNIVKKTEVQTGGFSKESILPKRNSDKLIARKKDWDPKKYGGFDSPTVAYSVLVVAKVEKGKSKKLKSVKELLGITIMERSSFEKNPIDFLEAKGYKEVKKDLIIKLPKYSLFELENGRKRMLASAGELQKGNELALPSKYVNFLYLASHYEKLKGSPEDNEQKQLFVEQHKHYLDEIIEQISEFSKRVILADANLDKVLSAYNKHRDKPIREQAENIIHLFTLTNLGAPAAFKYFDTTIDRKRYTSTKEVLDATLIHQSITGLYETRIDLSQLGGDGGAEAAAKEAAAKEAAAKEAAAKALEAEAAAKEAAAKEAAAKEAAAKAGGMDPLQLLQPLEAEIKGTKLKAHWNSGATITCVPEAFLEDERPIQTMLIKTIHGEKQQDVYYLTFKVQGRKVEAEVLASPYDYILLNPSDVPWLMKKPLQLTVLVPLHEYQERLLQQTALPKEQKELLQKLFLKYDALWQHWENQVGHRRIKPHNIATGTLAPRPQKQYPINPKAKPSIQIVIDDLLKQGVLIQQNSTMNTPVYPVPKPDGKWRMVLDYREVNKTIPLIAAQNQHSAGILSSIYRGKYKTTLDLTNGFWAHPITPESYWLTAFTWQGKQYCWTRLPQGFLNSPALFNADVVDLLKEIPNVQAYVDDIYISHDDPQEHLEQLEKIFSILLNAGYVVSLKKSEIAQREVEFLGFNITKEGRGLTDTFKQKLLNITPPKDLKQLQSILGLLNFARNFIPNYSELVKPLYTIVAPANGKFISWTEDNSNQLQHIISVLNQADNLEERNPETRLIIKVNSSPSAGYIRYYNEGSKRPIMYVNYIFSKAEAKFTQTEKLLTTMHKGLIKAMDLAMGQEILVYSPIVSMTKIQRTPLPERKALPVRWITWMTYLEDPRIQFHYDKSLPELQQIPNVTEDVIAKTKHPSEFAMVFYTDGSAIKHPDVNKSHSAGMGIAQVQFIPEYKIVHQWSIPLGDHTAQLAEIAAVEFACKKALKISGPVLIVTDSFYVAESANKELPYWKSNGFLNNKKKPLRHVSKWKSIAECLQLKPDIIIMHEKGHQQPMTTLHTEGNNLADKLATQGSYVVHAGKRTADGSEFEKRTADGSEFESPKKKAKVE

SEQ ID NO: 7666 - protein, 2122 aa, synthetic construct
MPAAKRVKLDGGDKKYSIGLDIGTNSVGWAVITDEYKVPSKKFKVLGNTDRHSIKKNLIGALLFDSGETAEATRLKRTARRRYTRRKNRICYLQEIFSNEMAKVDDSFFHRLEESFLVEEDKKHERHPIFGNIVDEVAYHEKYPTIYHLRKKLVDSTDKADLRLIYLALAHMIKFRGHFLIEGDLNPDNSDVDKLFIQLVQTYNQLFEENPINASGVDAKAILSARLSKSRRLENLIAQLPGEKKNGLFGNLIALSLGLTPNFKSNFDLAEDAKLQLSKDTYDDDLDNLLAQIGDQYADLFLAAKNLSDAILLSDILRVNTEITKAPLSASMIKRYDEHHQDLTLLKALVRQQLPEKYKEIFFDQSKNGYAGYIDGGASQEEFYKFIKPILEKMDGTEELLVKLNREDLLRKQRTFDNGSIPHQIHLGELHAILRRQEDFYPFLKDNREKIEKILTFRIPYYVGPLARGNSRFAWMTRKSEETITPWNFEEVVDKGASAQSFIERMTNFDKNLPNEKVLPKHSLLYEYFTVYNELTKVKYVTEGMRKPAFLSGEQKKAIVDLLFKTNRKVTVKQLKEDYFKKIECFDSVEISGVEDRFNASLGTYHDLLKIIKDKDFLDNEENEDILEDIVLTLTLFEDREMIEERLKTYAHLFDDKVMKQLKRRRYTGWGRLSRKLINGIRDKQSGKTILDFLKSDGFANRNFMQLIHDDSLTFKEDIQKAQVSGQGDSLHEHIANLAGSPAIKKGILQTVKVVDELVKVMGRHKPENIVIEMARENQTTQKGQKNSRERMKRIEEGIKELGSQILKEHPVENTQLQNEKLYLYYLQNGRDMYVDQELDINRLSDYDVDHIVPQSFLKDDSIDNKVLTRSDKARGKSDNVPSEEVVKKMKNYWRQLLNAKLITQRKFDNLTKAERGGLSELDKAGFIKRQLVETRQITKHVAQILDSRMNTKYDENDKLIREVKVITLKSKLVSDFRKDFQFYKVREINNYHHAHDAYLNAVVGTALIKKYPKLESEFVYGDYKVYDVRKMIAKSEQEIGKATAKYFFYSNIMNFFKTEITLANGEIRKRPLIETNGETGEIVWDKGRDFATVRKVLSMPQVNIVKKTEVQTGGFSKESILPKRNSDKLIARKKDWDPKKYGGFDSPTVAYSVLVVAKVEKGKSKKLKSVKELLGITIMERSSFEKNPIDFLEAKGYKEVKKDLIIKLPKYSLFELENGRKRMLASAGELQKGNELALPSKYVNFLYLASHYEKLKGSPEDNEQKQLFVEQHKHYLDEIIEQISEFSKRVILADANLDKVLSAYNKHRDKPIREQAENIIHLFTLTNLGAPAAFKYFDTTIDRKRYTSTKEVLDATLIHQSITGLYETRIDLSQLGGDGGAEAAAKEAAAKEAAAKEAAAKALEAEAAAKEAAAKEAAAKEAAAKAGGIPWLMKKPLQLTTLVPLQEYEERLLKQTMLTGSYKEKLQSLFLKYDALWQHWENQVGHRRIKPHHIATGTVNPRPQKQYPINPKAKASIQTVINDLLKQGVLIQQNSIMNTPVYPVPKPDGKWRMVLDYREVNKTIPLIAAQNQHSAGILSSIFRGKYKTTLDLSNGFWAHSITPESYWLTAFTWLGQQYCWTRLPQGFLNSPALFNADVVDLLKEVPNVQVYVDDIYISHDDPREHLEQLEKVFSLLLNAGYVVSLKKSEIAQHEVEFLGFNITKEGRGLTETFKQKLLNITPPRDLKQLQSILGLLNFARNFIPNFSELVKPLYNIIATAPGKYITWTTDNSQQLQNIISMLNSAENLEERNPEVRLIMKVNTSPSAGYIRFYNEFAKRPIMYLNYVYTKAEVKFTNTEKLLTTIHKGLIKALDLGMGQEILVYSPIVSMTKIQKTPLPERKALPIRWITWMSYLEDPRIQFHYDKTLPELQQVPTVTDDIIAKIKHPSEFSMVFYTDGSAIKHPNVNKSHNAGMGIAQVQFKPEFTVINTWSIPLGDHTAQLAEVAAVEFACKKALKIDGPVLIVTDSFYVAESVNKELPYWQSNGFFNNKKKPLKHVSKWKSIADCIQLKPDIIIIHEKGHQPTASTFHTEGNNLADKLATQGSYVVNAGKRTADGSEFEKRTADGSEFESPKKKAKVE

SEQ ID NO: 7667 - protein, 2122 aa, synthetic construct; identical to SEQ ID NO: 4541

SEQ ID NO: 7668 - protein, 2102 aa, synthetic construct
MPAAKRVKLDGGDKKYSIGLDIGTNSVGWAVITDEYKVPSKKFKVLGNTDRHSIKKNLIGALLFDSGETAEATRLKRTARRRYTRRKNRICYLQEIFSNEMAKVDDSFFHRLEESFLVEEDKKHERHPIFGNIVDEVAYHEKYPTIYHLRKKLVDSTDKADLRLIYLALAHMIKFRGHFLIEGDLNPDNSDVDKLFIQLVQTYNQLFEENPINASGVDAKAILSARLSKSRRLENLIAQLPGEKKNGLFGNLIALSLGLTPNFKSNFDLAEDAKLQLSKDTYDDDLDNLLAQIGDQYADLFLAAKNLSDAILLSDILRVNTEITKAPLSASMIKRYDEHHQDLTLLKALVRQQLPEKYKEIFFDQSKNGYAGYIDGGASQEEFYKFIKPILEKMDGTEELLVKLNREDLLRKQRTFDNGSIPHQIHLGELHAILRRQEDFYPFLKDNREKIEKILTFRIPYYVGPLARGNSRFAWMTRKSEETITPWNFEEVVDKGASAQSFIERMTNFDKNLPNEKVLPKHSLLYEYFTVYNELTKVKYVTEGMRKPAFLSGEQKKAIVDLLFKTNRKVTVKQLKEDYFKKIECFDSVEISGVEDRFNASLGTYHDLLKIIKDKDFLDNEENEDILEDIVLTLTLFEDREMIEERLKTYAHLFDDKVMKQLKRRRYTGWGRLSRKLINGIRDKQSGKTILDFLKSDGFANRNFMQLIHDDSLTFKEDIQKAQVSGQGDSLHEHIANLAGSPAIKKGILQTVKVVDELVKVMGRHKPENIVIEMARENQTTQKGQKNSRERMKRIEEGIKELGSQILKEHPVENTQLQNEKLYLYYLQNGRDMYVDQELDINRLSDYDVDHIVPQSFLKDDSIDNKVLTRSDKARGKSDNVPSEEVVKKMKNYWRQLLNAKLITQRKFDNLTKAERGGLSELDKAGFIKRQLVETRQITKHVAQILDSRMNTKYDENDKLIREVKVITLKSKLVSDFRKDFQFYKVREINNYHHAHDAYLNAVVGTALIKKYPKLESEFVYGDYKVYDVRKMIAKSEQEIGKATAKYFFYSNIMNFFKTEITLANGEIRKRPLIETNGETGEIVWDKGRDFATVRKVLSMPQVNIVKKTEVQTGGFSKESILPKRNSDKLIARKKDWDPKKYGGFDSPTVAYSVLVVAKVEKGKSKKLKSVKELLGITIMERSSFEKNPIDFLEAKGYKEVKKDLIIKLPKYSLFELENGRKRMLASAGELQKGNELALPSKYVNFLYLASHYEKLKGSPEDNEQKQLFVEQHKHYLDEIIEQISEFSKRVILADANLDKVLSAYNKHRDKPIREQAENIIHLFTLTNLGAPAAFKYFDTTIDRKRYTSTKEVLDATLIHQSITGLYETRIDLSQLGGDGGGGGGSEAAAKGGGGSGGTAPLEEEYRLFLEAPIQNVTLLEQWKREIPKVWAEINPPGLASTQAPIHVQLLSTALPVRVRQYPITLEAKRSLRETIRKFRAAGILRPVHSPWNTPLLPVRKSGTSEYRMVQDLREVNKRVETIHPTVPNPYTLLSLLPPDRIWYSVLDLKDAFFCIPLAPESQLIFAFEWADAEEGESGQLTWTRLPQGFKNSPTLFDEALNRDLQGFRLDHPSVSLLQYVDDLLIAADTQAACLSATRDLLMTLAELGYRVSGKKAQLCQEEVTYLGFKIHKGSRSLSNSRTQAILQIPVPKTKRQVREFLGTIGYCRLWIPGFAELAQPLYAATRGGNDPLVWGEKEEEAFQSLKLALTQPPALALPSLDKPFQLFVEETSGAAKGVLTQALGPWKRPVAYLSKRLDPVAAGWPRCLRAIAAAALLTREASKLTFGQDIEITSSHNLESLLRSPPDKWLTNARITQYQVLLLDPPRVRFKQTAALNPATLLPETDDTLPIHHCLDTLDSLTSTRPDLTDQPLAQAEATLFTDGSSYIRDGKRYAGAAVVTLDSVIWAEPLPIGTSAQKAELIALTKALEWSKDKSVNIYTDSRYAFATLHVHGMIYRERGLLTAGGKAIKNAPEILALLTAVWLPKRVAVMHCKGHQKDDAPTSTGNRRADEVAREVAIRPLSTQATISAGKRTADGSEFEKRTADGSEFESPKKKAKVE

SEQ ID NO: 7669 - protein, 2177 aa, synthetic construct
MPAAKRVKLDGGDKKYSIGLDIGTNSVGWAVITDEYKVPSKKFKVLGNTDRHSIKKNLIGALLFDSGETAEATRLKRTARRRYTRRKNRICYLQEIFSNEMAKVDDSFFHRLEESFLVEEDKKHERHPIFGNIVDEVAYHEKYPTIYHLRKKLVDSTDKADLRLIYLALAHMIKFRGHFLIEGDLNPDNSDVDKLFIQLVQTYNQLFEENPINASGVDAKAILSARLSKSRRLENLIAQLPGEKKNGLFGNLIALSLGLTPNFKSNFDLAEDAKLQLSKDTYDDDLDNLLAQIGDQYADLFLAAKNLSDAILLSDILRVNTEITKAPLSASMIKRYDEHHQDLTLLKALVRQQLPEKYKEIFFDQSKNGYAGYIDGGASQEEFYKFIKPILEKMDGTEELLVKLNREDLLRKQRTFDNGSIPHQIHLGELHAILRRQEDFYPFLKDNREKIEKILTFRIPYYVGPLARGNSRFAWMTRKSEETITPWNFEEVVDKGASAQSFIERMTNFDKNLPNEKVLPKHSLLYEYFTVYNELTKVKYVTEGMRKPAFLSGEQKKAIVDLLFKTNRKVTVKQLKEDYFKKIECFDSVEISGVEDRFNASLGTYHDLLKIIKDKDFLDNEENEDILEDIVLTLTLFEDREMIEERLKTYAHLFDDKVMKQLKRRRYTGWGRLSRKLINGIRDKQSGKTILDFLKSDGFANRNFMQLIHDDSLTFKEDIQKAQVSGQGDSLHEHIANLAGSPAIKKGILQTVKVVDELVKVMGRHKPENIVIEMARENQTTQKGQKNSRERMKRIEEGIKELGSQILKEHPVENTQLQNEKLYLYYLQNGRDMYVDQELDINRLSDYDVDHIVPQSFLKDDSIDNKVLTRSDKARGKSDNVPSEEVVKKMKNYWRQLLNAKLITQRKFDNLTKAERGGLSELDKAGFIKRQLVETRQITKHVAQILDSRMNTKYDENDKLIREVKVITLKSKLVSDFRKDFQFYKVREINNYHHAHDAYLNAVVGTALIKKYPKLESEFVYGDYKVYDVRKMIAKSEQEIGKATAKYFFYSNIMNFFKTEITLANGEIRKRPLIETNGETGEIVWDKGRDFATVRKVLSMPQVNIVKKTEVQTGGFSKESILPKRNSDKLIARKKDWDPKKYGGFDSPTVAYSVLVVAKVEKGKSKKLKSVKELLGITIMERSSFEKNPIDFLEAKGYKEVKKDLIIKLPKYSLFELENGRKRMLASAGELQKGNELALPSKYVNFLYLASHYEKLKGSPEDNEQKQLFVEQHKHYLDEIIEQISEFSKRVILADANLDKVLSAYNKHRDKPIREQAENIIHLFTLTNLGAPAAFKYFDTTIDRKRYTSTKEVLDATLIHQSITGLYETRIDLSQLGGDGGGGGGSEAAAKGGGGSGGMDLLKPLTVERKGVKIKGYWNSQADITCVPKDLLQGEEPVRQQNVTTIHGTQEGDVYYVNLKIDGRRINTEVIGTTLDYAIITPGDVPWILKKPLELTIKLDLEEQQGTLLNNSILSKKGKEELKQLFEKYSALWQSWENQVGHRRIRPHKIATGTVKPTPQKQYHINPKAKPDIQIVINDLLKQGVLIQKESTMNTPVYPVPKPNGRWRMVLDYRAVNKVTPLIAVQNQHSYGILGSLFKGRYKTTIDLSNGFWAHPIVPEDYWITAFTWQGKQYCWTVLPQGFLNSPGLFNGDVVDLLQGIPNVEVYVDDVYISHDSEKEHLEYLDILFNRLKEAGYIISLKKSNIANSIVDFLGFQITNEGRGLTDTFKEKLENITAPTTLKQLQSILGLLNFARNFIPDFTELIAPLYALIPKSPKNYVPWQIEHSTTLETLITKLNGAEYLQGRKGDKTLIMKVNASYTTGYIRYYNEGEKKPISYVSIVFSKTELKFTELEKLLTTVHKGLLKALDLSMGQNIHVYSPIVSMQNIQKTPQTAKKALASRWLSWLSYLEDPRIRFFYDPQMPALKDLPAVDTGKDNKKHPSNFQHIFYTDGSAITSPTKEGHLNAGMGIVYFINKDGNLQKQQEWSISLGNHTAQFAEIAAFEFALKKCLPLGGNILVVTDSNYVAKAYNEELDVWASNGFVNNRKKPLKHISKWKSVADLKRLRPDVVVTHEPGHQKLDSSPHAYGNNLADQLATQASFKVHAGKRTADGSEFEKRTADGSEFESPKKKAKVE

SEQ ID NO: 7670 - protein, 2099 aa, synthetic construct
MPAAKRVKLDGGDKKYSIGLDIGTNSVGWAVITDEYKVPSKKFKVLGNTDRHSIKKNLIGALLFDSGETAEATRLKRTARRRYTRRKNRICYLQEIFSNEMAKVDDSFFHRLEESFLVEEDKKHERHPIFGNIVDEVAYHEKYPTIYHLRKKLVDSTDKADLRLIYLALAHMIKFRGHFLIEGDLNPDNSDVDKLFIQLVQTYNQLFEENPINASGVDAKAILSARLSKSRRLENLIAQLPGEKKNGLFGNLIALSLGLTPNFKSNFDLAEDAKLQLSKDTYDDDLDNLLAQIGDQYADLFLAAKNLSDAILLSDILRVNTEITKAPLSASMIKRYDEHHQDLTLLKALVRQQLPEKYKEIFFDQSKNGYAGYIDGGASQEEFYKFIKPILEKMDGTEELLVKLNREDLLRKQRTFDNGSIPHQIHLGELHAILRRQEDFYPFLKDNREKIEKILTFRIPYYVGPLARGNSRFAWMTRKSEETITPWNFEEVVDKGASAQSFIERMTNFDKNLPNEKVLPKHSLLYEYFTVYNELTKVKYVTEGMRKPAFLSGEQKKAIVDLLFKTNRKVTVKQLKEDYFKKIECFDSVEISGVEDRFNASLGTYHDLLKIIKDKDFLDNEENEDILEDIVLTLTLFEDREMIEERLKTYAHLFDDKVMKQLKRRRYTGWGRLSRKLINGIRDKQSGKTILDFLKSDGFANRNFMQLIHDDSLTFKEDIQKAQVSGQGDSLHEHIANLAGSPAIKKGILQTVKVVDELVKVMGRHKPENIVIEMARENQTTQKGQKNSRERMKRIEEGIKELGSQILKEHPVENTQLQNEKLYLYYLQNGRDMYVDQELDINRLSDYDVDHIVPQSFLKDDSIDNKVLTRSDKARGKSDNVPSEEVVKKMKNYWRQLLNAKLITQRKFDNLTKAERGGLSELDKAGFIKRQLVETRQITKHVAQILDSRMNTKYDENDKLIREVKVITLKSKLVSDFRKDFQFYKVREINNYHHAHDAYLNAVVGTALIKKYPKLESEFVYGDYKVYDVRKMIAKSEQEIGKATAKYFFYSNIMNFFKTEITLANGEIRKRPLIETNGETGEIVWDKGRDFATVRKVLSMPQVNIVKKTEVQTGGFSKESILPKRNSDKLIARKKDWDPKKYGGFDSPTVAYSVLVVAKVEKGKSKKLKSVKELLGITIMERSSFEKNPIDFLEAKGYKEVKKDLIIKLPKYSLFELENGRKRMLASAGELQKGNELALPSKYVNFLYLASHYEKLKGSPEDNEQKQLFVEQHKHYLDEIIEQISEFSKRVILADANLDKVLSAYNKHRDKPIREQAENIIHLFTLTNLGAPAAFKYFDTTIDRKRYTSTKEVLDATLIHQSITGLYETRIDLSQLGGDGGGGGGSEAAAKGGGGSGGTLQLEEEYRLFEPESTQKQEMDIWLKNFPQAWAETGGMGTAHCQAPVLIQLKATATPISIRQYPMPHEAYQGIKPHIRRMLDQGILKPCQSPWNTPLLPVKKPGTEDYRPVQDLREVNKRVEDIHPTVPNPYNLLSTLPPSHPWYTVLDLKDAFFCLRLHSESQLLFAFEWRDPEIGLSGQLTWTRLPQGFKNSPTLFNEALHSDLADFRVRYPALVLLQYVDDLLLAAATRTECLEGTKALLETLGNKGYRASAKKAQICLQEVTYLGYSLKDGQRWLTKARKEAILSIPVPKNSRQVREFLGTAGYCRLWIPGFAELAAPLYPLTRPGTLFQWGTEQQLAFEDIKKALLSSPALGLPDITKPFELFIDENSGFAKGVLVQKLGPWKRPVAYLSKKLDTVASGWPPCLRMVAAIAILVKDAGKLTLGQPLTILTSHPVEALVRQPPNKWLSNARMTHYQAMLLDAERVHFGPTVSLNPATLLPLPSGGNHHDCLQILAETHGTRPDLTDQPLPDADLTWYTDGSSFIRNGEREAGAAVTTESEVIWAAPLPPGTSAQRAELIALTQALKMAEGKKLTVYTDSRYAFATTHVHGEIYRRRGWLTSEGKEIKNKNEILALLEALFLPKRLSIIHCPGHQKGDSPQAKGNRLADDTAKKAATETHSSLTVLPAGKRTADGSEFEKRTADGSEFESPKKKAKVE

SEQ ID NO: 7671 - protein, 2180 aa, synthetic construct
MPAAKRVKLDGGDKKYSIGLDIGTNSVGWAVITDEYKVPSKKFKVLGNTDRHSIKKNLIGALLFDSGETAEATRLKRTARRRYTRRKNRICYLQEIFSNEMAKVDDSFFHRLEESFLVEEDKKHERHPIFGNIVDEVAYHEKYPTIYHLRKKLVDSTDKADLRLIYLALAHMIKFRGHFLIEGDLNPDNSDVDKLFIQLVQTYNQLFEENPINASGVDAKAILSARLSKSRRLENLIAQLPGEKKNGLFGNLIALSLGLTPNFKSNFDLAEDAKLQLSKDTYDDDLDNLLAQIGDQYADLFLAAKNLSDAILLSDILRVNTEITKAPLSASMIKRYDEHHQDLTLLKALVRQQLPEKYKEIFFDQSKNGYAGYIDGGASQEEFYKFIKPILEKMDGTEELLVKLNREDLLRKQRTFDNGSIPHQIHLGELHAILRRQEDFYPFLKDNREKIEKILTFRIPYYVGPLARGNSRFAWMTRKSEETITPWNFEEVVDKGASAQSFIERMTNFDKNLPNEKVLPKHSLLYEYFTVYNELTKVKYVTEGMRKPAFLSGEQKKAIVDLLFKTNRKVTVKQLKEDYFKKIECFDSVEISGVEDRFNASLGTYHDLLKIIKDKDFLDNEENEDILEDIVLTLTLFEDREMIEERLKTYAHLFDDKVMKQLKRRRYTGWGRLSRKLINGIRDKQSGKTILDFLKSDGFANRNFMQLIHDDSLTFKEDIQKAQVSGQGDSLHEHIANLAGSPAIKKGILQTVKVVDELVKVMGRHKPENIVIEMARENQTTQKGQKNSRERMKRIEEGIKELGSQILKEHPVENTQLQNEKLYLYYLQNGRDMYVDQELDINRLSDYDVDHIVPQSFLKDDSIDNKVLTRSDKARGKSDNVPSEEVVKKMKNYWRQLLNAKLITQRKFDNLTKAERGGLSELDKAGFIKRQLVETRQITKHVAQILDSRMNTKYDENDKLIREVKVITLKSKLVSDFRKDFQFYKVREINNYHHAHDAYLNAVVGTALIKKYPKLESEFVYGDYKVYDVRKMIAKSEQEIGKATAKYFFYSNIMNFFKTEITLANGEIRKRPLIETNGETGEIVWDKGRDFATVRKVLSMPQVNIVKKTEVQTGGFSKESILPKRNSDKLIARKKDWDPKKYGGFDSPTVAYSVLVVAKVEKGKSKKLKSVKELLGITIMERSSFEKNPIDFLEAKGYKEVKKDLIIKLPKYSLFELENGRKRMLASAGELQKGNELALPSKYVNFLYLASHYEKLKGSPEDNEQKQLFVEQHKHYLDEIIEQISEFSKRVILADANLDKVLSAYNKHRDKPIREQAENIIHLFTLTNLGAPAAFKYFDTTIDRKRYTSTKEVLDATLIHQSITGLYETRIDLSQLGGDGGGGGGSEAAAKGGGGSGGMNPLQLLQPLPAEIKGTKLLAHWNSGATITCIPESFLEDEQPIKKTLIKTIHGEKQQNVYYVTFKVKGRKVEAEVIASPYEYILLSPTDVPWLTQQPLQLTILVPLQEYQEKILSKTALPEDQKQQLKTLFVKYDNLWQHWENQVGHRKIRPHNIATGDYPPRPQKQYPINPKAKPSIQIVIDDLLKQGVLTPQNSTMNTPVYPVPKPDGRWRMVLDYREVNKTIPLTAAQNQHSAGILATIVRQKYKTTLDLANGFWAHPITPESYWLTAFTWQGKQYCWTRLPQGFLNSPALFNADVVDLLKEIPNVQVYVDDIYLSHDDPKEHVQQLEKVFQILLQAGYVVSLKKSEIGQKTVEFLGFNITKEGRGLTDTFKTKLLNITPPKDLKQLQSILGKLNFARNFIPNFAELVQPLYNLIAPAKGKYIEWSEENTKQLNMVIEALNTASNLEERLPEQRLVIKVNTSPSAGYVRYYNETGKKPIMYLNYVFSKAELKFSMLEKLLTTMHKALIKAMDLAMGQEILVYSPIVSMTKIQKTPLPERKALPIRWITWMTYLEDPRIQFHYDKTLPELKHIPDVYTSSQSPVKHPSQYEGVFYTDGSAIKSPDPTKSNNAGMGIVHATYKPEYQVLNQWSIPLGNHTAQMAEIAAVEFACKKALKIPGPVLVITDSFYVAESANKELPYWKSNGFVNNKKKPLKHISKWKSIAECLSMKPDITIQHEKGISLQIPVFILKGNALADKLATQGSYVVNAGKRTADGSEFEKRTADGSEFESPKKKAKVE

SEQ ID NO: 7672 - protein, 2098 aa, synthetic construct
MPAAKRVKLDGGDKKYSIGLDIGTNSVGWAVITDEYKVPSKKFKVLGNTDRHSIKKNLIGALLFDSGETAEATRLKRTARRRYTRRKNRICYLQEIFSNEMAKVDDSFFHRLEESFLVEEDKKHERHPIFGNIVDEVAYHEKYPTIYHLRKKLVDSTDKADLRLIYLALAHMIKFRGHFLIEGDLNPDNSDVDKLFIQLVQTYNQLFEENPINASGVDAKAILSARLSKSRRLENLIAQLPGEKKNGLFGNLIALSLGLTPNFKSNFDLAEDAKLQLSKDTYDDDLDNLLAQIGDQYADLFLAAKNLSDAILLSDILRVNTEITKAPLSASMIKRYDEHHQDLTLLKALVRQQLPEKYKEIFFDQSKNGYAGYIDGGASQEEFYKFIKPILEKMDGTEELLVKLNREDLLRKQRTFDNGSIPHQIHLGELHAILRRQEDFYPFLKDNREKIEKILTFRIPYYVGPLARGNSRFAWMTRKSEETITPWNFEEVVDKGASAQSFIERMTNFDKNLPNEKVLPKHSLLYEYFTVYNELTKVKYVTEGMRKPAFLSGEQKKAIVDLLFKTNRKVTVKQLKEDYFKKIECFDSVEISGVEDRFNASLGTYHDLLKIIKDKDFLDNEENEDILEDIVLTLTLFEDREMIEERLKTYAHLFDDKVMKQLKRRRYTGWGRLSRKLINGIRDKQSGKTILDFLKSDGFANRNFMQLIHDDSLTFKEDIQKAQVSGQGDSLHEHIANLAGSPAIKKGILQTVKVVDELVKVMGRHKPENIVIEMARENQTTQKGQKNSRERMKRIEEGIKELGSQILKEHPVENTQLQNEKLYLYYLQNGRDMYVDQELDINRLSDYDVDHIVPQSFLKDDSIDNKVLTRSDKARGKSDNVPSEEVVKKMKNYWRQLLNAKLITQRKFDNLTKAERGGLSELDKAGFIKRQLVETRQITKHVAQILDSRMNTKYDENDKLIREVKVITLKSKLVSDFRKDFQFYKVREINNYHHAHDAYLNAVVGTALIKKYPKLESEFVYGDYKVYDVRKMIAKSEQEIGKATAKYFFYSNIMNFFKTEITLANGEIRKRPLIETNGETGEIVWDKGRDFATVRKVLSMPQVNIVKKTEVQTGGFSKESILPKRNSDKLIARKKDWDPKKYGGFDSPTVAYSVLVVAKVEKGKSKKLKSVKELLGITIMERSSFEKNPIDFLEAKGYKEVKKDLIIKLPKYSLFELENGRKRMLASAGELQKGNELALPSKYVNFLYLASHYEKLKGSPEDNEQKQLFVEQHKHYLDEIIEQISEFSKRVILADANLDKVLSAYNKHRDKPIREQAENIIHLFTLTNLGAPAAFKYFDTTIDRKRYTSTKEVLDATLIHQSITGLYETRIDLSQLGGDGGGGGGSEAAAKGGGGSGGVLNLEEEYRLHEKPVPSSIDPSWLQLFPTVWAERAGMGLANQVPPVVVELRSGASPVAVRQYPMSKEAREGIRPHIQKFLDLGVLVPCRSPWNTPLLPVKKPGTNDYRPVQDLREINKRVQDIHPTVPNPYNLLSSLPPSYTWYSVLDLKDAFFCLRLHPNSQPLFAFEWKDPEKGNTGQLTWTRLPQGFKNSPTLFNEALHRDLAPFRALNPQVVLLQYVDDLLVAAPTYEDCKKGTQKLLQELSKLGYRVSAKKAQLCQREVTYLGYLLKEGKRWLTPARKATVMKIPVPTTPRQVREFLGKAGFCRLFIPGFASLAAPLYPLTKPSIPFIWTEEHQQAFDHIKKALLSAPALALPDLTKPFTLYIDERAGVARGVLTQTLGPWRRPVAYLSKKLDPVASGWPTCLKAVAAVALLLKDADKLTLGQNVTVIASHSLESIVRQPPDRWMTNARMTHYQSLLLNERVSFAPPAVLNPATLLPVESEATPVHRCSEILAEETGTRRDLEDQPLPGVPTWYTDGSSFITEGKRRAGAPIVDGKRTVWASSLPEGTSAQKAELVALTQALRLAEGKNINIYTDSRYAFATAHIHGAIYKQRGWLTSAGKDIKNKEEILALLEAIHLPRRVAIIHCPGHQRGSNPVATGNRRADEAAKQAALSTRVLAGTTKPAGKRTADGSEFEKRTADGSEFESPKKKAKVE

SEQ ID NO: 7673 - protein, 2017 aa, synthetic construct
MPAAKRVKLDGGDKKYSIGLDIGTNSVGWAVITDEYKVPSKKFKVLGNTDRHSIKKNLIGALLFDSGETAEATRLKRTARRRYTRRKNRICYLQEIFSNEMAKVDDSFFHRLEESFLVEEDKKHERHPIFGNIVDEVAYHEKYPTIYHLRKKLVDSTDKADLRLIYLALAHMIKFRGHFLIEGDLNPDNSDVDKLFIQLVQTYNQLFEENPINASGVDAKAILSARLSKSRRLENLIAQLPGEKKNGLFGNLIALSLGLTPNFKSNFDLAEDAKLQLSKDTYDDDLDNLLAQIGDQYADLFLAAKNLSDAILLSDILRVNTEITKAPLSASMIKRYDEHHQDLTLLKALVRQQLPEKYKEIFFDQSKNGYAGYIDGGASQEEFYKFIKPILEKMDGTEELLVKLNREDLLRKQRTFDNGSIPHQIHLGELHAILRRQEDFYPFLKDNREKIEKILTFRIPYYVGPLARGNSRFAWMTRKSEETITPWNFEEVVDKGASAQSFIERMTNFDKNLPNEKVLPKHSLLYEYFTVYNELTKVKYVTEGMRKPAFLSGEQKKAIVDLLFKTNRKVTVKQLKEDYFKKIECFDSVEISGVEDRFNASLGTYHDLLKIIKDKDFLDNEENEDILEDIVLTLTLFEDREMIEERLKTYAHLFDDKVMKQLKRRRYTGWGRLSRKLINGIRDKQSGKTILDFLKSDGFANRNFMQLIHDDSLTFKEDIQKAQVSGQGDSLHEHIANLAGSPAIKKGILQTVKVVDELVKVMGRHKPENIVIEMARENQTTQKGQKNSRERMKRIEEGIKELGSQILKEHPVENTQLQNEKLYLYYLQNGRDMYVDQELDINRLSDYDVDHIVPQSFLKDDSIDNKVLTRSDKARGKSDNVPSEEVVKKMKNYWRQLLNAKLITQRKFDNLTKAERGGLSELDKAGFIKRQLVETRQITKHVAQILDSRMNTKYDENDKLIREVKVITLKSKLVSDFRKDFQFYKVREINNYHHAHDAYLNAVVGTALIKKYPKLESEFVYGDYKVYDVRKMIAKSEQEIGKATAKYFFYSNIMNFFKTEITLANGEIRKRPLIETNGETGEIVWDKGRDFATVRKVLSMPQVNIVKKTEVQTGGFSKESILPKRNSDKLIARKKDWDPKKYGGFDSPTVAYSVLVVAKVEKGKSKKLKSVKELLGITIMERSSFEKNPIDFLEAKGYKEVKKDLIIKLPKYSLFELENGRKRMLASAGELQKGNELALPSKYVNFLYLASHYEKLKGSPEDNEQKQLFVEQHKHYLDEIIEQISEFSKRVILADANLDKVLSAYNKHRDKPIREQAENIIHLFTLTNLGAPAAFKYFDTTIDRKRYTSTKEVLDATLIHQSITGLYETRIDLSQLGGDGGGGGGSEAAAKGGGGSGGAVLGLEHLPRPPEISQFPLNPERLQALQHLVRKALEAGHIEPYTGPGNNPVFPVKKANGTWRFIHDLRATNSLTIDLSSSSPGPPDLSSLPTTLAHLQTIDLKDAFFQIPLPKQFQPYFAFTVPQQCNYGPGTRYAWRVLPQGFKNSPTLFQMQLAHILQPIRQAFPQCTILQYMDDILLASPSHADLQLLSEATMASLISHGLPVSENKTQQTPGTIKFLGQIISPNHLTYDAVPKVPIRSRWALPELQALLGEIQWVSKGTPTLRQPLHSLYCALQPHTDPRDQIYLNPSQVQSLVQLRQALSQNCRSRLVQTLPLLGAIMLTLTGTTTVVFQSKQQWPLVWLHAPLPHTSQCPWGQLLASAVLLLDKYTLQSYGLLCQTIHHNISTQTFNQFIQTSDHPSVPILLHHSHRFKNLGAQTGELWNTFLKTTAPLAPVKALMPVFTLSPVIINTAPCLFSDGSTSQAAYILWDKHILSQRSFPLPPPHKSAQRAELLGLLHGLSSARSWRCLNIFLDSKYLYHYLRTLALGTFQGRSSQAPFQALLPRLLSRKVVYLHHVRSHTNLPDPISRLNALTDALLITPVLQLAGKRTADGSEFEKRTADGSEFESPKKKAKVE

SEQ ID NO: 7674 - protein, 2100 aa, synthetic construct
MPAAKRVKLDGGDKKYSIGLDIGTNSVGWAVITDEYKVPSKKFKVLGNTDRHSIKKNLIGALLFDSGETAEATRLKRTARRRYTRRKNRICYLQEIFSNEMAKVDDSFFHRLEESFLVEEDKKHERHPIFGNIVDEVAYHEKYPTIYHLRKKLVDSTDKADLRLIYLALAHMIKFRGHFLIEGDLNPDNSDVDKLFIQLVQTYNQLFEENPINASGVDAKAILSARLSKSRRLENLIAQLPGEKKNGLFGNLIALSLGLTPNFKSNFDLAEDAKLQLSKDTYDDDLDNLLAQIGDQYADLFLAAKNLSDAILLSDILRVNTEITKAPLSASMIKRYDEHHQDLTLLKALVRQQLPEKYKEIFFDQSKNGYAGYIDGGASQEEFYKFIKPILEKMDGTEELLVKLNREDLLRKQRTFDNGSIPHQIHLGELHAILRRQEDFYPFLKDNREKIEKILTFRIPYYVGPLARGNSRFAWMTRKSEETITPWNFEEVVDKGASAQSFIERMTNFDKNLPNEKVLPKHSLLYEYFTVYNELTKVKYVTEGMRKPAFLSGEQKKAIVDLLFKTNRKVTVKQLKEDYFKKIECFDSVEISGVEDRFNASLGTYHDLLKIIKDKDFLDNEENEDILEDIVLTLTLFEDREMIEERLKTYAHLFDDKVMKQLKRRRYTGWGRLSRKLINGIRDKQSGKTILDFLKSDGFANRNFMQLIHDDSLTFKEDIQKAQVSGQGDSLHEHIANLAGSPAIKKGILQTVKVVDELVKVMGRHKPENIVIEMARENQTTQKGQKNSRERMKRIEEGIKELGSQILKEHPVENTQLQNEKLYLYYLQNGRDMYVDQELDINRLSDYDVDHIVPQSFLKDDSIDNKVLTRSDKARGKSDNVPSEEVVKKMKNYWRQLLNAKLITQRKFDNLTKAERGGLSELDKAGFIKRQLVETRQITKHVAQILDSRMNTKYDENDKLIREVKVITLKSKLVSDFRKDFQFYKVREINNYHHAHDAYLNAVVGTALIKKYPKLESEFVYGDYKVYDVRKMIAKSEQEIGKATAKYFFYSNIMNFFKTEITLANGEIRKRPLIETNGETGEIVWDKGRDFATVRKVLSMPQVNIVKKTEVQTGGFSKESILPKRNSDKLIARKKDWDPKKYGGFDSPTVAYSVLVVAKVEKGKSKKLKSVKELLGITIMERSSFEKNPIDFLEAKGYKEVKKDLIIKLPKYSLFELENGRKRMLASAGELQKGNELALPSKYVNFLYLASHYEKLKGSPEDNEQKQLFVEQHKHYLDEIIEQISEFSKRVILADANLDKVLSAYNKHRDKPIREQAENIIHLFTLTNLGAPAAFKYFDTTIDRKRYTSTKEVLDATLIHQSITGLYETRIDLSQLGGDGGGGGGSEAAAKGGGGSGGTLNLEDEYRLYETSAEPEVSPGSTWLSDFPQAWAETGGMGLAVRQAPLIIPLKATSTPVSIKQYPMSQEAKLGIKPHIQRLLDQGILVPCQSPWNTPLLPVKKPGTNDYRPVQDLREVNKRVEDIHPTVPNPYNLLSGLPPSHRWYTVLDLKDAFFCLRLHPTSQPLFAFEWRDPGMGISGQLTWTRLPQGFKNSPTLFNEALHRDLADFRIQHPDLILLQYVDDILLAATSELDCQQGTRALLLTLGNLGYRASAKKAQLCQKQVKYLGYLLKEGQRWLTEARKETVMGQPTPKTPRQLREFLGKAGFCRLFIPGFAEMAAPLYPLTKPGTLFNWGPDQQKAYQEIKQALLTAPALGLPDLTKPFELFVDEKQGYAKGVLTQKLGPWRRPVAYLSKKLDPVAAGWPPCLRMVAAIAVLRKDAGKLTMGQPLVILAPHAVEALVKQPPDRWLSNARMTHYQAMLLDTDRVQFGPVVALNPATLLPLPEEGAPHDCLEILAETHGTRPDLTDQPIPDADHTWYTDGSSFLQEGQRKAGAAVTTETEVIWARALPAGTSAQRAELIALTQALKMAEGKRLNVYTDSRYAFATAHIHGEIYRRRGWLTSEGREIKNKSEILALLKALFLPKRLSIIHCLGHQKGDSAEARGNRLADQAAREAAIKTPPDTSTLLAGKRTADGSEFEKRTADGSEFESPKKKAKVE

SEQ ID NO: 7675 - protein, 2100 aa, synthetic construct
MPAAKRVKLDGGDKKYSIGLDIGTNSVGWAVITDEYKVPSKKFKVLGNTDRHSIKKNLIGALLFDSGETAEATRLKRTARRRYTRRKNRICYLQEIFSNEMAKVDDSFFHRLEESFLVEEDKKHERHPIFGNIVDEVAYHEKYPTIYHLRKKLVDSTDKADLRLIYLALAHMIKFRGHFLIEGDLNPDNSDVDKLFIQLVQTYNQLFEENPINASGVDAKAILSARLSKSRRLENLIAQLPGEKKNGLFGNLIALSLGLTPNFKSNFDLAEDAKLQLSKDTYDDDLDNLLAQIGDQYADLFLAAKNLSDAILLSDILRVNTEITKAPLSASMIKRYDEHHQDLTLLKALVRQQLPEKYKEIFFDQSKNGYAGYIDGGASQEEFYKFIKPILEKMDGTEELLVKLNREDLLRKQRTFDNGSIPHQIHLGELHAILRRQEDFYPFLKDNREKIEKILTFRIPYYVGPLARGNSRFAWMTRKSEETITPWNFEEVVDKGASAQSFIERMTNFDKNLPNEKVLPKHSLLYEYFTVYNELTKVKYVTEGMRKPAFLSGEQKKAIVDLLFKTNRKVTVKQLKEDYFKKIECFDSVEISGVEDRFNASLGTYHDLLKIIKDKDFLDNEENEDILEDIVLTLTLFEDREMIEERLKTYAHLFDDKVMKQLKRRRYTGWGRLSRKLINGIRDKQSGKTILDFLKSDGFANRNFMQLIHDDSLTFKEDIQKAQVSGQGDSLHEHIANLAGSPAIKKGILQTVKVVDELVKVMGRHKPENIVIEMARENQTTQKGQKNSRERMKRIEEGIKELGSQILKEHPVENTQLQNEKLYLYYLQNGRDMYVDQELDINRLSDYDVDHIVPQSFLKDDSIDNKVLTRSDKARGKSDNVPSEEVVKKMKNYWRQLLNAKLITQRKFDNLTKAERGGLSELDKAGFIKRQLVETRQITKHVAQILDSRMNTKYDENDKLIREVKVITLKSKLVSDFRKDFQFYKVREINNYHHAHDAYLNAVVGTALIKKYPKLESEFVYGDYKVYDVRKMIAKSEQEIGKATAKYFFYSNIMNFFKTEITLANGEIRKRPLIETNGETGEIVWDKGRDFATVRKVLSMPQVNIVKKTEVQTGGFSKESILPKRNSDKLIARKKDWDPKKYGGFDSPTVAYSVLVVAKVEKGKSKKLKSVKELLGITIMERSSFEKNPIDFLEAKGYKEVKKDLIIKLPKYSLFELENGRKRMLASAGELQKGNELALPSKYVNFLYLASHYEKLKGSPEDNEQKQLFVEQHKHYLDEIIEQISEFSKRVILADANLDKVLSAYNKHRDKPIREQAENIIHLFTLTNLGAPAAFKYFDTTIDRKRYTSTKEVLDATLIHQSITGLYETRIDLSQLGGDGGGGGGSEAAAKGGGGSGGTLGIEDEYRLHETSTEPDVSLGSTWLSDFPQAWAETGGMGLAVRQAPLIIPLKATSTPVSIQQYPMSHEARLGIKPHIQRLLDQGILVPCQSPWNTPLLPVKKPGTNDYRPVQDLREVNKRVEDIHPTVPNPYNLLSGLPPSHQWYTVLDLKDAFFCLRLHPTSQPLFAFEWRDPGMGISGQLTWTRLPQGFKNSPTLFNEALHRDLADFRIQHPDLILLQYVDDILLAATSELDCQQGTRALLQTLGDLGYRASAKKAQICQKQVKYLGYLLREGQRWLTEARKETVMGQPVPKTPRQLREFLGTAGFCRLWIPGFAEMAAPLYPLTKPGTLFSWGPDQQKAYQEIKQALLTAPALGLPDLTKPFELFVDEKQGYAKGVLTQKLGPWRRPVAYLSKKLDPVAAGWPPCLRMVAAIAVLTKDAGKLTMGQPLVILAPHAVEALVKQPPDRWLSNARMTHYQAMLLDTDRVQFGPVVALNPATLLPLPEEGAPHDCLEILAETHGTRPDLTDQPIPDADHTWYTDGSSFLQEGQRKAGAAVTTETEVIWAGALPAGTSAQRAELIALTQALKMAEGKRLNVYTDSRYAFATAHIHGEIYRRRGWLTSEGREIKNKSEILALLKALFLPKRLSIIHCLGHQKGDSAEARGNRLADQAAREAAIKTPPDTSTLLAGKRTADGSEFEKRTADGSEFESPKKKAKVE

SEQ ID NO: 7676 - protein, 2100 aa, synthetic construct
MPAAKRVKLDGGDKKYSIGLDIGTNSVGWAVITDEYKVPSKKFKVLGNTDRHSIKKNLIGALLFDSGETAEATRLKRTARRRYTRRKNRICYLQEIFSNEMAKVDDSFFHRLEESFLVEEDKKHERHPIFGNIVDEVAYHEKYPTIYHLRKKLVDSTDKADLRLIYLALAHMIKFRGHFLIEGDLNPDNSDVDKLFIQLVQTYNQLFEENPINASGVDAKAILSARLSKSRRLENLIAQLPGEKKNGLFGNLIALSLGLTPNFKSNFDLAEDAKLQLSKDTYDDDLDNLLAQIGDQYADLFLAAKNLSDAILLSDILRVNTEITKAPLSASMIKRYDEHHQDLTLLKALVRQQLPEKYKEIFFDQSKNGYAGYIDGGASQEEFYKFIKPILEKMDGTEELLVKLNREDLLRKQRTFDNGSIPHQIHLGELHAILRRQEDFYPFLKDNREKIEKILTFRIPYYVGPLARGNSRFAWMTRKSEETITPWNFEEVVDKGASAQSFIERMTNFDKNLPNEKVLPKHSLLYEYFTVYNELTKVKYVTEGMRKPAFLSGEQKKAIVDLLFKTNRKVTVKQLKEDYFKKIECFDSVEISGVEDRFNASLGTYHDLLKIIKDKDFLDNEENEDILEDIVLTLTLFEDREMIEERLKTYAHLFDDKVMKQLKRRRYTGWGRLSRKLINGIRDKQSGKTILDFLKSDGFANRNFMQLIHDDSLTFKEDIQKAQVSGQGDSLHEHIANLAGSPAIKKGILQTVKVVDELVKVMGRHKPENIVIEMARENQTTQKGQKNSRERMKRIEEGIKELGSQILKEHPVENTQLQNEKLYLYYLQNGRDMYVDQELDINRLSDYDVDHIVPQSFLKDDSIDNKVLTRSDKARGKSDNVPSEEVVKKMKNYWRQLLNAKLITQRKFDNLTKAERGGLSELDKAGFIKRQLVETRQITKHVAQILDSRMNTKYDENDKLIREVKVITLKSKLVSDFRKDFQFYKVREINNYHHAHDAYLNAVVGTALIKKYPKLESEFVYGDYKVYDVRKMIAKSEQEIGKATAKYFFYSNIMNFFKTEITLANGEIRKRPLIETNGETGEIVWDKGRDFATVRKVLSMPQVNIVKKTEVQTGGFSKESILPKRNSDKLIARKKDWDPKKYGGFDSPTVAYSVLVVAKVEKGKSKKLKSVKELLGITIMERSSFEKNPIDFLEAKGYKEVKKDLIIKLPKYSLFELENGRKRMLASAGELQKGNELALPSKYVNFLYLASHYEKLKGSPEDNEQKQLFVEQHKHYLDEIIEQISEFSKRVILADANLDKVLSAYNKHRDKPIREQAENIIHLFTLTNLGAPAAFKYFDTTIDRKRYTSTKEVLDATLIHQSITGLYETRIDLSQLGGDGGGGGGSEAAAKGGGGSGGTLNIEDEYRLHETSKEPDVSLGSTWLSDFPQAWAETGGMGLAVRQAPLIIPLKATSTPVSIKQYPMSQEARLGIKPHIQRLLDQGILVPCQSPWNTPLLPVKKPGTNDYRPVQDLREVNKRVEDIHPTVPNPYNLLSGLPPSHQWYTVLDLKDAFFCLRLHPTSQPLFAFEWRDPEMGISGQLTWTRLPQGFKNSPTLFNEALHRDLAGFRIQHPDLILLQYVDDLLLAATSELDCQQGTRALLQTLGDLGYRASAKKAQICQKQVKYLGYLLKEGQRWLTEARKETVMGQPIPKTPRQLREFLGTAGFCRLWIPGFAEMAAPLYPLTKPGTLFNWGPDQQKAFQEIKQALLTAPALGLPDLTKPFELFVDEKQGYAKGVLTQKLGPWRRPVAYLSKKLDPVAAGWPPCLRMVAAIAVLTKDAGKLTMGQPLVILAPHAVEALVKQPPDRWLSNARMTHYQALLLDTDRVQFGPVVALNPATLLPLPEEGLQHDCLDILAEAHGTRSDLMDQPLPDADHTWYTDGSSFLQEGQRKAGAAVTTETEVIWARALPAGTSAQRAELIALTQALKMAEGKKLNVYTDSRYAFATAHIHGEIYRRRGWLTSEGKEIKNKDEILALLKALFLPKRLSIIHCPGHQKGNSAEARGNRMADQAAREVATRETPETSTLLAGKRTADGSEFEKRTADGSEFESPKKKAKVE

SEQ ID NO: 7677 - protein, 2100 aa, synthetic construct
MPAAKRVKLDGGDKKYSIGLDIGTNSVGWAVITDEYKVPSKKFKVLGNTDRHSIKKNLIGALLFDSGETAEATRLKRTARRRYTRRKNRICYLQEIFSNEMAKVDDSFFHRLEESFLVEEDKKHERHPIFGNIVDEVAYHEKYPTIYHLRKKLVDSTDKADLRLIYLALAHMIKFRGHFLIEGDLNPDNSDVDKLFIQLVQTYNQLFEENPINASGVDAKAILSARLSKSRRLENLIAQLPGEKKNGLFGNLIALSLGLTPNFKSNFDLAEDAKLQLSKDTYDDDLDNLLAQIGDQYADLFLAAKNLSDAILLSDILRVNTEITKAPLSASMIKRYDEHHQDLTLLKALVRQQLPEKYKEIFFDQSKNGYAGYIDGGASQEEFYKFIKPILEKMDGTEELLVKLNREDLLRKQRTFDNGSIPHQIHLGELHAILRRQEDFYPFLKDNREKIEKILTFRIPYYVGPLARGNSRFAWMTRKSEETITPWNFEEVVDKGASAQSFIERMTNFDKNLPNEKVLPKHSLLYEYFTVYNELTKVKYVTEGMRKPAFLSGEQKKAIVDLLFKTNRKVTVKQLKEDYFKKIECFDSVEISGVEDRFNASLGTYHDLLKIIKDKDFLDNEENEDILEDIVLTLTLFEDREMIEERLKTYAHLFDDKVMKQLKRRRYTGWGRLSRKLINGIRDKQSGKTILDFLKSDGFANRNFMQLIHDDSLTFKEDIQKAQVSGQGDSLHEHIANLAGSPAIKKGILQTVKVVDELVKVMGRHKPENIVIEMARENQTTQKGQKNSRERMKRIEEGIKELGSQILKEHPVENTQLQNEKLYLYYLQNGRDMYVDQELDINRLSDYDVDHIVPQSFLKDDSIDNKVLTRSDKARGKSDNVPSEEVVKKMKNYWRQLLNAKLITQRKFDNLTKAERGGLSELDKAGFIKRQLVETRQITKHVAQILDSRMNTKYDENDKLIREVKVITLKSKLVSDFRKDFQFYKVREINNYHHAHDAYLNAVVGTALIKKYPKLESEFVYGDYKVYDVRKMIAKSEQEIGKATAKYFFYSNIMNFFKTEITLANGEIRKRPLIETNGETGEIVWDKGRDFATVRKVLSMPQVNIVKKTEVQTGGFSKESILPKRNSDKLIARKKDWDPKKYGGFDSPTVAYSVLVVAKVEKGKSKKLKSVKELLGITIMERSSFEKNPIDFLEAKGYKEVKKDLIIKLPKYSLFELENGRKRMLASAGELQKGNELALPSKYVNFLYLASHYEKLKGSPEDNEQKQLFVEQHKHYLDEIIEQISEFSKRVILADANLDKVLSAYNKHRDKPIREQAENIIHLFTLTNLGAPAAFKYFDTTIDRKRYTSTKEVLDATLIHQSITGLYETRIDLSQLGGDGGGGGGSEAAAKGGGGSGGTLNIEDEYRLHETSKGPDVPLGSTWLSDFPQAWAETGGMGLAVRQAPLIIPLKATSTPVSIKQYPMSQEARLGIKPHIQRLLDQGILVPCQSPWNTPLLPVKKPGTNDYRPVQDLREVNKRVEDIHPTVPNPYNLLSGLPPSHQWYTVLDLKDAFFCLRLHPTSQSLFAFEWRDPEMGISGQLTWTRLPQGFKNSPTLFNEALHRDLADFRIQHPDLILLQYVDDLLLAATSELDCQQGTRALLQTLGDLGYRASAKKAQICQKQVKYLGYLLKEGQRWLTEARKETVMGQPTPKTPRQLREFLGTAGFCRLWIPGFAEMAAPLYPLTKPGTLFEWGPDQQKAYQEIKQALLTAPALGLPDLTKPFELFVDEKQGYAKGVLTQKLGPWRRPVAYLSKKLDPVAAGWPPCLRMVAAIAVLTKDAGKLTMGQPLVILAPHAVEALVKQPPDRWLSNARMTHYQALLLDTDRVQFGPIVALNPATLLPLPEEGLQHDCLDILAEAHGTRPDLTDQPLPDADHTWYTDGSSFLQEGQRKAGAAVTTETEVVWAKALPAGTSAQRAELIALTQALKMAEGKKLNVYTDSRYAFATAHIHGEIYRRRGWLTSEGKEIKNKDEILALLKALFLPKRLSIIHCPGHQKGNRAEARGNRMADQAAREVATRETPETSTLLAGKRTADGSEFEKRTADGSEFESPKKKAKVE

SEQ ID NO: 7678 - protein, 2120 aa, synthetic construct
MPAAKRVKLDGGDKKYSIGLDIGTNSVGWAVITDEYKVPSKKFKVLGNTDRHSIKKNLIGALLFDSGETAEATRLKRTARRRYTRRKNRICYLQEIFSNEMAKVDDSFFHRLEESFLVEEDKKHERHPIFGNIVDEVAYHEKYPTIYHLRKKLVDSTDKADLRLIYLALAHMIKFRGHFLIEGDLNPDNSDVDKLFIQLVQTYNQLFEENPINASGVDAKAILSARLSKSRRLENLIAQLPGEKKNGLFGNLIALSLGLTPNFKSNFDLAEDAKLQLSKDTYDDDLDNLLAQIGDQYADLFLAAKNLSDAILLSDILRVNTEITKAPLSASMIKRYDEHHQDLTLLKALVRQQLPEKYKEIFFDQSKNGYAGYIDGGASQEEFYKFIKPILEKMDGTEELLVKLNREDLLRKQRTFDNGSIPHQIHLGELHAILRRQEDFYPFLKDNREKIEKILTFRIPYYVGPLARGNSRFAWMTRKSEETITPWNFEEVVDKGASAQSFIERMTNFDKNLPNEKVLPKHSLLYEYFTVYNELTKVKYVTEGMRKPAFLSGEQKKAIVDLLFKTNRKVTVKQLKEDYFKKIECFDSVEISGVEDRFNASLGTYHDLLKIIKDKDFLDNEENEDILEDIVLTLTLFEDREMIEERLKTYAHLFDDKVMKQLKRRRYTGWGRLSRKLINGIRDKQSGKTILDFLKSDGFANRNFMQLIHDDSLTFKEDIQKAQVSGQGDSLHEHIANLAGSPAIKKGILQTVKVVDELVKVMGRHKPENIVIEMARENQTTQKGQKNSRERMKRIEEGIKELGSQILKEHPVENTQLQNEKLYLYYLQNGRDMYVDQELDINRLSDYDVDHIVPQSFLKDDSIDNKVLTRSDKARGKSDNVPSEEVVKKMKNYWRQLLNAKLITQRKFDNLTKAERGGLSELDKAGFIKRQLVETRQITKHVAQILDSRMNTKYDENDKLIREVKVITLKSKLVSDFRKDFQFYKVREINNYHHAHDAYLNAVVGTALIKKYPKLESEFVYGDYKVYDVRKMIAKSEQEIGKATAKYFFYSNIMNFFKTEITLANGEIRKRPLIETNGETGEIVWDKGRDFATVRKVLSMPQVNIVKKTEVQTGGFSKESILPKRNSDKLIARKKDWDPKKYGGFDSPTVAYSVLVVAKVEKGKSKKLKSVKELLGITIMERSSFEKNPIDFLEAKGYKEVKKDLIIKLPKYSLFELENGRKRMLASAGELQKGNELALPSKYVNFLYLASHYEKLKGSPEDNEQKQLFVEQHKHYLDEIIEQISEFSKRVILADANLDKVLSAYNKHRDKPIREQAENIIHLFTLTNLGAPAAFKYFDTTIDRKRYTSTKEVLDATLIHQSITGLYETRIDLSQLGGDGGGGGGSEAAAKGGGGSGGVQEISDSRPMLHIYLNGRRFLGLLDTGADKTCIAGRDWPANWPIHQTESSLQGLGMACGVARSSQPLRWQHEDKSGIIHPFVIPTLPFTLWGRDIMKDIKVRLMTDSPDDSQDLMIGAIESNLFADQISWKSDQPVWLNQWPLKQEKLQALQQLVTEQLQLGHLEESNSPWNTPVFVIKKKSGKWRLLQDLRAVNATMHDMGALQPGLPSPPAVPKGWEIIIIDLQDCFFNIKLHPEDCKRFAFSVPSPNFKRPYQRFQWKVLPQGMKNSPTLCQKFVDKAILTVRDKYQDSYIVHYMDDILLAHPSRSIVDEILTSMIQALNKHGLVVSTEKIQKYDNLKYLGTHIQGDSVSYQKLQIRTDKLRTLNDFQKLLGNINWIRPFLKLTTGELKPLFEILNPDSNPISTRKLTPEACKALQLMNERLSTARVKRLDLSQPWSLCILKTEYTPTACLWQDGVVEWIHLPHISPKVITPYDIFCTQLIIKGRHRSKELFSKDPDYIVVPYTKVQFDLLLQEKEDWPISLLGFLGEVHFHLPKDPLLTFTLQTAIIFPHMTSTTPLEKGIVIFTDGSANGRSVTYIQGREPIIKENTQNTAQQAEIVAVITAFEEVSQPFNLYTDSKYVTGLFPEIETATLSPRTKIYTELKHLQRLIHKRQEKFYIGHIRGHTGLPGPLAQGNAYADSLTRILTAAGKRTADGSEFEKRTADGSEFESPKKKAKVE

SEQ ID NO: 7679 - protein, 2098 aa, synthetic construct
MPAAKRVKLDGGDKKYSIGLDIGTNSVGWAVITDEYKVPSKKFKVLGNTDRHSIKKNLIGALLFDSGETAEATRLKRTARRRYTRRKNRICYLQEIFSNEMAKVDDSFFHRLEESFLVEEDKKHERHPIFGNIVDEVAYHEKYPTIYHLRKKLVDSTDKADLRLIYLALAHMIKFRGHFLIEGDLNPDNSDVDKLFIQLVQTYNQLFEENPINASGVDAKAILSARLSKSRRLENLIAQLPGEKKNGLFGNLIALSLGLTPNFKSNFDLAEDAKLQLSKDTYDDDLDNLLAQIGDQYADLFLAAKNLSDAILLSDILRVNTEITKAPLSASMIKRYDEHHQDLTLLKALVRQQLPEKYKEIFFDQSKNGYAGYIDGGASQEEFYKFIKPILEKMDGTEELLVKLNREDLLRKQRTFDNGSIPHQIHLGELHAILRRQEDFYPFLKDNREKIEKILTFRIPYYVGPLARGNSRFAWMTRKSEETITPWNFEEVVDKGASAQSFIERMTNFDKNLPNEKVLPKHSLLYEYFTVYNELTKVKYVTEGMRKPAFLSGEQKKAIVDLLFKTNRKVTVKQLKEDYFKKIECFDSVEISGVEDRFNASLGTYHDLLKIIKDKDFLDNEENEDILEDIVLTLTLFEDREMIEERLKTYAHLFDDKVMKQLKRRRYTGWGRLSRKLINGIRDKQSGKTILDFLKSDGFANRNFMQLIHDDSLTFKEDIQKAQVSGQGDSLHEHIANLAGSPAIKKGILQTVKVVDELVKVMGRHKPENIVIEMARENQTTQKGQKNSRERMKRIEEGIKELGSQILKEHPVENTQLQNEKLYLYYLQNGRDMYVDQELDINRLSDYDVDHIVPQSFLKDDSIDNKVLTRSDKARGKSDNVPSEEVVKKMKNYWRQLLNAKLITQRKFDNLTKAERGGLSELDKAGFIKRQLVETRQITKHVAQILDSRMNTKYDENDKLIREVKVITLKSKLVSDFRKDFQFYKVREINNYHHAHDAYLNAVVGTALIKKYPKLESEFVYGDYKVYDVRKMIAKSEQEIGKATAKYFFYSNIMNFFKTEITLANGEIRKRPLIETNGETGEIVWDKGRDFATVRKVLSMPQVNIVKKTEVQTGGFSKESILPKRNSDKLIARKKDWDPKKYGGFDSPTVAYSVLVVAKVEKGKSKKLKSVKELLGITIMERSSFEKNPIDFLEAKGYKEVKKDLIIKLPKYSLFELENGRKRMLASAGELQKGNELALPSKYVNFLYLASHYEKLKGSPEDNEQKQLFVEQHKHYLDEIIEQISEFSKRVILADANLDKVLSAYNKHRDKPIREQAENIIHLFTLTNLGAPAAFKYFDTTIDRKRYTSTKEVLDATLIHQSITGLYETRIDLSQLGGDGGGGGGSEAAAKGGGGSGGVLNLEEEYRLHEKPVPSSIDPSWLQLFPTVWAERAGMGLANQVPPVVVELRSGASPVAVRQYPMSKEAREGIRPHIQRFLDLGVLVPCQSPWNTPLLPVKKPGTNDYRPVQDLREINKRVQDIHPTVPNPYNLLSSLPPSHTWYSVLDLKDAFFCLKLHPNSQPLFAFEWRDPEKGNTGQLTWTRLPQGFKNSPTLFNEALHRDLAPFRALNPQVVLLQYVDDLLVAAPTYRDCKEGTQKLLQELSKLGYRVSAKKAQLCQKEVTYLGYLLKEGKRWLTPARKATVMKIPPPTTPRQVREFLGTAGFCRLWIPGFASLAAPLYPLTKPSIPFIWTEEHQKAFDRIKEALLSAPALALPDLTKPFTLYVDERAGVARGVLTQTLGPWRRPVAYLSKKLDPVASGWPTCLKAVAAVALLLKDADKLTLGQNVTVIASHSLESIVRQPPDRWMTNARMTHYQSLLLNERVSFAPPAVLNPATLLPVESEATPVHRCSEILAEETGTRRDLKDQPLPGVPAWYTDGSSFIAEGKRRAGAAIVDGKRTVWASSLPEGTSAQKAELVALTQALRLAEGKDINIYTDSRYAFATAHIHGAIYKQRGWLTSAGKDIKNKEEILALLEAIHLPKRVAIIHCPGHQKGNDPVATGNRRADEAAKQAALSTRVLAETTKPAGKRTADGSEFEKRTADGSEFESPKKKAKVE

SEQ ID NO: 7680 - protein, 2102 aa, synthetic construct
MPAAKRVKLDGGDKKYSIGLDIGTNSVGWAVITDEYKVPSKKFKVLGNTDRHSIKKNLIGALLFDSGETAEATRLKRTARRRYTRRKNRICYLQEIFSNEMAKVDDSFFHRLEESFLVEEDKKHERHPIFGNIVDEVAYHEKYPTIYHLRKKLVDSTDKADLRLIYLALAHMIKFRGHFLIEGDLNPDNSDVDKLFIQLVQTYNQLFEENPINASGVDAKAILSARLSKSRRLENLIAQLPGEKKNGLFGNLIALSLGLTPNFKSNFDLAEDAKLQLSKDTYDDDLDNLLAQIGDQYADLFLAAKNLSDAILLSDILRVNTEITKAPLSASMIKRYDEHHQDLTLLKALVRQQLPEKYKEIFFDQSKNGYAGYIDGGASQEEFYKFIKPILEKMDGTEELLVKLNREDLLRKQRTFDNGSIPHQIHLGELHAILRRQEDFYPFLKDNREKIEKILTFRIPYYVGPLARGNSRFAWMTRKSEETITPWNFEEVVDKGASAQSFIERMTNFDKNLPNEKVLPKHSLLYEYFTVYNELTKVKYVTEGMRKPAFLSGEQKKAIVDLLFKTNRKVTVKQLKEDYFKKIECFDSVEISGVEDRFNASLGTYHDLLKIIKDKDFLDNEENEDILEDIVLTLTLFEDREMIEERLKTYAHLFDDKVMKQLKRRRYTGWGRLSRKLINGIRDKQSGKTILDFLKSDGFANRNFMQLIHDDSLTFKEDIQKAQVSGQGDSLHEHIANLAGSPAIKKGILQTVKVVDELVKVMGRHKPENIVIEMARENQTTQKGQKNSRERMKRIEEGIKELGSQILKEHPVENTQLQNEKLYLYYLQNGRDMYVDQELDINRLSDYDVDHIVPQSFLKDDSIDNKVLTRSDKARGKSDNVPSEEVVKKMKNYWRQLLNAKLITQRKFDNLTKAERGGLSELDKAGFIKRQLVETRQITKHVAQILDSRMNTKYDENDKLIREVKVITLKSKLVSDFRKDFQFYKVREINNYHHAHDAYLNAVVGTALIKKYPKLESEFVYGDYKVYDVRKMIAKSEQEIGKATAKYFFYSNIMNFFKTEITLANGEIRKRPLIETNGETGEIVWDKGRDFATVRKVLSMPQVNIVKKTEVQTGGFSKESILPKRNSDKLIARKKDWDPKKYGGFDSPTVAYSVLVVAKVEKGKSKKLKSVKELLGITIMERSSFEKNPIDFLEAKGYKEVKKDLIIKLPKYSLFELENGRKRMLASAGELQKGNELALPSKYVNFLYLASHYEKLKGSPEDNEQKQLFVEQHKHYLDEIIEQISEFSKRVILADANLDKVLSAYNKHRDKPIREQAENIIHLFTLTNLGAPAAFKYFDTTIDRKRYTSTKEVLDATLIHQSITGLYETRIDLSQLGGDGGEAAAKGGGGSEAAAKGGTAPLEEEYRLFLEAPIQNVTLLEQWKREIPKVWAEINPPGLASTQAPIHVQLLSTALPVRVRQYPITLEAKRSLRETIRKFRAAGILRPVHSPWNTPLLPVRKSGTSEYRMVQDLREVNKRVETIHPTVPNPYTLLSLLPPDRIWYSVLDLKDAFFCIPLAPESQLIFAFEWADAEEGESGQLTWTRLPQGFKNSPTLFDEALNRDLQGFRLDHPSVSLLQYVDDLLIAADTQAACLSATRDLLMTLAELGYRVSGKKAQLCQEEVTYLGFKIHKGSRSLSNSRTQAILQIPVPKTKRQVREFLGTIGYCRLWIPGFAELAQPLYAATRGGNDPLVWGEKEEEAFQSLKLALTQPPALALPSLDKPFQLFVEETSGAAKGVLTQALGPWKRPVAYLSKRLDPVAAGWPRCLRAIAAAALLTREASKLTFGQDIEITSSHNLESLLRSPPDKWLTNARITQYQVLLLDPPRVRFKQTAALNPATLLPETDDTLPIHHCLDTLDSLTSTRPDLTDQPLAQAEATLFTDGSSYIRDGKRYAGAAVVTLDSVIWAEPLPIGTSAQKAELIALTKALEWSKDKSVNIYTDSRYAFATLHVHGMIYRERGLLTAGGKAIKNAPEILALLTAVWLPKRVAVMHCKGHQKDDAPTSTGNRRADEVAREVAIRPLSTQATISAGKRTADGSEFEKRTADGSEFESPKKKAKVE

SEQ ID NO: 7681 - protein, 2098 aa, synthetic construct
MPAAKRVKLDGGDKKYSIGLDIGTNSVGWAVITDEYKVPSKKFKVLGNTDRHSIKKNLIGALLFDSGETAEATRLKRTARRRYTRRKNRICYLQEIFSNEMAKVDDSFFHRLEESFLVEEDKKHERHPIFGNIVDEVAYHEKYPTIYHLRKKLVDSTDKADLRLIYLALAHMIKFRGHFLIEGDLNPDNSDVDKLFIQLVQTYNQLFEENPINASGVDAKAILSARLSKSRRLENLIAQLPGEKKNGLFGNLIALSLGLTPNFKSNFDLAEDAKLQLSKDTYDDDLDNLLAQIGDQYADLFLAAKNLSDAILLSDILRVNTEITKAPLSASMIKRYDEHHQDLTLLKALVRQQLPEKYKEIFFDQSKNGYAGYIDGGASQEEFYKFIKPILEKMDGTEELLVKLNREDLLRKQRTFDNGSIPHQIHLGELHAILRRQEDFYPFLKDNREKIEKILTFRIPYYVGPLARGNSRFAWMTRKSEETITPWNFEEVVDKGASAQSFIERMTNFDKNLPNEKVLPKHSLLYEYFTVYNELTKVKYVTEGMRKPAFLSGEQKKAIVDLLFKTNRKVTVKQLKEDYFKKIECFDSVEISGVEDRFNASLGTYHDLLKIIKDKDFLDNEENEDILEDIVLTLTLFEDREMIEERLKTYAHLFDDKVMKQLKRRRYTGWGRLSRKLINGIRDKQSGKTILDFLKSDGFANRNFMQLIHDDSLTFKEDIQKAQVSGQGDSLHEHIANLAGSPAIKKGILQTVKVVDELVKVMGRHKPENIVIEMARENQTTQKGQKNSRERMKRIEEGIKELGSQILKEHPVENTQLQNEKLYLYYLQNGRDMYVDQELDINRLSDYDVDHIVPQSFLKDDSIDNKVLTRSDKARGKSDNVPSEEVVKKMKNYWRQLLNAKLITQRKFDNLTKAERGGLSELDKAGFIKRQLVETRQITKHVAQILDSRMNTKYDENDKLIREVKVITLKSKLVSDFRKDFQFYKVREINNYHHAHDAYLNAVVGTALIKKYPKLESEFVYGDYKVYDVRKMIAKSEQEIGKATAKYFFYSNIMNFFKTEITLANGEIRKRPLIETNGETGEIVWDKGRDFATVRKVLSMPQVNIVKKTEVQTGGFSKESILPKRNSDKLIARKKDWDPKKYGGFDSPTVAYSVLVVAKVEKGKSKKLKSVKELLGITIMERSSFEKNPIDFLEAKGYKEVKKDLIIKLPKYSLFELENGRKRMLASAGELQKGNELALPSKYVNFLYLASHYEKLKGSPEDNEQKQLFVEQHKHYLDEIIEQISEFSKRVILADANLDKVLSAYNKHRDKPIREQAENIIHLFTLTNLGAPAAFKYFDTTIDRKRYTSTKEVLDATLIHQSITGLYETRIDLSQLGGDGGEAAAKGGGGSEAAAKGGVLNLEEEYRLHEKPVPSSIDPSWLQLFPTVWAERAGMGLANQVPPVVVELRSGASPVAVRQYPMSKEAREGIRPHIQKFLDLGVLVPCRSPWNTPLLPVKKPGTNDYRPVQDLREINKRVQDIHPTVPNPYNLLSSLPPSYTWYSVLDLKDAFFCLRLHPNSQPLFAFEWKDPEKGNTGQLTWTRLPQGFKNSPTLFNEALHRDLAPFRALNPQVVLLQYVDDLLVAAPTYEDCKKGTQKLLQELSKLGYRVSAKKAQLCQREVTYLGYLLKEGKRWLTPARKATVMKIPVPTTPRQVREFLGTAGFCRLWIPGFASLAAPLYPLTKPSIPFIWTEEHQQAFDHIKKALLSAPALALPDLTKPFTLYIDERAGVARGVLTQTLGPWRRPVAYLSKKLDPVASGWPTCLKAVAAVALLLKDADKLTLGQNVTVIASHSLESIVRQPPDRWMTNARMTHYQSLLLNERVSFAPPAVLNPATLLPVESEATPVHRCSEILAEETGTRRDLEDQPLPGVPTWYTDGSSFITEGKRRAGAPIVDGKRTVWASSLPEGTSAQKAELVALTQALRLAEGKNINIYTDSRYAFATAHIHGAIYKQRGWLTSAGKDIKNKEEILALLEAIHLPRRVAIIHCPGHQRGSNPVATGNRRADEAAKQAALSTRVLAGTTKPAGKRTADGSEFEKRTADGSEFESPKKKAKVE

SEQ ID NO: 7682 - protein, 2222 aa, synthetic construct
MPAAKRVKLDGGDKKYSIGLDIGTNSVGWAVITDEYKVPSKKFKVLGNTDRHSIKKNLIGALLFDSGETAEATRLKRTARRRYTRRKNRICYLQEIFSNEMAKVDDSFFHRLEESFLVEEDKKHERHPIFGNIVDEVAYHEKYPTIYHLRKKLVDSTDKADLRLIYLALAHMIKFRGHFLIEGDLNPDNSDVDKLFIQLVQTYNQLFEENPINASGVDAKAILSARLSKSRRLENLIAQLPGEKKNGLFGNLIALSLGLTPNFKSNFDLAEDAKLQLSKDTYDDDLDNLLAQIGDQYADLFLAAKNLSDAILLSDILRVNTEITKAPLSASMIKRYDEHHQDLTLLKALVRQQLPEKYKEIFFDQSKNGYAGYIDGGASQEEFYKFIKPILEKMDGTEELLVKLNREDLLRKQRTFDNGSIPHQIHLGELHAILRRQEDFYPFLKDNREKIEKILTFRIPYYVGPLARGNSRFAWMTRKSEETITPWNFEEVVDKGASAQSFIERMTNFDKNLPNEKVLPKHSLLYEYFTVYNELTKVKYVTEGMRKPAFLSGEQKKAIVDLLFKTNRKVTVKQLKEDYFKKIECFDSVEISGVEDRFNASLGTYHDLLKIIKDKDFLDNEENEDILEDIVLTLTLFEDREMIEERLKTYAHLFDDKVMKQLKRRRYTGWGRLSRKLINGIRDKQSGKTILDFLKSDGFANRNFMQLIHDDSLTFKEDIQKAQVSGQGDSLHEHIANLAGSPAIKKGILQTVKVVDELVKVMGRHKPENIVIEMARENQTTQKGQKNSRERMKRIEEGIKELGSQILKEHPVENTQLQNEKLYLYYLQNGRDMYVDQELDINRLSDYDVDHIVPQSFLKDDSIDNKVLTRSDKARGKSDNVPSEEVVKKMKNYWRQLLNAKLITQRKFDNLTKAERGGLSELDKAGFIKRQLVETRQITKHVAQILDSRMNTKYDENDKLIREVKVITLKSKLVSDFRKDFQFYKVREINNYHHAHDAYLNAVVGTALIKKYPKLESEFVYGDYKVYDVRKMIAKSEQEIGKATAKYFFYSNIMNFFKTEITLANGEIRKRPLIETNGETGEIVWDKGRDFATVRKVLSMPQVNIVKKTEVQTGGFSKESILPKRNSDKLIARKKDWDPKKYGGFDSPTVAYSVLVVAKVEKGKSKKLKSVKELLGITIMERSSFEKNPIDFLEAKGYKEVKKDLIIKLPKYSLFELENGRKRMLASAGELQKGNELALPSKYVNFLYLASHYEKLKGSPEDNEQKQLFVEQHKHYLDEIIEQISEFSKRVILADANLDKVLSAYNKHRDKPIREQAENIIHLFTLTNLGAPAAFKYFDTTIDRKRYTSTKEVLDATLIHQSITGLYETRIDLSQLGGDGGEAAAKGGGGSEAAAKGGTLGDQGSRGSDPLPEPRVTLTVEGIPTEFLVNTGAEHSVLTKPMGKMGSKRTVVAGATGSKVYPWTTKRLLKIGQKQVTHSFLVIPECPAPLLGRDLLTKLKAQIQFSTEGPQVTWEDRPAMCLVLNLEEEYRLHEKPVPPSIDPSWLQLFPMVWAEKAGMGLANQVPPVVVELKSDASPVAVRQYPMSKEAREGIRPHIQRFLDLGILVPCQSPWNTPLLPVKKPGTNDYRPVQDLREVNKRVQDIHPTVPNPYNLLSSLPPSHTWYSVLDLKDAFFCLKLHPNSQPLFAFEWRDPEKGNTGQLTWTRLPQGFKNSPTLFNEALHRDLASFRALNPQVVMLQYVDDLLVAAPTYRDCKEGTRRLLQELSKLGYRVSAKKAQLCREEVTYLGYLLKGGKRWLTPARKATVMKIPTPTTPRQVREFLGTAGFCRLWIPGFASLAAPLYPLTRPKVPFTWTEAHQEAFGRIKEALLSAPALALPDLTKPFALYVDEKEGVARGVLTQTLGPWRRPVAYLSKKLDPVASGWPTCLKAIAAVALLLKDADKLTLGQNVLVIAPHNLESIVRQPPDRWMTNARMTHYQSLLLNERVSFAPPAILNPATLLPVESDDTPIHICSEILAEETGTRPDLRDQPLPGVPAWYTDGSSFIMDGRRQAGAAIVDNKRTVWASNLPEGTSAQKAELIALTQALRLAEGKSINIYTDSRYAFATAHVHGAIYKQRGWLTSAGKDIKNKEEILALLEAIHLPKRVAIIHCPGHQRGTDPVATGNRKADEAAKQAAQSTRILTETTKNAGKRTADGSEFEKRTADGSEFESPKKKAKVE

SEQ ID NO: 7683 - protein, 2100 aa, synthetic construct
MPAAKRVKLDGGDKKYSIGLDIGTNSVGWAVITDEYKVPSKKFKVLGNTDRHSIKKNLIGALLFDSGETAEATRLKRTARRRYTRRKNRICYLQEIFSNEMAKVDDSFFHRLEESFLVEEDKKHERHPIFGNIVDEVAYHEKYPTIYHLRKKLVDSTDKADLRLIYLALAHMIKFRGHFLIEGDLNPDNSDVDKLFIQLVQTYNQLFEENPINASGVDAKAILSARLSKSRRLENLIAQLPGEKKNGLFGNLIALSLGLTPNFKSNFDLAEDAKLQLSKDTYDDDLDNLLAQIGDQYADLFLAAKNLSDAILLSDILRVNTEITKAPLSASMIKRYDEHHQDLTLLKALVRQQLPEKYKEIFFDQSKNGYAGYIDGGASQEEFYKFIKPILEKMDGTEELLVKLNREDLLRKQRTFDNGSIPHQIHLGELHAILRRQEDFYPFLKDNREKIEKILTFRIPYYVGPLARGNSRFAWMTRKSEETITPWNFEEVVDKGASAQSFIERMTNFDKNLPNEKVLPKHSLLYEYFTVYNELTKVKYVTEGMRKPAFLSGEQKKAIVDLLFKTNRKVTVKQLKEDYFKKIECFDSVEISGVEDRFNASLGTYHDLLKIIKDKDFLDNEENEDILEDIVLTLTLFEDREMIEERLKTYAHLFDDKVMKQLKRRRYTGWGRLSRKLINGIRDKQSGKTILDFLKSDGFANRNFMQLIHDDSLTFKEDIQKAQVSGQGDSLHEHIANLAGSPAIKKGILQTVKVVDELVKVMGRHKPENIVIEMARENQTTQKGQKNSRERMKRIEEGIKELGSQILKEHPVENTQLQNEKLYLYYLQNGRDMYVDQELDINRLSDYDVDHIVPQSFLKDDSIDNKVLTRSDKARGKSDNVPSEEVVKKMKNYWRQLLNAKLITQRKFDNLTKAERGGLSELDKAGFIKRQLVETRQITKHVAQILDSRMNTKYDENDKLIREVKVITLKSKLVSDFRKDFQFYKVREINNYHHAHDAYLNAVVGTALIKKYPKLESEFVYGDYKVYDVRKMIAKSEQEIGKATAKYFFYSNIMNFFKTEITLANGEIRKRPLIETNGETGEIVWDKGRDFATVRKVLSMPQVNIVKKTEVQTGGFSKESILPKRNSDKLIARKKDWDPKKYGGFDSPTVAYSVLVVAKVEKGKSKKLKSVKELLGITIMERSSFEKNPIDFLEAKGYKEVKKDLIIKLPKYSLFELENGRKRMLASAGELQKGNELALPSKYVNFLYLASHYEKLKGSPEDNEQKQLFVEQHKHYLDEIIEQISEFSKRVILADANLDKVLSAYNKHRDKPIREQAENIIHLFTLTNLGAPAAFKYFDTTIDRKRYTSTKEVLDATLIHQSITGLYETRIDLSQLGGDGGEAAAKGGGGSEAAAKGGTLNLEDEYRLYETSAEPEVSPGSTWLSDFPQAWAETGGMGLAVRQAPLIIPLKATSTPVSIKQYPMSQEAKLGIKPHIQRLLDQGILVPCQSPWNTPLLPVKKPGTNDYRPVQDLREVNKRVEDIHPTVPNPYNLLSGLPPSHRWYTVLDLKDAFFCLRLHPTSQPLFAFEWRDPGMGISGQLTWTRLPQGFKNSPTLFNEALHRDLADFRIQHPDLILLQYVDDILLAATSELDCQQGTRALLLTLGNLGYRASAKKAQLCQKQVKYLGYLLKEGQRWLTEARKETVMGQPTPKTPRQLREFLGTAGFCRLWIPGFAEMAAPLYPLTKPGTLFNWGPDQQKAYQEIKQALLTAPALGLPDLTKPFELFVDEKQGYAKGVLTQKLGPWRRPVAYLSKKLDPVAAGWPPCLRMVAAIAVLRKDAGKLTMGQPLVILAPHAVEALVKQPPDRWLSNARMTHYQAMLLDTDRVQFGPVVALNPATLLPLPEEGAPHDCLEILAETHGTRPDLTDQPIPDADHTWYTDGSSFLQEGQRKAGAAVTTETEVIWARALPAGTSAQRAELIALTQALKMAEGKRLNVYTDSRYAFATAHIHGEIYRRRGWLTSEGREIKNKSEILALLKALFLPKRLSIIHCLGHQKGDSAEARGNRLADQAAREAAIKTPPDTSTLLAGKRTADGSEFEKRTADGSEFESPKKKAKVE

SEQ ID NO: 7684 - protein, 2100 aa, synthetic construct
MPAAKRVKLDGGDKKYSIGLDIGTNSVGWAVITDEYKVPSKKFKVLGNTDRHSIKKNLIGALLFDSGETAEATRLKRTARRRYTRRKNRICYLQEIFSNEMAKVDDSFFHRLEESFLVEEDKKHERHPIFGNIVDEVAYHEKYPTIYHLRKKLVDSTDKADLRLIYLALAHMIKFRGHFLIEGDLNPDNSDVDKLFIQLVQTYNQLFEENPINASGVDAKAILSARLSKSRRLENLIAQLPGEKKNGLFGNLIALSLGLTPNFKSNFDLAEDAKLQLSKDTYDDDLDNLLAQIGDQYADLFLAAKNLSDAILLSDILRVNTEITKAPLSASMIKRYDEHHQDLTLLKALVRQQLPEKYKEIFFDQSKNGYAGYIDGGASQEEFYKFIKPILEKMDGTEELLVKLNREDLLRKQRTFDNGSIPHQIHLGELHAILRRQEDFYPFLKDNREKIEKILTFRIPYYVGPLARGNSRFAWMTRKSEETITPWNFEEVVDKGASAQSFIERMTNFDKNLPNEKVLPKHSLLYEYFTVYNELTKVKYVTEGMRKPAFLSGEQKKAIVDLLFKTNRKVTVKQLKEDYFKKIECFDSVEISGVEDRFNASLGTYHDLLKIIKDKDFLDNEENEDILEDIVLTLTLFEDREMIEERLKTYAHLFDDKVMKQLKRRRYTGWGRLSRKLINGIRDKQSGKTILDFLKSDGFANRNFMQLIHDDSLTFKEDIQKAQVSGQGDSLHEHIANLAGSPAIKKGILQTVKVVDELVKVMGRHKPENIVIEMARENQTTQKGQKNSRERMKRIEEGIKELGSQILKEHPVENTQLQNEKLYLYYLQNGRDMYVDQELDINRLSDYDVDHIVPQSFLKDDSIDNKVLTRSDKARGKSDNVPSEEVVKKMKNYWRQLLNAKLITQRKFDNLTKAERGGLSELDKAGFIKRQLVETRQITKHVAQILDSRMNTKYDENDKLIREVKVITLKSKLVSDFRKDFQFYKVREINNYHHAHDAYLNAVVGTALIKKYPKLESEFVYGDYKVYDVRKMIAKSEQEIGKATAKYFFYSNIMNFFKTEITLANGEIRKRPLIETNGETGEIVWDKGRDFATVRKVLSMPQVNIVKKTEVQTGGFSKESILPKRNSDKLIARKKDWDPKKYGGFDSPTVAYSVLVVAKVEKGKSKKLKSVKELLGITIMERSSFEKNPIDFLEAKGYKEVKKDLIIKLPKYSLFELENGRKRMLASAGELQKGNELALPSKYVNFLYLASHYEKLKGSPEDNEQKQLFVEQHKHYLDEIIEQISEFSKRVILADANLDKVLSAYNKHRDKPIREQAENIIHLFTLTNLGAPAAFKYFDTTIDRKRYTSTKEVLDATLIHQSITGLYETRIDLSQLGGDGGEAAAKGGGGSEAAAKGGTLGIEDEYRLHETSTEPDVSLGSTWLSDFPQAWAETGGMGLAVRQAPLIIPLKATSTPVSIQQYPMSHEARLGIKPHIQRLLDQGILVPCQSPWNTPLLPVKKPGTNDYRPVQDLREVNKRVEDIHPTVPNPYNLLSGLPPSHQWYTVLDLKDAFFCLRLHPTSQPLFAFEWRDPGMGISGQLTWTRLPQGFKNSPTLFNEALHRDLADFRIQHPDLILLQYVDDILLAATSELDCQQGTRALLQTLGDLGYRASAKKAQICQKQVKYLGYLLREGQRWLTEARKETVMGQPVPKTPRQLREFLGTAGFCRLWIPGFAEMAAPLYPLTKPGTLFSWGPDQQKAYQEIKQALLTAPALGLPDLTKPFELFVDEKQGYAKGVLTQKLGPWRRPVAYLSKKLDPVAAGWPPCLRMVAAIAVLTKDAGKLTMGQPLVILAPHAVEALVKQPPDRWLSNARMTHYQAMLLDTDRVQFGPVVALNPATLLPLPEEGAPHDCLEILAETHGTRPDLTDQPIPDADHTWYTDGSSFLQEGQRKAGAAVTTETEVIWAGALPAGTSAQRAELIALTQALKMAEGKRLNVYTDSRYAFATAHIHGEIYRRRGWLTSEGREIKNKSEILALLKALFLPKRLSIIHCLGHQKGDSAEARGNRLADQAAREAAIKTPPDTSTLLAGKRTADGSEFEKRTADGSEFESPKKKAKVE

SEQ ID NO: 7685 - protein, 2100 aa, synthetic construct
MPAAKRVKLDGGDKKYSIGLDIGTNSVGWAVITDEYKVPSKKFKVLGNTDRHSIKKNLIGALLFDSGETAEATRLKRTARRRYTRRKNRICYLQEIFSNEMAKVDDSFFHRLEESFLVEEDKKHERHPIFGNIVDEVAYHEKYPTIYHLRKKLVDSTDKADLRLIYLALAHMIKFRGHFLIEGDLNPDNSDVDKLFIQLVQTYNQLFEENPINASGVDAKAILSARLSKSRRLENLIAQLPGEKKNGLFGNLIALSLGLTPNFKSNFDLAEDAKLQLSKDTYDDDLDNLLAQIGDQYADLFLAAKNLSDAILLSDILRVNTEITKAPLSASMIKRYDEHHQDLTLLKALVRQQLPEKYKEIFFDQSKNGYAGYIDGGASQEEFYKFIKPILEKMDGTEELLVKLNREDLLRKQRTFDNGSIPHQIHLGELHAILRRQEDFYPFLKDNREKIEKILTFRIPYYVGPLARGNSRFAWMTRKSEETITPWNFEEVVDKGASAQSFIERMTNFDKNLPNEKVLPKHSLLYEYFTVYNELTKVKYVTEGMRKPAFLSGEQKKAIVDLLFKTNRKVTVKQLKEDYFKKIECFDSVEISGVEDRFNASLGTYHDLLKIIKDKDFLDNEENEDILEDIVLTLTLFEDREMIEERLKTYAHLFDDKVMKQLKRRRYTGWGRLSRKLINGIRDKQSGKTILDFLKSDGFANRNFMQLIHDDSLTFKEDIQKAQVSGQGDSLHEHIANLAGSPAIKKGILQTVKVVDELVKVMGRHKPENIVIEMARENQTTQKGQKNSRERMKRIEEGIKELGSQILKEHPVENTQLQNEKLYLYYLQNGRDMYVDQELDINRLSDYDVDHIVPQSFLKDDSIDNKVLTRSDKARGKSDNVPSEEVVKKMKNYWRQLLNAKLITQRKFDNLTKAERGGLSELDKAGFIKRQLVETRQITKHVAQILDSRMNTKYDENDKLIREVKVITLKSKLVSDFRKDFQFYKVREINNYHHAHDAYLNAVVGTALIKKYPKLESEFVYGDYKVYDVRKMIAKSEQEIGKATAKYFFYSNIMNFFKTEITLANGEIRKRPLIETNGETGEIVWDKGRDFATVRKVLSMPQVNIVKKTEVQTGGFSKESILPKRNSDKLIARKKDWDPKKYGGFDSPTVAYSVLVVAKVEKGKSKKLKSVKELLGITIMERSSFEKNPIDFLEAKGYKEVKKDLIIKLPKYSLFELENGRKRMLASAGELQKGNELALPSKYVNFLYLASHYEKLKGSPEDNEQKQLFVEQHKHYLDEIIEQISEFSKRVILADANLDKVLSAYNKHRDKPIREQAENIIHLFTLTNLGAPAAFKYFDTTIDRKRYTSTKEVLDATLIHQSITGLYETRIDLSQLGGDGGEAAAKGGGGSEAAAKGGTLNIEDEYRLHETSKGPDVPLGSTWLSDFPQAWAETGGMGLAVRQAPLIIPLKATSTPVSIKQYPMSQEARLGIKPHIQRLLDQGILVPCQSPWNTPLLPVKKPGTNDYRPVQDLREVNKRVEDIHPTVPNPYNLLSGLPPSHQWYTVLDLKDAFFCLRLHPTSQSLFAFEWRDPEMGISGQLTWTRLPQGFKNSPTLFNEALHRDLADFRIQHPDLILLQYVDDLLLAATSELDCQQGTRALLQTLGDLGYRASAKKAQICQKQVKYLGYLLKEGQRWLTEARKETVMGQPTPKTPRQLREFLGTAGFCRLWIPGFAEMAAPLYPLTKPGTLFEWGPDQQKAYQEIKQALLTAPALGLPDLTKPFELFVDEKQGYAKGVLTQKLGPWRRPVAYLSKKLDPVAAGWPPCLRMVAAIAVLTKDAGKLTMGQPLVILAPHAVEALVKQPPDRWLSNARMTHYQALLLDTDRVQFGPIVALNPATLLPLPEEGLQHDCLDILAEAHGTRPDLTDQPLPDADHTWYTDGSSFLQEGQRKAGAAVTTETEVVWAKALPAGTSAQRAELIALTQALKMAEGKKLNVYTDSRYAFATAHIHGEIYRRRGWLTSEGKEIKNKDEILALLKALFLPKRLSIIHCPGHQKGNRAEARGNRMADQAAREVATRETPETSTLLAGKRTADGSEFEKRTADGSEFESPKKKAKVE

SEQ ID NO: 7686 - protein, 2100 aa, synthetic construct
MPAAKRVKLDGGDKKYSIGLDIGTNSVGWAVITDEYKVPSKKFKVLGNTDRHSIKKNLIGALLFDSGETAEATRLKRTARRRYTRRKNRICYLQEIFSNEMAKVDDSFFHRLEESFLVEEDKKHERHPIFGNIVDEVAYHEKYPTIYHLRKKLVDSTDKADLRLIYLALAHMIKFRGHFLIEGDLNPDNSDVDKLFIQLVQTYNQLFEENPINASGVDAKAILSARLSKSRRLENLIAQLPGEKKNGLFGNLIALSLGLTPNFKSNFDLAEDAKLQLSKDTYDDDLDNLLAQIGDQYADLFLAAKNLSDAILLSDILRVNTEITKAPLSASMIKRYDEHHQDLTLLKALVRQQLPEKYKEIFFDQSKNGYAGYIDGGASQEEFYKFIKPILEKMDGTEELLVKLNREDLLRKQRTFDNGSIPHQIHLGELHAILRRQEDFYPFLKDNREKIEKILTFRIPYYVGPLARGNSRFAWMTRKSEETITPWNFEEVVDKGASAQSFIERMTNFDKNLPNEKVLPKHSLLYEYFTVYNELTKVKYVTEGMRKPAFLSGEQKKAIVDLLFKTNRKVTVKQLKEDYFKKIECFDSVEISGVEDRFNASLGTYHDLLKIIKDKDFLDNEENEDILEDIVLTLTLFEDREMIEERLKTYAHLFDDKVMKQLKRRRYTGWGRLSRKLINGIRDKQSGKTILDFLKSDGFANRNFMQLIHDDSLTFKEDIQKAQVSGQGDSLHEHIANLAGSPAIKKGILQTVKVVDELVKVMGRHKPENIVIEMARENQTTQKGQKNSRERMKRIEEGIKELGSQILKEHPVENTQLQNEKLYLYYLQNGRDMYVDQELDINRLSDYDVDHIVPQSFLKDDSIDNKVLTRSDKARGKSDNVPSEEVVKKMKNYWRQLLNAKLITQRKFDNLTKAERGGLSELDKAGFIKRQLVETRQITKHVAQILDSRMNTKYDENDKLIREVKVITLKSKLVSDFRKDFQFYKVREINNYHHAHDAYLNAVVGTALIKKYPKLESEFVYGDYKVYDVRKMIAKSEQEIGKATAKYFFYSNIMNFFKTEITLANGEIRKRPLIETNGETGEIVWDKGRDFATVRKVLSMPQVNIVKKTEVQTGGFSKESILPKRNSDKLIARKKDWDPKKYGGFDSPTVAYSVLVVAKVEKGKSKKLKSVKELLGITIMERSSFEKNPIDFLEAKGYKEVKKDLIIKLPKYSLFELENGRKRMLASAGELQKGNELALPSKYVNFLYLASHYEKLKGSPEDNEQKQLFVEQHKHYLDEIIEQISEFSKRVILADANLDKVLSAYNKHRDKPIREQAENIIHLFTLTNLGAPAAFKYFDTTIDRKRYTSTKEVLDATLIHQSITGLYETRIDLSQLGGDGGEAAAKGGGGSEAAAKGGTLNIEDEYRLHEISTEPDVSPGSTWLSDFPQAWAETGGMGLAVRQAPLIIPLKATSTPVSIKQYPMSQEAKLGIKPHIQRLLDQGILVPCQSPWNTPLLPVKKPGTNDYRPVQGLREVNKRVEDIHPTVPNPYNLLSGLPTSHRWYTVLDLKDAFFCLRLHPTSQPLFASEWRDPGMGISGQLTWTRLPQGFKNSPTLFNEALHRGLADFRIQHPDLILLQYVDDLLLAATSELDCQQGTRALLKTLGNLGYRASAKKAQICQKQVKYLGYLLREGQRWLTEARKETVMGQPTPKTPRQLREFLGKAGFCRLFIPRFAEMAAPLYPLTKPGTLFNWGPDQQKAYHEIKQALLTAPALGLPDLTKPFELFVDEKQGYAKGVLTQKLGPWRRPVAYLSKKLDPVAAGWPPCLRMVAAIAVLTKDAGKLTMGQPLVILAPHAVEALVKQPPDRWLSNARMTHYQAMLLDTDRVQFGPVVALNPATLLPLPEEGAPHDCLEILAETHGTEPDLTDQPIPDADHTWYTDGSSFLQEGQRKAGAAVTTETEVIWARALPAGTSAQRAELIALTQALKMAEGKRLNVYTDSRYAFATAHIHGEIYKRRGWLTSEGREIKNKSEILALLKALFLPKRLSIIHCLGHQKGDSAEARGNRLADQAAREAAIKTPPDTSTLLAGKRTADGSEFEKRTADGSEFESPKKKAKVE

SEQ ID NO: 7687 - protein, 2098 aa, synthetic construct
MPAAKRVKLDGGDKKYSIGLDIGTNSVGWAVITDEYKVPSKKFKVLGNTDRHSIKKNLIGALLFDSGETAEATRLKRTARRRYTRRKNRICYLQEIFSNEMAKVDDSFFHRLEESFLVEEDKKHERHPIFGNIVDEVAYHEKYPTIYHLRKKLVDSTDKADLRLIYLALAHMIKFRGHFLIEGDLNPDNSDVDKLFIQLVQTYNQLFEENPINASGVDAKAILSARLSKSRRLENLIAQLPGEKKNGLFGNLIALSLGLTPNFKSNFDLAEDAKLQLSKDTYDDDLDNLLAQIGDQYADLFLAAKNLSDAILLSDILRVNTEITKAPLSASMIKRYDEHHQDLTLLKALVRQQLPEKYKEIFFDQSKNGYAGYIDGGASQEEFYKFIKPILEKMDGTEELLVKLNREDLLRKQRTFDNGSIPHQIHLGELHAILRRQEDFYPFLKDNREKIEKILTFRIPYYVGPLARGNSRFAWMTRKSEETITPWNFEEVVDKGASAQSFIERMTNFDKNLPNEKVLPKHSLLYEYFTVYNELTKVKYVTEGMRKPAFLSGEQKKAIVDLLFKTNRKVTVKQLKEDYFKKIECFDSVEISGVEDRFNASLGTYHDLLKIIKDKDFLDNEENEDILEDIVLTLTLFEDREMIEERLKTYAHLFDDKVMKQLKRRRYTGWGRLSRKLINGIRDKQSGKTILDFLKSDGFANRNFMQLIHDDSLTFKEDIQKAQVSGQGDSLHEHIANLAGSPAIKKGILQTVKVVDELVKVMGRHKPENIVIEMARENQTTQKGQKNSRERMKRIEEGIKELGSQILKEHPVENTQLQNEKLYLYYLQNGRDMYVDQELDINRLSDYDVDHIVPQSFLKDDSIDNKVLTRSDKARGKSDNVPSEEVVKKMKNYWRQLLNAKLITQRKFDNLTKAERGGLSELDKAGFIKRQLVETRQITKHVAQILDSRMNTKYDENDKLIREVKVITLKSKLVSDFRKDFQFYKVREINNYHHAHDAYLNAVVGTALIKKYPKLESEFVYGDYKVYDVRKMIAKSEQEIGKATAKYFFYSNIMNFFKTEITLANGEIRKRPLIETNGETGEIVWDKGRDFATVRKVLSMPQVNIVKKTEVQTGGFSKESILPKRNSDKLIARKKDWDPKKYGGFDSPTVAYSVLVVAKVEKGKSKKLKSVKELLGITIMERSSFEKNPIDFLEAKGYKEVKKDLIIKLPKYSLFELENGRKRMLASAGELQKGNELALPSKYVNFLYLASHYEKLKGSPEDNEQKQLFVEQHKHYLDEIIEQISEFSKRVILADANLDKVLSAYNKHRDKPIREQAENIIHLFTLTNLGAPAAFKYFDTTIDRKRYTSTKEVLDATLIHQSITGLYETRIDLSQLGGDGGEAAAKGGGGSEAAAKGGVLNLEEEYRLHEKPVPSSIDPSWLQLFPTVWAERAGMGLANQVPPVVVELRSGASPVAVRQYPMSKEAREGIRPHIQRFLDLGVLVPCQSPWNTPLLPVKKPGTNDYRPVQDLREINKRVQDIHPTVPNPYNLLSSLPPSHTWYSVLDLKDAFFCLKLHPNSQPLFAFEWRDPEKGNTGQLTWTRLPQGFKNSPTLFNEALHRDLAPFRALNPQVVLLQYVDDLLVAAPTYRDCKEGTQKLLQELSKLGYRVSAKKAQLCQKEVTYLGYLLKEGKRWLTPARKATVMKIPPPTTPRQVREFLGTAGFCRLWIPGFASLAAPLYPLTKPSIPFIWTEEHQKAFDRIKEALLSAPALALPDLTKPFTLYVDERAGVARGVLTQTLGPWRRPVAYLSKKLDPVASGWPTCLKAVAAVALLLKDADKLTLGQNVTVIASHSLESIVRQPPDRWMTNARMTHYQSLLLNERVSFAPPAVLNPATLLPVESEATPVHRCSEILAEETGTRRDLKDQPLPGVPAWYTDGSSFIAEGKRRAGAAIVDGKRTVWASSLPEGTSAQKAELVALTQALRLAEGKDINIYTDSRYAFATAHIHGAIYKQRGWLTSAGKDIKNKEEILALLEAIHLPKRVAIIHCPGHQKGNDPVATGNRRADEAAKQAALSTRVLAETTKPAGKRTADGSEFEKRTADGSEFESPKKKAKVE

SEQ ID NO: 7688 - protein, 2100 aa, synthetic construct
MPAAKRVKLDGGDKKYSIGLDIGTNSVGWAVITDEYKVPSKKFKVLGNTDRHSIKKNLIGALLFDSGETAEATRLKRTARRRYTRRKNRICYLQEIFSNEMAKVDDSFFHRLEESFLVEEDKKHERHPIFGNIVDEVAYHEKYPTIYHLRKKLVDSTDKADLRLIYLALAHMIKFRGHFLIEGDLNPDNSDVDKLFIQLVQTYNQLFEENPINASGVDAKAILSARLSKSRRLENLIAQLPGEKKNGLFGNLIALSLGLTPNFKSNFDLAEDAKLQLSKDTYDDDLDNLLAQIGDQYADLFLAAKNLSDAILLSDILRVNTEITKAPLSASMIKRYDEHHQDLTLLKALVRQQLPEKYKEIFFDQSKNGYAGYIDGGASQEEFYKFIKPILEKMDGTEELLVKLNREDLLRKQRTFDNGSIPHQIHLGELHAILRRQEDFYPFLKDNREKIEKILTFRIPYYVGPLARGNSRFAWMTRKSEETITPWNFEEVVDKGASAQSFIERMTNFDKNLPNEKVLPKHSLLYEYFTVYNELTKVKYVTEGMRKPAFLSGEQKKAIVDLLFKTNRKVTVKQLKEDYFKKIECFDSVEISGVEDRFNASLGTYHDLLKIIKDKDFLDNEENEDILEDIVLTLTLFEDREMIEERLKTYAHLFDDKVMKQLKRRRYTGWGRLSRKLINGIRDKQSGKTILDFLKSDGFANRNFMQLIHDDSLTFKEDIQKAQVSGQGDSLHEHIANLAGSPAIKKGILQTVKVVDELVKVMGRHKPENIVIEMARENQTTQKGQKNSRERMKRIEEGIKELGSQILKEHPVENTQLQNEKLYLYYLQNGRDMYVDQELDINRLSDYDVDHIVPQSFLKDDSIDNKVLTRSDKARGKSDNVPSEEVVKKMKNYWRQLLNAKLITQRKFDNLTKAERGGLSELDKAGFIKRQLVETRQITKHVAQILDSRMNTKYDENDKLIREVKVITLKSKLVSDFRKDFQFYKVREINNYHHAHDAYLNAVVGTALIKKYPKLESEFVYGDYKVYDVRKMIAKSEQEIGKATAKYFFYSNIMNFFKTEITLANGEIRKRPLIETNGETGEIVWDKGRDFATVRKVLSMPQVNIVKKTEVQTGGFSKESILPKRNSDKLIARKKDWDPKKYGGFDSPTVAYSVLVVAKVEKGKSKKLKSVKELLGITIMERSSFEKNPIDFLEAKGYKEVKKDLIIKLPKYSLFELENGRKRMLASAGELQKGNELALPSKYVNFLYLASHYEKLKGSPEDNEQKQLFVEQHKHYLDEIIEQISEFSKRVILADANLDKVLSAYNKHRDKPIREQAENIIHLFTLTNLGAPAAFKYFDTTIDRKRYTSTKEVLDATLIHQSITGLYETRIDLSQLGGDGGEAAAKGGGGSEAAAKGGTLNIEDEYRLHETSKEPDVPLGSTWLSDFPQAWAETGGMGLAVRQAPLIIPLKATSTPVSIKQYPMSQEARLGIKPHIQRLLDQGILVPCQSPWNTPLLPVKKPGTNDYRPVQDLREVNKRVEDIHPTVPNPYNLLSGLPPSHQWYTVLDLKDAFFCLRLHPTSQPLFAFEWRDPEMGISGQLTWTRLPQGFKNSPTLFDEALHRDLADFRIQHPDLILLQYVDDLLLAATSEQDCQRGTRALLQTLGNLGYRASAKKAQICQKQVKYLGYLLKEGQRWLTEARKETVMGQPTPKTPRQLREFLGTAGFCRLWIPGFAEMAAPLYPLTKTGTLFNWGPDQQKAYQEIKQALLTAPALGLPDLTKPFELFVDEKQGYAKGVLTQKLGPWRRPVAYLSKKLDPVAAGWPPCLRMVAAIAVLTKDAGKLTMGQPLVILAPHAVEALVKQPPDRWLSNARMTHYQAMLLDTDRVQFGPVVALNPATLLPLPEKEAPHDCLEILAETHGTRPDLTDQPIPDADYTWYTDGSSFLQEGQRRAGAAVTTETEVIWARALPAGTSAQRAELIALTQALKMAEGKKLNVYTDSRYAFATAHVHGEIYRRRGLLTSEGREIKNKNEILALLKALFLPKRLSIIHCPGHQKGNSAEARGNRMADQAAREAAMKAVLETSTLLAGKRTADGSEFEKRTADGSEFESPKKKAKVE

SEQ ID NO: 7689 - protein, 2103 aa, synthetic construct
MPAAKRVKLDGGDKKYSIGLDIGTNSVGWAVITDEYKVPSKKFKVLGNTDRHSIKKNLIGALLFDSGETAEATRLKRTARRRYTRRKNRICYLQEIFSNEMAKVDDSFFHRLEESFLVEEDKKHERHPIFGNIVDEVAYHEKYPTIYHLRKKLVDSTDKADLRLIYLALAHMIKFRGHFLIEGDLNPDNSDVDKLFIQLVQTYNQLFEENPINASGVDAKAILSARLSKSRRLENLIAQLPGEKKNGLFGNLIALSLGLTPNFKSNFDLAEDAKLQLSKDTYDDDLDNLLAQIGDQYADLFLAAKNLSDAILLSDILRVNTEITKAPLSASMIKRYDEHHQDLTLLKALVRQQLPEKYKEIFFDQSKNGYAGYIDGGASQEEFYKFIKPILEKMDGTEELLVKLNREDLLRKQRTFDNGSIPHQIHLGELHAILRRQEDFYPFLKDNREKIEKILTFRIPYYVGPLARGNSRFAWMTRKSEETITPWNFEEVVDKGASAQSFIERMTNFDKNLPNEKVLPKHSLLYEYFTVYNELTKVKYVTEGMRKPAFLSGEQKKAIVDLLFKTNRKVTVKQLKEDYFKKIECFDSVEISGVEDRFNASLGTYHDLLKIIKDKDFLDNEENEDILEDIVLTLTLFEDREMIEERLKTYAHLFDDKVMKQLKRRRYTGWGRLSRKLINGIRDKQSGKTILDFLKSDGFANRNFMQLIHDDSLTFKEDIQKAQVSGQGDSLHEHIANLAGSPAIKKGILQTVKVVDELVKVMGRHKPENIVIEMARENQTTQKGQKNSRERMKRIEEGIKELGSQILKEHPVENTQLQNEKLYLYYLQNGRDMYVDQELDINRLSDYDVDHIVPQSFLKDDSIDNKVLTRSDKARGKSDNVPSEEVVKKMKNYWRQLLNAKLITQRKFDNLTKAERGGLSELDKAGFIKRQLVETRQITKHVAQILDSRMNTKYDENDKLIREVKVITLKSKLVSDFRKDFQFYKVREINNYHHAHDAYLNAVVGTALIKKYPKLESEFVYGDYKVYDVRKMIAKSEQEIGKATAKYFFYSNIMNFFKTEITLANGEIRKRPLIETNGETGEIVWDKGRDFATVRKVLSMPQVNIVKKTEVQTGGFSKESILPKRNSDKLIARKKDWDPKKYGGFDSPTVAYSVLVVAKVEKGKSKKLKSVKELLGITIMERSSFEKNPIDFLEAKGYKEVKKDLIIKLPKYSLFELENGRKRMLASAGELQKGNELALPSKYVNFLYLASHYEKLKGSPEDNEQKQLFVEQHKHYLDEIIEQISEFSKRVILADANLDKVLSAYNKHRDKPIREQAENIIHLFTLTNLGAPAAFKYFDTTIDRKRYTSTKEVLDATLIHQSITGLYETRIDLSQLGGDGGSGSETPGTSESATPESGGTAPLEEEYRLFLEAPIQNVTLLEQWKREIPKVWAEINPPGLASTQAPIHVQLLSTALPVRVRQYPITLEAKRSLRETIRKFRAAGILRPVHSPWNTPLLPVRKSGTSEYRMVQDLREVNKRVETIHPTVPNPYTLLSLLPPDRIWYSVLDLKDAFFCIPLAPESQLIFAFEWADAEEGESGQLTWTRLPQGFKNSPTLFNEALNRDLQGFRLDHPSVSLLQYVDDLLIAADTQAACLSATRDLLMTLAELGYRVSGKKAQLCQEEVTYLGFKIHKGSRSLSNSRTQAILQIPVPKTKRQVREFLGTIGYCRLWIPGFAELAQPLYAATRPGNDPLVWGEKEEEAFQSLKLALTQPPALALPSLDKPFQLFVEETSGAAKGVLTQALGPWKRPVAYLSKRLDPVAAGWPRCLRAIAAAALLTREASKLTFGQDIEITSSHNLESLLRSPPDKWLTNARITQYQVLLLDPPRVRFKQTAALNPATLLPETDDTLPIHHCLDTLDSLTSTRPDLTDQPLAQAEATLFTDGSSYIRDGKRYAGAAVVTLDSVIWAEPLPIGTSAQKAELIALTKALEWSKDKSVNIYTDSRYAFATLHVHGMIYRERGWLTAGGKAIKNAPEILALLTAVWLPKRVAVMHCKGHQKDDAPTSTGNRRADEVAREVAIRPLSTQATISAGKRTADGSEFEKRTADGSEFESPKKKAKVE

SEQ ID NO: 7690 - protein, 2178 aa, synthetic construct
MPAAKRVKLDGGDKKYSIGLDIGTNSVGWAVITDEYKVPSKKFKVLGNTDRHSIKKNLIGALLFDSGETAEATRLKRTARRRYTRRKNRICYLQEIFSNEMAKVDDSFFHRLEESFLVEEDKKHERHPIFGNIVDEVAYHEKYPTIYHLRKKLVDSTDKADLRLIYLALAHMIKFRGHFLIEGDLNPDNSDVDKLFIQLVQTYNQLFEENPINASGVDAKAILSARLSKSRRLENLIAQLPGEKKNGLFGNLIALSLGLTPNFKSNFDLAEDAKLQLSKDTYDDDLDNLLAQIGDQYADLFLAAKNLSDAILLSDILRVNTEITKAPLSASMIKRYDEHHQDLTLLKALVRQQLPEKYKEIFFDQSKNGYAGYIDGGASQEEFYKFIKPILEKMDGTEELLVKLNREDLLRKQRTFDNGSIPHQIHLGELHAILRRQEDFYPFLKDNREKIEKILTFRIPYYVGPLARGNSRFAWMTRKSEETITPWNFEEVVDKGASAQSFIERMTNFDKNLPNEKVLPKHSLLYEYFTVYNELTKVKYVTEGMRKPAFLSGEQKKAIVDLLFKTNRKVTVKQLKEDYFKKIECFDSVEISGVEDRFNASLGTYHDLLKIIKDKDFLDNEENEDILEDIVLTLTLFEDREMIEERLKTYAHLFDDKVMKQLKRRRYTGWGRLSRKLINGIRDKQSGKTILDFLKSDGFANRNFMQLIHDDSLTFKEDIQKAQVSGQGDSLHEHIANLAGSPAIKKGILQTVKVVDELVKVMGRHKPENIVIEMARENQTTQKGQKNSRERMKRIEEGIKELGSQILKEHPVENTQLQNEKLYLYYLQNGRDMYVDQELDINRLSDYDVDHIVPQSFLKDDSIDNKVLTRSDKARGKSDNVPSEEVVKKMKNYWRQLLNAKLITQRKFDNLTKAERGGLSELDKAGFIKRQLVETRQITKHVAQILDSRMNTKYDENDKLIREVKVITLKSKLVSDFRKDFQFYKVREINNYHHAHDAYLNAVVGTALIKKYPKLESEFVYGDYKVYDVRKMIAKSEQEIGKATAKYFFYSNIMNFFKTEITLANGEIRKRPLIETNGETGEIVWDKGRDFATVRKVLSMPQVNIVKKTEVQTGGFSKESILPKRNSDKLIARKKDWDPKKYGGFDSPTVAYSVLVVAKVEKGKSKKLKSVKELLGITIMERSSFEKNPIDFLEAKGYKEVKKDLIIKLPKYSLFELENGRKRMLASAGELQKGNELALPSKYVNFLYLASHYEKLKGSPEDNEQKQLFVEQHKHYLDEIIEQISEFSKRVILADANLDKVLSAYNKHRDKPIREQAENIIHLFTLTNLGAPAAFKYFDTTIDRKRYTSTKEVLDATLIHQSITGLYETRIDLSQLGGDGGSGSETPGTSESATPESGGMDLLKPLTVERKGVKIKGYWNSQADITCVPKDLLQGEEPVRQQNVTTIHGTQEGDVYYVNLKIDGRRINTEVIGTTLDYAIITPGDVPWILKKPLELTIKLDLEEQQGTLLNNSILSKKGKEELKQLFEKYSALWQSWENQVGHRRIRPHKIATGTVKPTPQKQYHINPKAKPDIQIVINDLLKQGVLIQKESTMNTPVYPVPKPNGRWRMVLDYRAVNKVTPLIAVQNQHSYGILGSLFKGRYKTTIDLSNGFWAHPIVPEDYWITAFTWQGKQYCWTVLPQGFLNSPGLFTGDVVDLLQGIPNVEVYVDDVYISHDSEKEHLEYLDILFNRLKEAGYIISLKKSNIANSIVDFLGFQITNEGRGLTDTFKEKLENITAPTTLKQLQSILGLLNFARNFIPDFTELIAPLYALIPKSTKNYVPWQIEHSTTLETLITKLNGAEYLQGRKGDKTLIMKVNASYTTGYIRYYNEGEKKPISYVSIVFSKTELKFTELEKLLTTVHKGLLKALDLSMGQNIHVYSPIVSMQNIQKTPQTAKKALASRWLSWLSYLEDPRIRFFYDPQMPALKDLPAVDTGKDNKKHPSNFQHIFYTDGSAITSPTKEGHLNAGMGIVYFINKDGNLQKQQEWSISLGNHTAQFAEIAAFEFALKKCLPLGGNILVVTDSNYVAKAYNEELDVWASNGFVNNRKKPLKHISKWKSVADLKRLRPDVVVTHEPGHQKLDSSPHAYGNNLADQLATQASFKVHAGKRTADGSEFEKRTADGSEFESPKKKAKVE

SEQ ID NO: 7691 - protein, 2100 aa, synthetic construct
MPAAKRVKLDGGDKKYSIGLDIGTNSVGWAVITDEYKVPSKKFKVLGNTDRHSIKKNLIGALLFDSGETAEATRLKRTARRRYTRRKNRICYLQEIFSNEMAKVDDSFFHRLEESFLVEEDKKHERHPIFGNIVDEVAYHEKYPTIYHLRKKLVDSTDKADLRLIYLALAHMIKFRGHFLIEGDLNPDNSDVDKLFIQLVQTYNQLFEENPINASGVDAKAILSARLSKSRRLENLIAQLPGEKKNGLFGNLIALSLGLTPNFKSNFDLAEDAKLQLSKDTYDDDLDNLLAQIGDQYADLFLAAKNLSDAILLSDILRVNTEITKAPLSASMIKRYDEHHQDLTLLKALVRQQLPEKYKEIFFDQSKNGYAGYIDGGASQEEFYKFIKPILEKMDGTEELLVKLNREDLLRKQRTFDNGSIPHQIHLGELHAILRRQEDFYPFLKDNREKIEKILTFRIPYYVGPLARGNSRFAWMTRKSEETITPWNFEEVVDKGASAQSFIERMTNFDKNLPNEKVLPKHSLLYEYFTVYNELTKVKYVTEGMRKPAFLSGEQKKAIVDLLFKTNRKVTVKQLKEDYFKKIECFDSVEISGVEDRFNASLGTYHDLLKIIKDKDFLDNEENEDILEDIVLTLTLFEDREMIEERLKTYAHLFDDKVMKQLKRRRYTGWGRLSRKLINGIRDKQSGKTILDFLKSDGFANRNFMQLIHDDSLTFKEDIQKAQVSGQGDSLHEHIANLAGSPAIKKGILQTVKVVDELVKVMGRHKPENIVIEMARENQTTQKGQKNSRERMKRIEEGIKELGSQILKEHPVENTQLQNEKLYLYYLQNGRDMYVDQELDINRLSDYDVDHIVPQSFLKDDSIDNKVLTRSDKARGKSDNVPSEEVVKKMKNYWRQLLNAKLITQRKFDNLTKAERGGLSELDKAGFIKRQLVETRQITKHVAQILDSRMNTKYDENDKLIREVKVITLKSKLVSDFRKDFQFYKVREINNYHHAHDAYLNAVVGTALIKKYPKLESEFVYGDYKVYDVRKMIAKSEQEIGKATAKYFFYSNIMNFFKTEITLANGEIRKRPLIETNGETGEIVWDKGRDFATVRKVLSMPQVNIVKKTEVQTGGFSKESILPKRNSDKLIARKKDWDPKKYGGFDSPTVAYSVLVVAKVEKGKSKKLKSVKELLGITIMERSSFEKNPIDFLEAKGYKEVKKDLIIKLPKYSLFELENGRKRMLASAGELQKGNELALPSKYVNFLYLASHYEKLKGSPEDNEQKQLFVEQHKHYLDEIIEQISEFSKRVILADANLDKVLSAYNKHRDKPIREQAENIIHLFTLTNLGAPAAFKYFDTTIDRKRYTSTKEVLDATLIHQSITGLYETRIDLSQLGGDGGSGSETPGTSESATPESGGTLQLEEEYRLFEPESTQKQEMDIWLKNFPQAWAETGGMGTAHCQAPVLIQLKATATPISIRQYPMPHEAYQGIKPHIRRMLDQGILKPCQSPWNTPLLPVKKPGTEDYRPVQDLREVNKRVEDIHPTVPNPYNLLSTLPPSHPWYTVLDLKDAFFCLRLHSESQLLFAFEWRDPEIGLSGQLTWTRLPQGFKNSPTLFNEALHSDLADFRVRYPALVLLQYVDDLLLAAATRTECLEGTKALLETLGNKGYRASAKKAQICLQEVTYLGYSLKDGQRWLTKARKEAILSIPVPKNSRQVREFLGTAGYCRLWIPGFAELAAPLYPLTRPGTLFQWGTEQQLAFEDIKKALLSSPALGLPDITKPFELFIDENSGFAKGVLVQKLGPWKRPVAYLSKKLDTVASGWPPCLRMVAAIAILVKDAGKLTLGQPLTILTSHPVEALVRQPPNKWLSNARMTHYQAMLLDAERVHFGPTVSLNPATLLPLPSGGNHHDCLQILAETHGTRPDLTDQPLPDADLTWYTDGSSFIRNGEREAGAAVTTESEVIWAAPLPPGTSAQRAELIALTQALKMAEGKKLTVYTDSRYAFATTHVHGEIYRRRGWLTSEGKEIKNKNEILALLEALFLPKRLSIIHCPGHQKGDSPQAKGNRLADDTAKKAATETHSSLTVLPAGKRTADGSEFEKRTADGSEFESPKKKAKVE

SEQ ID NO: 7692 - protein, 2011 aa, synthetic construct
MPAAKRVKLDGGDKKYSIGLDIGTNSVGWAVITDEYKVPSKKFKVLGNTDRHSIKKNLIGALLFDSGETAEATRLKRTARRRYTRRKNRICYLQEIFSNEMAKVDDSFFHRLEESFLVEEDKKHERHPIFGNIVDEVAYHEKYPTIYHLRKKLVDSTDKADLRLIYLALAHMIKFRGHFLIEGDLNPDNSDVDKLFIQLVQTYNQLFEENPINASGVDAKAILSARLSKSRRLENLIAQLPGEKKNGLFGNLIALSLGLTPNFKSNFDLAEDAKLQLSKDTYDDDLDNLLAQIGDQYADLFLAAKNLSDAILLSDILRVNTEITKAPLSASMIKRYDEHHQDLTLLKALVRQQLPEKYKEIFFDQSKNGYAGYIDGGASQEEFYKFIKPILEKMDGTEELLVKLNREDLLRKQRTFDNGSIPHQIHLGELHAILRRQEDFYPFLKDNREKIEKILTFRIPYYVGPLARGNSRFAWMTRKSEETITPWNFEEVVDKGASAQSFIERMTNFDKNLPNEKVLPKHSLLYEYFTVYNELTKVKYVTEGMRKPAFLSGEQKKAIVDLLFKTNRKVTVKQLKEDYFKKIECFDSVEISGVEDRFNASLGTYHDLLKIIKDKDFLDNEENEDILEDIVLTLTLFEDREMIEERLKTYAHLFDDKVMKQLKRRRYTGWGRLSRKLINGIRDKQSGKTILDFLKSDGFANRNFMQLIHDDSLTFKEDIQKAQVSGQGDSLHEHIANLAGSPAIKKGILQTVKVVDELVKVMGRHKPENIVIEMARENQTTQKGQKNSRERMKRIEEGIKELGSQILKEHPVENTQLQNEKLYLYYLQNGRDMYVDQELDINRLSDYDVDHIVPQSFLKDDSIDNKVLTRSDKARGKSDNVPSEEVVKKMKNYWRQLLNAKLITQRKFDNLTKAERGGLSELDKAGFIKRQLVETRQITKHVAQILDSRMNTKYDENDKLIREVKVITLKSKLVSDFRKDFQFYKVREINNYHHAHDAYLNAVVGTALIKKYPKLESEFVYGDYKVYDVRKMIAKSEQEIGKATAKYFFYSNIMNFFKTEITLANGEIRKRPLIETNGETGEIVWDKGRDFATVRKVLSMPQVNIVKKTEVQTGGFSKESILPKRNSDKLIARKKDWDPKKYGGFDSPTVAYSVLVVAKVEKGKSKKLKSVKELLGITIMERSSFEKNPIDFLEAKGYKEVKKDLIIKLPKYSLFELENGRKRMLASAGELQKGNELALPSKYVNFLYLASHYEKLKGSPEDNEQKQLFVEQHKHYLDEIIEQISEFSKRVILADANLDKVLSAYNKHRDKPIREQAENIIHLFTLTNLGAPAAFKYFDTTIDRKRYTSTKEVLDATLIHQSITGLYETRIDLSQLGGDGGSGSETPGTSESATPESGGPLGTSDSPVTHADPIDWKSEEPVWVDQWPLTQEKLSAAQQLVQEQLRLGHIEPSTSAWNSPIFVIKKKSGKWRLLQDLRKVNETMMHMGALQPGLPTPSPIPDKSYIIVIDLKDCFYTIPLAPQDCKRFAFSLPSVNFKEPMQRYQWRVLPQGMTNSPTLCQKFVATAIAPVRQRFPQLYLVHYMDDILLAHTDEHLLYQAFSILKQHLSLNGLVIADEKIQTHFPYNYLGFSLYPRVYNTQLVKLQTDHLKTLNDFQKLLGDINWIRPYLKLPTYTLQPLFDILKGDSDPASPRTLSLEGRTALQSIEEAIRQQQITYCDYQRSWGLYILPTPRAPTGVLYQDKPLRWIYLSATPTKHLLPYYELVAKIIAKGRHEAIQYFGMEPPFICVPYALEQQDWLFQFSDNWSIAFANYPGQITHHYPSDKLLQFASSHAFIFPKIVRRQPIPEATLIFTDGSSNGTAALIINHQTYYAQTSFSSAQVVELFAVHQALLTVPTSFNLFTDSSYVVGALQMIETVPIIGTTSPEVLNLFTLIQQVLHCRQHPCFFGHIRAHSTLPGALVQGNHTADVLTKQVFFQSAGKRTADGSEFEKRTADGSEFESPKKKAKVE

SEQ ID NO: 7693 - protein, 2223 aa, synthetic construct
MPAAKRVKLDGGDKKYSIGLDIGTNSVGWAVITDEYKVPSKKFKVLGNTDRHSIKKNLIGALLFDSGETAEATRLKRTARRRYTRRKNRICYLQEIFSNEMAKVDDSFFHRLEESFLVEEDKKHERHPIFGNIVDEVAYHEKYPTIYHLRKKLVDSTDKADLRLIYLALAHMIKFRGHFLIEGDLNPDNSDVDKLFIQLVQTYNQLFEENPINASGVDAKAILSARLSKSRRLENLIAQLPGEKKNGLFGNLIALSLGLTPNFKSNFDLAEDAKLQLSKDTYDDDLDNLLAQIGDQYADLFLAAKNLSDAILLSDILRVNTEITKAPLSASMIKRYDEHHQDLTLLKALVRQQLPEKYKEIFFDQSKNGYAGYIDGGASQEEFYKFIKPILEKMDGTEELLVKLNREDLLRKQRTFDNGSIPHQIHLGELHAILRRQEDFYPFLKDNREKIEKILTFRIPYYVGPLARGNSRFAWMTRKSEETITPWNFEEVVDKGASAQSFIERMTNFDKNLPNEKVLPKHSLLYEYFTVYNELTKVKYVTEGMRKPAFLSGEQKKAIVDLLFKTNRKVTVKQLKEDYFKKIECFDSVEISGVEDRFNASLGTYHDLLKIIKDKDFLDNEENEDILEDIVLTLTLFEDREMIEERLKTYAHLFDDKVMKQLKRRRYTGWGRLSRKLINGIRDKQSGKTILDFLKSDGFANRNFMQLIHDDSLTFKEDIQKAQVSGQGDSLHEHIANLAGSPAIKKGILQTVKVVDELVKVMGRHKPENIVIEMARENQTTQKGQKNSRERMKRIEEGIKELGSQILKEHPVENTQLQNEKLYLYYLQNGRDMYVDQELDINRLSDYDVDHIVPQSFLKDDSIDNKVLTRSDKARGKSDNVPSEEVVKKMKNYWRQLLNAKLITQRKFDNLTKAERGGLSELDKAGFIKRQLVETRQITKHVAQILDSRMNTKYDENDKLIREVKVITLKSKLVSDFRKDFQFYKVREINNYHHAHDAYLNAVVGTALIKKYPKLESEFVYGDYKVYDVRKMIAKSEQEIGKATAKYFFYSNIMNFFKTEITLANGEIRKRPLIETNGETGEIVWDKGRDFATVRKVLSMPQVNIVKKTEVQTGGFSKESILPKRNSDKLIARKKDWDPKKYGGFDSPTVAYSVLVVAKVEKGKSKKLKSVKELLGITIMERSSFEKNPIDFLEAKGYKEVKKDLIIKLPKYSLFELENGRKRMLASAGELQKGNELALPSKYVNFLYLASHYEKLKGSPEDNEQKQLFVEQHKHYLDEIIEQISEFSKRVILADANLDKVLSAYNKHRDKPIREQAENIIHLFTLTNLGAPAAFKYFDTTIDRKRYTSTKEVLDATLIHQSITGLYETRIDLSQLGGDGGSGSETPGTSESATPESGGTLGDQGSRGSDPLPEPRVTLTVEGIPTEFLVNTGAEHSVLTKPMGKMGSKRTVVAGATGSKVYPWTTKRLLKIGQKQVTHSFLVIPECPAPLLGRDLLTKLKAQIQFSTEGPQVTWEDRPAMCLVLNLEEEYRLHEKPVPPSIDPSWLQLFPMVWAEKAGMGLANQVPPVVVELKSDASPVAVRQYPMSKEAREGIRPHIQRFLDLGILVPCQSPWNTPLLPVKKPGTNDYRPVQDLREVNKRVQDIHPTVPNPYNLLSSLPPSHTWYSVLDLKDAFFCLKLHPNSQPLFAFEWRDPEKGNTGQLTWTRLPQGFKNSPTLFDEALHRDLASFRALNPQVVMLQYVDDLLVAAPTYRDCKEGTRRLLQELSKLGYRVSAKKAQLCREEVTYLGYLLKGGKRWLTPARKATVMKIPTPTTPRQVREFLGTAGFCRLWIPGFASLAAPLYPLTREKVPFTWTEAHQEAFGRIKEALLSAPALALPDLTKPFALYVDEKEGVARGVLTQTLGPWRRPVAYLSKKLDPVASGWPTCLKAIAAVALLLKDADKLTLGQNVLVIAPHNLESIVRQPPDRWMTNARMTHYQSLLLNERVSFAPPAILNPATLLPVESDDTPIHICSEILAEETGTRPDLRDQPLPGVPAWYTDGSSFIMDGRRQAGAAIVDNKRTVWASNLPEGTSAQKAELIALTQALRLAEGKSINIYTDSRYAFATAHVHGAIYKQRGLLTSAGKDIKNKEEILALLEAIHLPKRVAIIHCPGHQRGTDPVATGNRKADEAAKQAAQSTRILTETTKNAGKRTADGSEFEKRTADGSEFESPKKKAKVE

SEQ ID NO: 7694 - protein, 2132 aa, synthetic construct
MPAAKRVKLDGGDKKYSIGLDIGTNSVGWAVITDEYKVPSKKFKVLGNTDRHSIKKNLIGALLFDSGETAEATRLKRTARRRYTRRKNRICYLQEIFSNEMAKVDDSFFHRLEESFLVEEDKKHERHPIFGNIVDEVAYHEKYPTIYHLRKKLVDSTDKADLRLIYLALAHMIKFRGHFLIEGDLNPDNSDVDKLFIQLVQTYNQLFEENPINASGVDAKAILSARLSKSRRLENLIAQLPGEKKNGLFGNLIALSLGLTPNFKSNFDLAEDAKLQLSKDTYDDDLDNLLAQIGDQYADLFLAAKNLSDAILLSDILRVNTEITKAPLSASMIKRYDEHHQDLTLLKALVRQQLPEKYKEIFFDQSKNGYAGYIDGGASQEEFYKFIKPILEKMDGTEELLVKLNREDLLRKQRTFDNGSIPHQIHLGELHAILRRQEDFYPFLKDNREKIEKILTFRIPYYVGPLARGNSRFAWMTRKSEETITPWNFEEVVDKGASAQSFIERMTNFDKNLPNEKVLPKHSLLYEYFTVYNELTKVKYVTEGMRKPAFLSGEQKKAIVDLLFKTNRKVTVKQLKEDYFKKIECFDSVEISGVEDRFNASLGTYHDLLKIIKDKDFLDNEENEDILEDIVLTLTLFEDREMIEERLKTYAHLFDDKVMKQLKRRRYTGWGRLSRKLINGIRDKQSGKTILDFLKSDGFANRNFMQLIHDDSLTFKEDIQKAQVSGQGDSLHEHIANLAGSPAIKKGILQTVKVVDELVKVMGRHKPENIVIEMARENQTTQKGQKNSRERMKRIEEGIKELGSQILKEHPVENTQLQNEKLYLYYLQNGRDMYVDQELDINRLSDYDVDHIVPQSFLKDDSIDNKVLTRSDKARGKSDNVPSEEVVKKMKNYWRQLLNAKLITQRKFDNLTKAERGGLSELDKAGFIKRQLVETRQITKHVAQILDSRMNTKYDENDKLIREVKVITLKSKLVSDFRKDFQFYKVREINNYHHAHDAYLNAVVGTALIKKYPKLESEFVYGDYKVYDVRKMIAKSEQEIGKATAKYFFYSNIMNFFKTEITLANGEIRKRPLIETNGETGEIVWDKGRDFATVRKVLSMPQVNIVKKTEVQTGGFSKESILPKRNSDKLIARKKDWDPKKYGGFDSPTVAYSVLVVAKVEKGKSKKLKSVKELLGITIMERSSFEKNPIDFLEAKGYKEVKKDLIIKLPKYSLFELENGRKRMLASAGELQKGNELALPSKYVNFLYLASHYEKLKGSPEDNEQKQLFVEQHKHYLDEIIEQISEFSKRVILADANLDKVLSAYNKHRDKPIREQAENIIHLFTLTNLGAPAAFKYFDTTIDRKRYTSTKEVLDATLIHQSITGLYETRIDLSQLGGDGGSGSETPGTSESATPESGGLLGRDLLTKLKAQIQFSTEGPQVTWEDRPAMCLVLNLEEEYRLHEKPVPPSIDPSWLQLFPMVWAEKAGMGLANQVPPVVVELKSDASPVAVRQYPMSKEAREGIRPHIQRFLDLGILVPCQSPWNTPLLPVKKPGTNDYRPVQDLREVNKRVQDIHPTVPNPYNLLSSLPPSHTWYSVLDLKDAFFCLKLHPNSQPLFAFEWRDPEKGNTGQLTWTRLPQGFKNSPTLFNEALHRDLASFRALNPQVVMLQYVDDLLVAAPTYRDCKEGTRRLLQELSKLGYRVSAKKAQLCREEVTYLGYLLKGGKRWLTPARKATVMKIPTPTTPRQVREFLGKAGFCRLFIPGFASLAAPLYPLTRPKVPFTWTEAHQEAFGRIKEALLSAPALALPDLTKPFALYVDEKEGVARGVLTQTLGPWRRPVAYLSKKLDPVASGWPTCLKAIAAVALLLKDADKLTLGQNVLVIAPHNLESIVRQPPDRWMTNARMTHYQSLLLNERVSFAPPAILNPATLLPVESDDTPIHICSEILAEETGTRPDLRDQPLPGVPAWYTDGSSFIMDGRRQAGAAIVDNKRTVWASNLPEGTSAQKAELIALTQALRLAEGKSINIYTDSRYAFATAHVHGAIYKQRGWLTSAGKDIKNKEEILALLEAIHLPKRVAIIHCPGHQRGTDPVATGNRKADEAAKQAAQSTRILTETTKNAGKRTADGSEFEKRTADGSEFESPKKKAKVE

SEQ ID NO: 7695 - protein, 2223 aa, synthetic construct
MPAAKRVKLDGGDKKYSIGLDIGTNSVGWAVITDEYKVPSKKFKVLGNTDRHSIKKNLIGALLFDSGETAEATRLKRTARRRYTRRKNRICYLQEIFSNEMAKVDDSFFHRLEESFLVEEDKKHERHPIFGNIVDEVAYHEKYPTIYHLRKKLVDSTDKADLRLIYLALAHMIKFRGHFLIEGDLNPDNSDVDKLFIQLVQTYNQLFEENPINASGVDAKAILSARLSKSRRLENLIAQLPGEKKNGLFGNLIALSLGLTPNFKSNFDLAEDAKLQLSKDTYDDDLDNLLAQIGDQYADLFLAAKNLSDAILLSDILRVNTEITKAPLSASMIKRYDEHHQDLTLLKALVRQQLPEKYKEIFFDQSKNGYAGYIDGGASQEEFYKFIKPILEKMDGTEELLVKLNREDLLRKQRTFDNGSIPHQIHLGELHAILRRQEDFYPFLKDNREKIEKILTFRIPYYVGPLARGNSRFAWMTRKSEETITPWNFEEVVDKGASAQSFIERMTNFDKNLPNEKVLPKHSLLYEYFTVYNELTKVKYVTEGMRKPAFLSGEQKKAIVDLLFKTNRKVTVKQLKEDYFKKIECFDSVEISGVEDRFNASLGTYHDLLKIIKDKDFLDNEENEDILEDIVLTLTLFEDREMIEERLKTYAHLFDDKVMKQLKRRRYTGWGRLSRKLINGIRDKQSGKTILDFLKSDGFANRNFMQLIHDDSLTFKEDIQKAQVSGQGDSLHEHIANLAGSPAIKKGILQTVKVVDELVKVMGRHKPENIVIEMARENQTTQKGQKNSRERMKRIEEGIKELGSQILKEHPVENTQLQNEKLYLYYLQNGRDMYVDQELDINRLSDYDVDHIVPQSFLKDDSIDNKVLTRSDKARGKSDNVPSEEVVKKMKNYWRQLLNAKLITQRKFDNLTKAERGGLSELDKAGFIKRQLVETRQITKHVAQILDSRMNTKYDENDKLIREVKVITLKSKLVSDFRKDFQFYKVREINNYHHAHDAYLNAVVGTALIKKYPKLESEFVYGDYKVYDVRKMIAKSEQEIGKATAKYFFYSNIMNFFKTEITLANGEIRKRPLIETNGETGEIVWDKGRDFATVRKVLSMPQVNIVKKTEVQTGGFSKESILPKRNSDKLIARKKDWDPKKYGGFDSPTVAYSVLVVAKVEKGKSKKLKSVKELLGITIMERSSFEKNPIDFLEAKGYKEVKKDLIIKLPKYSLFELENGRKRMLASAGELQKGNELALPSKYVNFLYLASHYEKLKGSPEDNEQKQLFVEQHKHYLDEIIEQISEFSKRVILADANLDKVLSAYNKHRDKPIREQAENIIHLFTLTNLGAPAAFKYFDTTIDRKRYTSTKEVLDATLIHQSITGLYETRIDLSQLGGDGGSGSETPGTSESATPESGGTLGDQGSRGSDPLPEPRVTLTVEGIPTEFLVNTGAEHSVLTKPMGKMGSKRTVVAGATGSKVYPWTTKRLLKIGQKQVTHSFLVIPECPAPLLGRDLLTKLKAQIQFSTEGPQVTWEDRPAMCLVLNLEEEYRLHEKPVPPSIDPSWLQLFPMVWAEKAGMGLANQVPPVVVELKSDASPVAVRQYPMSKEAREGIRPHIQRFLDLGILVPCQSPWNTPLLPVKKPGTNDYRPVQDLREVNKRVQDIHPTVPNPYNLLSSLPPSHTWYSVLDLKDAFFCLKLHPNSQPLFAFEWRDPEKGNTGQLTWTRLPQGFKNSPTLFNEALHRDLASFRALNPQVVMLQYVDDLLVAAPTYRDCKEGTRRLLQELSKLGYRVSAKKAQLCREEVTYLGYLLKGGKRWLTPARKATVMKIPTPTTPRQVREFLGTAGFCRLWIPGFASLAAPLYPLTRPKVPFTWTEAHQEAFGRIKEALLSAPALALPDLTKPFALYVDEKEGVARGVLTQTLGPWRRPVAYLSKKLDPVASGWPTCLKAIAAVALLLKDADKLTLGQNVLVIAPHNLESIVRQPPDRWMTNARMTHYQSLLLNERVSFAPPAILNPATLLPVESDDTPIHICSEILAEETGTRPDLRDQPLPGVPAWYTDGSSFIMDGRRQAGAAIVDNKRTVWASNLPEGTSAQKAELIALTQALRLAEGKSINIYTDSRYAFATAHVHGAIYKQRGWLTSAGKDIKNKEEILALLEAIHLPKRVAIIHCPGHQRGTDPVATGNRKADEAAKQAAQSTRILTETTKNAGKRTADGSEFEKRTADGSEFESPKKKAKVE

SEQ ID NO: 7696 - protein, 2101 aa, synthetic construct
MPAAKRVKLDGGDKKYSIGLDIGTNSVGWAVITDEYKVPSKKFKVLGNTDRHSIKKNLIGALLFDSGETAEATRLKRTARRRYTRRKNRICYLQEIFSNEMAKVDDSFFHRLEESFLVEEDKKHERHPIFGNIVDEVAYHEKYPTIYHLRKKLVDSTDKADLRLIYLALAHMIKFRGHFLIEGDLNPDNSDVDKLFIQLVQTYNQLFEENPINASGVDAKAILSARLSKSRRLENLIAQLPGEKKNGLFGNLIALSLGLTPNFKSNFDLAEDAKLQLSKDTYDDDLDNLLAQIGDQYADLFLAAKNLSDAILLSDILRVNTEITKAPLSASMIKRYDEHHQDLTLLKALVRQQLPEKYKEIFFDQSKNGYAGYIDGGASQEEFYKFIKPILEKMDGTEELLVKLNREDLLRKQRTFDNGSIPHQIHLGELHAILRRQEDFYPFLKDNREKIEKILTFRIPYYVGPLARGNSRFAWMTRKSEETITPWNFEEVVDKGASAQSFIERMTNFDKNLPNEKVLPKHSLLYEYFTVYNELTKVKYVTEGMRKPAFLSGEQKKAIVDLLFKTNRKVTVKQLKEDYFKKIECFDSVEISGVEDRFNASLGTYHDLLKIIKDKDFLDNEENEDILEDIVLTLTLFEDREMIEERLKTYAHLFDDKVMKQLKRRRYTGWGRLSRKLINGIRDKQSGKTILDFLKSDGFANRNFMQLIHDDSLTFKEDIQKAQVSGQGDSLHEHIANLAGSPAIKKGILQTVKVVDELVKVMGRHKPENIVIEMARENQTTQKGQKNSRERMKRIEEGIKELGSQILKEHPVENTQLQNEKLYLYYLQNGRDMYVDQELDINRLSDYDVDHIVPQSFLKDDSIDNKVLTRSDKARGKSDNVPSEEVVKKMKNYWRQLLNAKLITQRKFDNLTKAERGGLSELDKAGFIKRQLVETRQITKHVAQILDSRMNTKYDENDKLIREVKVITLKSKLVSDFRKDFQFYKVREINNYHHAHDAYLNAVVGTALIKKYPKLESEFVYGDYKVYDVRKMIAKSEQEIGKATAKYFFYSNIMNFFKTEITLANGEIRKRPLIETNGETGEIVWDKGRDFATVRKVLSMPQVNIVKKTEVQTGGFSKESILPKRNSDKLIARKKDWDPKKYGGFDSPTVAYSVLVVAKVEKGKSKKLKSVKELLGITIMERSSFEKNPIDFLEAKGYKEVKKDLIIKLPKYSLFELENGRKRMLASAGELQKGNELALPSKYVNFLYLASHYEKLKGSPEDNEQKQLFVEQHKHYLDEIIEQISEFSKRVILADANLDKVLSAYNKHRDKPIREQAENIIHLFTLTNLGAPAAFKYFDTTIDRKRYTSTKEVLDATLIHQSITGLYETRIDLSQLGGDGGSGSETPGTSESATPESGGTLNLEDEYRLYETSAEPEVSPGSTWLSDFPQAWAETGGMGLAVRQAPLIIPLKATSTPVSIKQYPMSQEAKLGIKPHIQRLLDQGILVPCQSPWNTPLLPVKKPGTNDYRPVQDLREVNKRVEDIHPTVPNPYNLLSGLPPSHRWYTVLDLKDAFFCLRLHPTSQPLFAFEWRDPGMGISGQLTWTRLPQGFKNSPTLFNEALHRDLADFRIQHPDLILLQYVDDILLAATSELDCQQGTRALLLTLGNLGYRASAKKAQLCQKQVKYLGYLLKEGQRWLTEARKETVMGQPTPKTPRQLREFLGTAGFCRLWIPGFAEMAAPLYPLTKPGTLFNWGPDQQKAYQEIKQALLTAPALGLPDLTKPFELFVDEKQGYAKGVLTQKLGPWRRPVAYLSKKLDPVAAGWPPCLRMVAAIAVLRKDAGKLTMGQPLVILAPHAVEALVKQPPDRWLSNARMTHYQAMLLDTDRVQFGPVVALNPATLLPLPEEGAPHDCLEILAETHGTRPDLTDQPIPDADHTWYTDGSSFLQEGQRKAGAAVTTETEVIWARALPAGTSAQRAELIALTQALKMAEGKRLNVYTDSRYAFATAHIHGEIYRRRGWLTSEGREIKNKSEILALLKALFLPKRLSIIHCLGHQKGDSAEARGNRLADQAAREAAIKTPPDTSTLLAGKRTADGSEFEKRTADGSEFESPKKKAKVE

SEQ ID NO: 7697 - protein, 2101 aa, synthetic construct
MPAAKRVKLDGGDKKYSIGLDIGTNSVGWAVITDEYKVPSKKFKVLGNTDRHSIKKNLIGALLFDSGETAEATRLKRTARRRYTRRKNRICYLQEIFSNEMAKVDDSFFHRLEESFLVEEDKKHERHPIFGNIVDEVAYHEKYPTIYHLRKKLVDSTDKADLRLIYLALAHMIKFRGHFLIEGDLNPDNSDVDKLFIQLVQTYNQLFEENPINASGVDAKAILSARLSKSRRLENLIAQLPGEKKNGLFGNLIALSLGLTPNFKSNFDLAEDAKLQLSKDTYDDDLDNLLAQIGDQYADLFLAAKNLSDAILLSDILRVNTEITKAPLSASMIKRYDEHHQDLTLLKALVRQQLPEKYKEIFFDQSKNGYAGYIDGGASQEEFYKFIKPILEKMDGTEELLVKLNREDLLRKQRTFDNGSIPHQIHLGELHAILRRQEDFYPFLKDNREKIEKILTFRIPYYVGPLARGNSRFAWMTRKSEETITPWNFEEVVDKGASAQSFIERMTNFDKNLPNEKVLPKHSLLYEYFTVYNELTKVKYVTEGMRKPAFLSGEQKKAIVDLLFKTNRKVTVKQLKEDYFKKIECFDSVEISGVEDRFNASLGTYHDLLKIIKDKDFLDNEENEDILEDIVLTLTLFEDREMIEERLKTYAHLFDDKVMKQLKRRRYTGWGRLSRKLINGIRDKQSGKTILDFLKSDGFANRNFMQLIHDDSLTFKEDIQKAQVSGQGDSLHEHIANLAGSPAIKKGILQTVKVVDELVKVMGRHKPENIVIEMARENQTTQKGQKNSRERMKRIEEGIKELGSQILKEHPVENTQLQNEKLYLYYLQNGRDMYVDQELDINRLSDYDVDHIVPQSFLKDDSIDNKVLTRSDKARGKSDNVPSEEVVKKMKNYWRQLLNAKLITQRKFDNLTKAERGGLSELDKAGFIKRQLVETRQITKHVAQILDSRMNTKYDENDKLIREVKVITLKSKLVSDFRKDFQFYKVREINNYHHAHDAYLNAVVGTALIKKYPKLESEFVYGDYKVYDVRKMIAKSEQEIGKATAKYFFYSNIMNFFKTEITLANGEIRKRPLIETNGETGEIVWDKGRDFATVRKVLSMPQVNIVKKTEVQTGGFSKESILPKRNSDKLIARKKDWDPKKYGGFDSPTVAYSVLVVAKVEKGKSKKLKSVKELLGITIMERSSFEKNPIDFLEAKGYKEVKKDLIIKLPKYSLFELENGRKRMLASAGELQKGNELALPSKYVNFLYLASHYEKLKGSPEDNEQKQLFVEQHKHYLDEIIEQISEFSKRVILADANLDKVLSAYNKHRDKPIREQAENIIHLFTLTNLGAPAAFKYFDTTIDRKRYTSTKEVLDATLIHQSITGLYETRIDLSQLGGDGGSGSETPGTSESATPESGGTLNLEDEYRLYETSAEPEVSPGSTWLSDFPQAWAETGGMGLAVRQAPLIIPLKATSTPVSIKQYPMSQEAKLGIKPHIQRLLDQGILVPCQSPWNTPLLPVKKPGTNDYRPVQDLREVNKRVEDIHPTVPNPYNLLSGLPPSHRWYTVLDLKDAFFCLRLHPTSQPLFAFEWRDPGMGISGQLTWTRLPQGFKNSPTLFNEALHRDLADFRIQHPDLILLQYVDDILLAATSELDCQQGTRALLLTLGNLGYRASAKKAQLCQKQVKYLGYLLKEGQRWLTEARKETVMGQPTPKTPRQLREFLGKAGFCRLFIPGFAEMAAPLYPLTKPGTLFNWGPDQQKAYQEIKQALLTAPALGLPDLTKPFELFVDEKQGYAKGVLTQKLGPWRRPVAYLSKKLDPVAAGWPPCLRMVAAIAVLRKDAGKLTMGQPLVILAPHAVEALVKQPPDRWLSNARMTHYQAMLLDTDRVQFGPVVALNPATLLPLPEEGAPHDCLEILAETHGTRPDLTDQPIPDADHTWYTDGSSFLQEGQRKAGAAVTTETEVIWARALPAGTSAQRAELIALTQALKMAEGKRLNVYTDSRYAFATAHIHGEIYRRRGWLTSEGREIKNKSEILALLKALFLPKRLSIIHCLGHQKGDSAEARGNRLADQAAREAAIKTPPDTSTLLAGKRTADGSEFEKRTADGSEFESPKKKAKVE

SEQ ID NO: 7698 - protein, 2101 aa, synthetic construct
MPAAKRVKLDGGDKKYSIGLDIGTNSVGWAVITDEYKVPSKKFKVLGNTDRHSIKKNLIGALLFDSGETAEATRLKRTARRRYTRRKNRICYLQEIFSNEMAKVDDSFFHRLEESFLVEEDKKHERHPIFGNIVDEVAYHEKYPTIYHLRKKLVDSTDKADLRLIYLALAHMIKFRGHFLIEGDLNPDNSDVDKLFIQLVQTYNQLFEENPINASGVDAKAILSARLSKSRRLENLIAQLPGEKKNGLFGNLIALSLGLTPNFKSNFDLAEDAKLQLSKDTYDDDLDNLLAQIGDQYADLFLAAKNLSDAILLSDILRVNTEITKAPLSASMIKRYDEHHQDLTLLKALVRQQLPEKYKEIFFDQSKNGYAGYIDGGASQEEFYKFIKPILEKMDGTEELLVKLNREDLLRKQRTFDNGSIPHQIHLGELHAILRRQEDFYPFLKDNREKIEKILTFRIPYYVGPLARGNSRFAWMTRKSEETITPWNFEEVVDKGASAQSFIERMTNFDKNLPNEKVLPKHSLLYEYFTVYNELTKVKYVTEGMRKPAFLSGEQKKAIVDLLFKTNRKVTVKQLKEDYFKKIECFDSVEISGVEDRFNASLGTYHDLLKIIKDKDFLDNEENEDILEDIVLTLTLFEDREMIEERLKTYAHLFDDKVMKQLKRRRYTGWGRLSRKLINGIRDKQSGKTILDFLKSDGFANRNFMQLIHDDSLTFKEDIQKAQVSGQGDSLHEHIANLAGSPAIKKGILQTVKVVDELVKVMGRHKPENIVIEMARENQTTQKGQKNSRERMKRIEEGIKELGSQILKEHPVENTQLQNEKLYLYYLQNGRDMYVDQELDINRLSDYDVDHIVPQSFLKDDSIDNKVLTRSDKARGKSDNVPSEEVVKKMKNYWRQLLNAKLITQRKFDNLTKAERGGLSELDKAGFIKRQLVETRQITKHVAQILDSRMNTKYDENDKLIREVKVITLKSKLVSDFRKDFQFYKVREINNYHHAHDAYLNAVVGTALIKKYPKLESEFVYGDYKVYDVRKMIAKSEQEIGKATAKYFFYSNIMNFFKTEITLANGEIRKRPLIETNGETGEIVWDKGRDFATVRKVLSMPQVNIVKKTEVQTGGFSKESILPKRNSDKLIARKKDWDPKKYGGFDSPTVAYSVLVVAKVEKGKSKKLKSVKELLGITIMERSSFEKNPIDFLEAKGYKEVKKDLIIKLPKYSLFELENGRKRMLASAGELQKGNELALPSKYVNFLYLASHYEKLKGSPEDNEQKQLFVEQHKHYLDEIIEQISEFSKRVILADANLDKVLSAYNKHRDKPIREQAENIIHLFTLTNLGAPAAFKYFDTTIDRKRYTSTKEVLDATLIHQSITGLYETRIDLSQLGGDGGSGSETPGTSESATPESGGTLGIEDEYRLHETSTEPDVSLGSTWLSDFPQAWAETGGMGLAVRQAPLIIPLKATSTPVSIQQYPMSHEARLGIKPHIQRLLDQGILVPCQSPWNTPLLPVKKPGTNDYRPVQDLREVNKRVEDIHPTVPNPYNLLSGLPPSHQWYTVLDLKDAFFCLRLHPTSQPLFAFEWRDPGMGISGQLTWTRLPQGFKNSPTLFNEALHRDLADFRIQHPDLILLQYVDDILLAATSELDCQQGTRALLQTLGDLGYRASAKKAQICQKQVKYLGYLLREGQRWLTEARKETVMGQPVPKTPRQLREFLGTAGFCRLWIPGFAEMAAPLYPLTKPGTLFSWGPDQQKAYQEIKQALLTAPALGLPDLTKPFELFVDEKQGYAKGVLTQKLGPWRRPVAYLSKKLDPVAAGWPPCLRMVAAIAVLTKDAGKLTMGQPLVILAPHAVEALVKQPPDRWLSNARMTHYQAMLLDTDRVQFGPVVALNPATLLPLPEEGAPHDCLEILAETHGTRPDLTDQPIPDADHTWYTDGSSFLQEGQRKAGAAVTTETEVIWAGALPAGTSAQRAELIALTQALKMAEGKRLNVYTDSRYAFATAHIHGEIYRRRGWLTSEGREIKNKSEILALLKALFLPKRLSIIHCLGHQKGDSAEARGNRLADQAAREAAIKTPPDTSTLLAGKRTADGSEFEKRTADGSEFESPKKKAKVE

SEQ ID NO: 7699 - protein, 2101 aa, synthetic construct
MPAAKRVKLDGGDKKYSIGLDIGTNSVGWAVITDEYKVPSKKFKVLGNTDRHSIKKNLIGALLFDSGETAEATRLKRTARRRYTRRKNRICYLQEIFSNEMAKVDDSFFHRLEESFLVEEDKKHERHPIFGNIVDEVAYHEKYPTIYHLRKKLVDSTDKADLRLIYLALAHMIKFRGHFLIEGDLNPDNSDVDKLFIQLVQTYNQLFEENPINASGVDAKAILSARLSKSRRLENLIAQLPGEKKNGLFGNLIALSLGLTPNFKSNFDLAEDAKLQLSKDTYDDDLDNLLAQIGDQYADLFLAAKNLSDAILLSDILRVNTEITKAPLSASMIKRYDEHHQDLTLLKALVRQQLPEKYKEIFFDQSKNGYAGYIDGGASQEEFYKFIKPILEKMDGTEELLVKLNREDLLRKQRTFDNGSIPHQIHLGELHAILRRQEDFYPFLKDNREKIEKILTFRIPYYVGPLARGNSRFAWMTRKSEETITPWNFEEVVDKGASAQSFIERMTNFDKNLPNEKVLPKHSLLYEYFTVYNELTKVKYVTEGMRKPAFLSGEQKKAIVDLLFKTNRKVTVKQLKEDYFKKIECFDSVEISGVEDRFNASLGTYHDLLKIIKDKDFLDNEENEDILEDIVLTLTLFEDREMIEERLKTYAHLFDDKVMKQLKRRRYTGWGRLSRKLINGIRDKQSGKTILDFLKSDGFANRNFMQLIHDDSLTFKEDIQKAQVSGQGDSLHEHIANLAGSPAIKKGILQTVKVVDELVKVMGRHKPENIVIEMARENQTTQKGQKNSRERMKRIEEGIKELGSQILKEHPVENTQLQNEKLYLYYLQNGRDMYVDQELDINRLSDYDVDHIVPQSFLKDDSIDNKVLTRSDKARGKSDNVPSEEVVKKMKNYWRQLLNAKLITQRKFDNLTKAERGGLSELDKAGFIKRQLVETRQITKHVAQILDSRMNTKYDENDKLIREVKVITLKSKLVSDFRKDFQFYKVREINNYHHAHDAYLNAVVGTALIKKYPKLESEFVYGDYKVYDVRKMIAKSEQEIGKATAKYFFYSNIMNFFKTEITLANGEIRKRPLIETNGETGEIVWDKGRDFATVRKVLSMPQVNIVKKTEVQTGGFSKESILPKRNSDKLIARKKDWDPKKYGGFDSPTVAYSVLVVAKVEKGKSKKLKSVKELLGITIMERSSFEKNPIDFLEAKGYKEVKKDLIIKLPKYSLFELENGRKRMLASAGELQKGNELALPSKYVNFLYLASHYEKLKGSPEDNEQKQLFVEQHKHYLDEIIEQISEFSKRVILADANLDKVLSAYNKHRDKPIREQAENIIHLFTLTNLGAPAAFKYFDTTIDRKRYTSTKEVLDATLIHQSITGLYETRIDLSQLGGDGGSGSETPGTSESATPESGGTLNIEDEYRLHETSKEPDVSLGSTWLSDFPQAWAETGGMGLAVRQAPLIIPLKATSTPVSIKQYPMSQEARLGIKPHIQRLLDQGILVPCQSPWNTPLLPVKKPGTNDYRPVQDLREVNKRVEDIHPTVPNPYNLLSGLPPSHQWYTVLDLKDAFFCLRLHPTSQPLFAFEWRDPEMGISGQLTWTRLPQGFKNSPTLFNEALHRDLAGFRIQHPDLILLQYVDDLLLAATSELDCQQGTRALLQTLGDLGYRASAKKAQICQKQVKYLGYLLKEGQRWLTEARKETVMGQPIPKTPRQLREFLGTAGFCRLWIPGFAEMAAPLYPLTKPGTLFNWGPDQQKAFQEIKQALLTAPALGLPDLTKPFELFVDEKQGYAKGVLTQKLGPWRRPVAYLSKKLDPVAAGWPPCLRMVAAIAVLTKDAGKLTMGQPLVILAPHAVEALVKQPPDRWLSNARMTHYQALLLDTDRVQFGPVVALNPATLLPLPEEGLQHDCLDILAEAHGTRSDLMDQPLPDADHTWYTDGSSFLQEGQRKAGAAVTTETEVIWARALPAGTSAQRAELIALTQALKMAEGKKLNVYTDSRYAFATAHIHGEIYRRRGWLTSEGKEIKNKDEILALLKALFLPKRLSIIHCPGHQKGNSAEARGNRMADQAAREVATRETPETSTLLAGKRTADGSEFEKRTADGSEFESPKKKAKVE

SEQ ID NO: 7700 - protein, 2101 aa, synthetic construct
MPAAKRVKLDGGDKKYSIGLDIGTNSVGWAVITDEYKVPSKKFKVLGNTDRHSIKKNLIGALLFDSGETAEATRLKRTARRRYTRRKNRICYLQEIFSNEMAKVDDSFFHRLEESFLVEEDKKHERHPIFGNIVDEVAYHEKYPTIYHLRKKLVDSTDKADLRLIYLALAHMIKFRGHFLIEGDLNPDNSDVDKLFIQLVQTYNQLFEENPINASGVDAKAILSARLSKSRRLENLIAQLPGEKKNGLFGNLIALSLGLTPNFKSNFDLAEDAKLQLSKDTYDDDLDNLLAQIGDQYADLFLAAKNLSDAILLSDILRVNTEITKAPLSASMIKRYDEHHQDLTLLKALVRQQLPEKYKEIFFDQSKNGYAGYIDGGASQEEFYKFIKPILEKMDGTEELLVKLNREDLLRKQRTFDNGSIPHQIHLGELHAILRRQEDFYPFLKDNREKIEKILTFRIPYYVGPLARGNSRFAWMTRKSEETITPWNFEEVVDKGASAQSFIERMTNFDKNLPNEKVLPKHSLLYEYFTVYNELTKVKYVTEGMRKPAFLSGEQKKAIVDLLFKTNRKVTVKQLKEDYFKKIECFDSVEISGVEDRFNASLGTYHDLLKIIKDKDFLDNEENEDILEDIVLTLTLFEDREMIEERLKTYAHLFDDKVMKQLKRRRYTGWGRLSRKLINGIRDKQSGKTILDFLKSDGFANRNFMQLIHDDSLTFKEDIQKAQVSGQGDSLHEHIANLAGSPAIKKGILQTVKVVDELVKVMGRHKPENIVIEMARENQTTQKGQKNSRERMKRIEEGIKELGSQILKEHPVENTQLQNEKLYLYYLQNGRDMYVDQELDINRLSDYDVDHIVPQSFLKDDSIDNKVLTRSDKARGKSDNVPSEEVVKKMKNYWRQLLNAKLITQRKFDNLTKAERGGLSELDKAGFIKRQLVETRQITKHVAQILDSRMNTKYDENDKLIREVKVITLKSKLVSDFRKDFQFYKVREINNYHHAHDAYLNAVVGTALIKKYPKLESEFVYGDYKVYDVRKMIAKSEQEIGKATAKYFFYSNIMNFFKTEITLANGEIRKRPLIETNGETGEIVWDKGRDFATVRKVLSMPQVNIVKKTEVQTGGFSKESILPKRNSDKLIARKKDWDPKKYGGFDSPTVAYSVLVVAKVEKGKSKKLKSVKELLGITIMERSSFEKNPIDFLEAKGYKEVKKDLIIKLPKYSLFELENGRKRMLASAGELQKGNELALPSKYVNFLYLASHYEKLKGSPEDNEQKQLFVEQHKHYLDEIIEQISEFSKRVILADANLDKVLSAYNKHRDKPIREQAENIIHLFTLTNLGAPAAFKYFDTTIDRKRYTSTKEVLDATLIHQSITGLYETRIDLSQLGGDGGSGSETPGTSESATPESGGTLNIEDEYRLHETSKGPDVPLGSTWLSDFPQAWAETGGMGLAVRQAPLIIPLKATSTPVSIKQYPMSQEARLGIKPHIQRLLDQGILVPCQSPWNTPLLPVKKPGTNDYRPVQDLREVNKRVEDIHPTVPNPYNLLSGLPPSHQWYTVLDLKDAFFCLRLHPTSQSLFAFEWRDPEMGISGQLTWTRLPQGFKNSPTLFDEALHRDLADFRIQHPDLILLQYVDDLLLAATSELDCQQGTRALLQTLGDLGYRASAKKAQICQKQVKYLGYLLKEGQRWLTEARKETVMGQPTPKTPRQLREFLGTAGFCRLWIPGFAEMAAPLYPLTKTGTLFEWGPDQQKAYQEIKQALLTAPALGLPDLTKPFELFVDEKQGYAKGVLTQKLGPWRRPVAYLSKKLDPVAAGWPPCLRMVAAIAVLTKDAGKLTMGQPLVILAPHAVEALVKQPPDRWLSNARMTHYQALLLDTDRVQFGPIVALNPATLLPLPEEGLQHDCLDILAEAHGTRPDLTDQPLPDADHTWYTDGSSFLQEGQRKAGAAVTTETEVVWAKALPAGTSAQRAELIALTQALKMAEGKKLNVYTDSRYAFATAHIHGEIYRRRGLLTSEGKEIKNKDEILALLKALFLPKRLSIIHCPGHQKGNRAEARGNRMADQAAREVATRETPETSTLLAGKRTADGSEFEKRTADGSEFESPKKKAKVE

SEQ ID NO: 7701 - protein, 2095 aa, synthetic construct
MPAAKRVKLDGGDKKYSIGLDIGTNSVGWAVITDEYKVPSKKFKVLGNTDRHSIKKNLIGALLFDSGETAEATRLKRTARRRYTRRKNRICYLQEIFSNEMAKVDDSFFHRLEESFLVEEDKKHERHPIFGNIVDEVAYHEKYPTIYHLRKKLVDSTDKADLRLIYLALAHMIKFRGHFLIEGDLNPDNSDVDKLFIQLVQTYNQLFEENPINASGVDAKAILSARLSKSRRLENLIAQLPGEKKNGLFGNLIALSLGLTPNFKSNFDLAEDAKLQLSKDTYDDDLDNLLAQIGDQYADLFLAAKNLSDAILLSDILRVNTEITKAPLSASMIKRYDEHHQDLTLLKALVRQQLPEKYKEIFFDQSKNGYAGYIDGGASQEEFYKFIKPILEKMDGTEELLVKLNREDLLRKQRTFDNGSIPHQIHLGELHAILRRQEDFYPFLKDNREKIEKILTFRIPYYVGPLARGNSRFAWMTRKSEETITPWNFEEVVDKGASAQSFIERMTNFDKNLPNEKVLPKHSLLYEYFTVYNELTKVKYVTEGMRKPAFLSGEQKKAIVDLLFKTNRKVTVKQLKEDYFKKIECFDSVEISGVEDRFNASLGTYHDLLKIIKDKDFLDNEENEDILEDIVLTLTLFEDREMIEERLKTYAHLFDDKVMKQLKRRRYTGWGRLSRKLINGIRDKQSGKTILDFLKSDGFANRNFMQLIHDDSLTFKEDIQKAQVSGQGDSLHEHIANLAGSPAIKKGILQTVKVVDELVKVMGRHKPENIVIEMARENQTTQKGQKNSRERMKRIEEGIKELGSQILKEHPVENTQLQNEKLYLYYLQNGRDMYVDQELDINRLSDYDVDHIVPQSFLKDDSIDNKVLTRSDKARGKSDNVPSEEVVKKMKNYWRQLLNAKLITQRKFDNLTKAERGGLSELDKAGFIKRQLVETRQITKHVAQILDSRMNTKYDENDKLIREVKVITLKSKLVSDFRKDFQFYKVREINNYHHAHDAYLNAVVGTALIKKYPKLESEFVYGDYKVYDVRKMIAKSEQEIGKATAKYFFYSNIMNFFKTEITLANGEIRKRPLIETNGETGEIVWDKGRDFATVRKVLSMPQVNIVKKTEVQTGGFSKESILPKRNSDKLIARKKDWDPKKYGGFDSPTVAYSVLVVAKVEKGKSKKLKSVKELLGITIMERSSFEKNPIDFLEAKGYKEVKKDLIIKLPKYSLFELENGRKRMLASAGELQKGNELALPSKYVNFLYLASHYEKLKGSPEDNEQKQLFVEQHKHYLDEIIEQISEFSKRVILADANLDKVLSAYNKHRDKPIREQAENIIHLFTLTNLGAPAAFKYFDTTIDRKRYTSTKEVLDATLIHQSITGLYETRIDLSQLGGDGGSGSETPGTSESATPESGGTLQLDDEYRLYSPLVKPDQNIQFWLEQFPQAWAETAGMGLAKQVPPQVIQLKASATPVSVRQYPLSKEAQEGIRPHVQRLIQQGILVPVQSPWNTPLLPVRKPGTNDYRPVQDLREVNKRVQDIHPTVPNPYNLLCALPPQRSWYTVLDLKDAFFCLRLHPTSQPLFAFEWRDPGTGRTGQLTWTRLPQGFKNSPTIFDEALHRDLANFRIQHPQVTLLQYVDDLLLAGATKQDCLEGTKALLLELSDLGYRASAKKAQICRREVTYLGYSLRDGQRWLTEARKKTVVQIPAPTTAKQVREFLGTAGFCRLWIPGFATLAAPLYPLTKEKGEFSWAPEHQKAFDAIKKALLSAPALALPDVTKPFTLYVDERKGVARGVLTQTLGPWRRPVAYLSKKLDPVASGWPVCLKAIAAVAILVKDADKLTLGQNITVIAPHALENIVRQPPDRWMTNARMTHYQSLLLTERVTFAPPAALNPATLLPEETDEPVTHDCHQLLIEETGVRKDLTDIPLTGEVLTWFTDGSSYVVEGKRMAGAAVVDGTRTIWASSLPEGTSAQKAELMALTQALRLAEGKSINIYTDSRYAFATAHVHGAIYKQRGLLTSAGREIKNKEEILSLLEALHLPKRLAIIHCPGHQKAKDPISRGNQMADRVAKQAAQGVNLLAGKRTADGSEFEKRTADGSEFESPKKKAKVE

SEQ ID NO: 7702 - protein, 2095 aa, synthetic construct; identical to SEQ ID NO: 7701

SEQ ID NO: 7703 - protein, 2181 aa, synthetic construct
MPAAKRVKLDGGDKKYSIGLDIGTNSVGWAVITDEYKVPSKKFKVLGNTDRHSIKKNLIGALLFDSGETAEATRLKRTARRRYTRRKNRICYLQEIFSNEMAKVDDSFFHRLEESFLVEEDKKHERHPIFGNIVDEVAYHEKYPTIYHLRKKLVDSTDKADLRLIYLALAHMIKFRGHFLIEGDLNPDNSDVDKLFIQLVQTYNQLFEENPINASGVDAKAILSARLSKSRRLENLIAQLPGEKKNGLFGNLIALSLGLTPNFKSNFDLAEDAKLQLSKDTYDDDLDNLLAQIGDQYADLFLAAKNLSDAILLSDILRVNTEITKAPLSASMIKRYDEHHQDLTLLKALVRQQLPEKYKEIFFDQSKNGYAGYIDGGASQEEFYKFIKPILEKMDGTEELLVKLNREDLLRKQRTFDNGSIPHQIHLGELHAILRRQEDFYPFLKDNREKIEKILTFRIPYYVGPLARGNSRFAWMTRKSEETITPWNFEEVVDKGASAQSFIERMTNFDKNLPNEKVLPKHSLLYEYFTVYNELTKVKYVTEGMRKPAFLSGEQKKAIVDLLFKTNRKVTVKQLKEDYFKKIECFDSVEISGVEDRFNASLGTYHDLLKIIKDKDFLDNEENEDILEDIVLTLTLFEDREMIEERLKTYAHLFDDKVMKQLKRRRYTGWGRLSRKLINGIRDKQSGKTILDFLKSDGFANRNFMQLIHDDSLTFKEDIQKAQVSGQGDSLHEHIANLAGSPAIKKGILQTVKVVDELVKVMGRHKPENIVIEMARENQTTQKGQKNSRERMKRIEEGIKELGSQILKEHPVENTQLQNEKLYLYYLQNGRDMYVDQELDINRLSDYDVDHIVPQSFLKDDSIDNKVLTRSDKARGKSDNVPSEEVVKKMKNYWRQLLNAKLITQRKFDNLTKAERGGLSELDKAGFIKRQLVETRQITKHVAQILDSRMNTKYDENDKLIREVKVITLKSKLVSDFRKDFQFYKVREINNYHHAHDAYLNAVVGTALIKKYPKLESEFVYGDYKVYDVRKMIAKSEQEIGKATAKYFFYSNIMNFFKTEITLANGEIRKRPLIETNGETGEIVWDKGRDFATVRKVLSMPQVNIVKKTEVQTGGFSKESILPKRNSDKLIARKKDWDPKKYGGFDSPTVAYSVLVVAKVEKGKSKKLKSVKELLGITIMERSSFEKNPIDFLEAKGYKEVKKDLIIKLPKYSLFELENGRKRMLASAGELQKGNELALPSKYVNFLYLASHYEKLKGSPEDNEQKQLFVEQHKHYLDEIIEQISEFSKRVILADANLDKVLSAYNKHRDKPIREQAENIIHLFTLTNLGAPAAFKYFDTTIDRKRYTSTKEVLDATLIHQSITGLYETRIDLSQLGGDGGSGSETPGTSESATPESGGMDPLQLLQPLEAEIKGTKLKAHWNSGATITCVPEAFLEDERPIQTMLIKTIHGEKQQDVYYLTFKVQGRKVEAEVLASPYDYILLNPSDVPWLMKKPLQLTVLVPLHEYQERLLQQTALPKEQKELLQKLFLKYDALWQHWENQVGHRRIKPHNIATGTLAPRPQKQYPINPKAKPSIQIVIDDLLKQGVLIQQNSTMNTPVYPVPKPDGKWRMVLDYREVNKTIPLIAAQNQHSAGILSSIYRGKYKTTLDLTNGFWAHPITPESYWLTAFTWQGKQYCWTRLPQGFLNSPALFNADVVDLLKEIPNVQAYVDDIYISHDDPQEHLEQLEKIFSILLNAGYVVSLKKSEIAQREVEFLGFNITKEGRGLTDTFKQKLLNITPPKDLKQLQSILGLLNFARNFIPNYSELVKPLYTIVAPANGKFISWTEDNSNQLQHIISVLNQADNLEERNPETRLIIKVNSSPSAGYIRYYNEGSKRPIMYVNYIFSKAEAKFTQTEKLLTTMHKGLIKAMDLAMGQEILVYSPIVSMTKIQRTPLPERKALPVRWITWMTYLEDPRIQFHYDKSLPELQQIPNVTEDVIAKTKHPSEFAMVFYTDGSAIKHPDVNKSHSAGMGIAQVQFIPEYKIVHQWSIPLGDHTAQLAEIAAVEFACKKALKISGPVLIVTDSFYVAESANKELPYWKSNGFLNNKKKPLRHVSKWKSIAECLQLKPDIIIMHEKGHQQPMTTLHTEGNNLADKLATQGSYVVHAGKRTADGSEFEKRTADGSEFESPKKKAKVE

SEQ ID NO: 7704 - protein, 2092 aa, synthetic construct
MPAAKRVKLDGGDKKYSIGLDIGTNSVGWAVITDEYKVPSKKFKVLGNTDRHSIKKNLIGALLFDSGETAEATRLKRTARRRYTRRKNRICYLQEIFSNEMAKVDDSFFHRLEESFLVEEDKKHERHPIFGNIVDEVAYHEKYPTIYHLRKKLVDSTDKADLRLIYLALAHMIKFRGHFLIEGDLNPDNSDVDKLFIQLVQTYNQLFEENPINASGVDAKAILSARLSKSRRLENLIAQLPGEKKNGLFGNLIALSLGLTPNFKSNFDLAEDAKLQLSKDTYDDDLDNLLAQIGDQYADLFLAAKNLSDAILLSDILRVNTEITKAPLSASMIKRYDEHHQDLTLLKALVRQQLPEKYKEIFFDQSKNGYAGYIDGGASQEEFYKFIKPILEKMDGTEELLVKLNREDLLRKQRTFDNGSIPHQIHLGELHAILRRQEDFYPFLKDNREKIEKILTFRIPYYVGPLARGNSRFAWMTRKSEETITPWNFEEVVDKGASAQSFIERMTNFDKNLPNEKVLPKHSLLYEYFTVYNELTKVKYVTEGMRKPAFLSGEQKKAIVDLLFKTNRKVTVKQLKEDYFKKIECFDSVEISGVEDRFNASLGTYHDLLKIIKDKDFLDNEENEDILEDIVLTLTLFEDREMIEERLKTYAHLFDDKVMKQLKRRRYTGWGRLSRKLINGIRDKQSGKTILDFLKSDGFANRNFMQLIHDDSLTFKEDIQKAQVSGQGDSLHEHIANLAGSPAIKKGILQTVKVVDELVKVMGRHKPENIVIEMARENQTTQKGQKNSRERMKRIEEGIKELGSQILKEHPVENTQLQNEKLYLYYLQNGRDMYVDQELDINRLSDYDVDHIVPQSFLKDDSIDNKVLTRSDKARGKSDNVPSEEVVKKMKNYWRQLLNAKLITQRKFDNLTKAERGGLSELDKAGFIKRQLVETRQITKHVAQILDSRMNTKYDENDKLIREVKVITLKSKLVSDFRKDFQFYKVREINNYHHAHDAYLNAVVGTALIKKYPKLESEFVYGDYKVYDVRKMIAKSEQEIGKATAKYFFYSNIMNFFKTEITLANGEIRKRPLIETNGETGEIVWDKGRDFATVRKVLSMPQVNIVKKTEVQTGGFSKESILPKRNSDKLIARKKDWDPKKYGGFDSPTVAYSVLVVAKVEKGKSKKLKSVKELLGITIMERSSFEKNPIDFLEAKGYKEVKKDLIIKLPKYSLFELENGRKRMLASAGELQKGNELALPSKYVNFLYLASHYEKLKGSPEDNEQKQLFVEQHKHYLDEIIEQISEFSKRVILADANLDKVLSAYNKHRDKPIREQAENIIHLFTLTNLGAPAAFKYFDTTIDRKRYTSTKEVLDATLIHQSITGLYETRIDLSQLGGDGGSGSETPGTSESATPESGGIPWLMKKPLQLTTLVPLQEYEERLLKQTMLTGSYKEKLQSLFLKYDALWQHWENQVGHRRIKPHHIATGTVNPRPQKQYPINPKAKASIQTVINDLLKQGVLIQQNSIMNTPVYPVPKPDGKWRMVLDYREVNKTIPLIAAQNQHSAGILSSIFRGKYKTTLDLSNGFWAHSITPESYWLTAFTWLGQQYCWTRLPQGFLNSPALFTADVVDLLKEVPNVQVYVDDIYISHDDPREHLEQLEKVFSLLLNAGYVVSLKKSEIAQHEVEFLGFNITKEGRGLTETFKQKLLNITPPRDLKQLQSILGLLNFARNFIPNFSELVKPLYNIIATANGKYITWTTDNSQQLQNIISMLNSAENLEERNPEVRLIMKVNTSPSAGYIRFYNEFAKRPIMYLNYVYTKAEVKFTNTEKLLTTIHKGLIKALDLGMGQEILVYSPIVSMTKIQKTPLPERKALPIRWITWMSYLEDPRIQFHYDKTLPELQQVPTVTDDIIAKIKHPSEFSMVFYTDGSAIKHPNVNKSHNAGMGIAQVQFKPEFTVINTWSIPLGDHTAQLAEVAAVEFACKKALKIDGPVLIVTDSFYVAESVNKELPYWQSNGFFNNKKKPLKHVSKWKSIADCIQLKPDIIIIHEKGHQPTASTFHTEGNNLADKLATQGSYVVNAGKRTADGSEFEKRTADGSEFESPKKKAKVE

SEQ ID NO: 7705 - protein, 2181 aa, synthetic construct
MPAAKRVKLDGGDKKYSIGLDIGTNSVGWAVITDEYKVPSKKFKVLGNTDRHSIKKNLIGALLFDSGETAEATRLKRTARRRYTRRKNRICYLQEIFSNEMAKVDDSFFHRLEESFLVEEDKKHERHPIFGNIVDEVAYHEKYPTIYHLRKKLVDSTDKADLRLIYLALAHMIKFRGHFLIEGDLNPDNSDVDKLFIQLVQTYNQLFEENPINASGVDAKAILSARLSKSRRLENLIAQLPGEKKNGLFGNLIALSLGLTPNFKSNFDLAEDAKLQLSKDTYDDDLDNLLAQIGDQYADLFLAAKNLSDAILLSDILRVNTEITKAPLSASMIKRYDEHHQDLTLLKALVRQQLPEKYKEIFFDQSKNGYAGYIDGGASQEEFYKFIKPILEKMDGTEELLVKLNREDLLRKQRTFDNGSIPHQIHLGELHAILRRQEDFYPFLKDNREKIEKILTFRIPYYVGPLARGNSRFAWMTRKSEETITPWNFEEVVDKGASAQSFIERMTNFDKNLPNEKVLPKHSLLYEYFTVYNELTKVKYVTEGMRKPAFLSGEQKKAIVDLLFKTNRKVTVKQLKEDYFKKIECFDSVEISGVEDRFNASLGTYHDLLKIIKDKDFLDNEENEDILEDIVLTLTLFEDREMIEERLKTYAHLFDDKVMKQLKRRRYTGWGRLSRKLINGIRDKQSGKTILDFLKSDGFANRNFMQLIHDDSLTFKEDIQKAQVSGQGDSLHEHIANLAGSPAIKKGILQTVKVVDELVKVMGRHKPENIVIEMARENQTTQKGQKNSRERMKRIEEGIKELGSQILKEHPVENTQLQNEKLYLYYLQNGRDMYVDQELDINRLSDYDVDHIVPQSFLKDDSIDNKVLTRSDKARGKSDNVPSEEVVKKMKNYWRQLLNAKLITQRKFDNLTKAERGGLSELDKAGFIKRQLVETRQITKHVAQILDSRMNTKYDENDKLIREVKVITLKSKLVSDFRKDFQFYKVREINNYHHAHDAYLNAVVGTALIKKYPKLESEFVYGDYKVYDVRKMIAKSEQEIGKATAKYFFYSNIMNFFKTEITLANGEIRKRPLIETNGETGEIVWDKGRDFATVRKVLSMPQVNIVKKTEVQTGGFSKESILPKRNSDKLIARKKDWDPKKYGGFDSPTVAYSVLVVAKVEKGKSKKLKSVKELLGITIMERSSFEKNPIDFLEAKGYKEVKKDLIIKLPKYSLFELENGRKRMLASAGELQKGNELALPSKYVNFLYLASHYEKLKGSPEDNEQKQLFVEQHKHYLDEIIEQISEFSKRVILADANLDKVLSAYNKHRDKPIREQAENIIHLFTLTNLGAPAAFKYFDTTIDRKRYTSTKEVLDATLIHQSITGLYETRIDLSQLGGDGGSGSETPGTSESATPESGGMDPLQLLQPLEAEIKGTKLKAHWNSGATITCVPQAFLEEEVPIKNIWIKTIHGEKEQPVYYLTFKIQGRKVEAEVISSPYDYILVSPSDIPWLMKKPLQLTTLVPLQEYEERLLKQTMLTGSYKEKLQSLFLKYDALWQHWENQVGHRRIKPHHIATGTVNPRPQKQYPINPKAKASIQTVINDLLKQGVLIQQNSIMNTPVYPVPKPDGKWRMVLDYREVNKTIPLIAAQNQHSAGILSSIFRGKYKTTLDLSNGFWAHSITPESYWLTAFTWLGQQYCWTRLPQGFLNSPALFNADVVDLLKEVPNVQVYVDDIYISHDDPREHLEQLEKVFSLLLNAGYVVSLKKSEIAQHEVEFLGFNITKEGRGLTETFKQKLLNITPPRDLKQLQSILGLLNFARNFIPNFSELVKPLYNIIATAPGKYITWTTDNSQQLQNIISMLNSAENLEERNPEVRLIMKVNTSPSAGYIRFYNEFAKRPIMYLNYVYTKAEVKFTNTEKLLTTIHKGLIKALDLGMGQEILVYSPIVSMTKIQKTPLPERKALPIRWITWMSYLEDPRIQFHYDKTLPELQQVPTVTDDIIAKIKHPSEFSMVFYTDGSAIKHPNVNKSHNAGMGIAQVQFKPEFTVINTWSIPLGDHTAQLAEVAAVEFACKKALKIDGPVLIVTDSFYVAESVNKELPYWQSNGFFNNKKKPLKHVSKWKSIADCIQLKPDIIIIHEKGHQPTASTFHTEGNNLADKLATQGSYVVNAGKRTADGSEFEKRTADGSEFESPKKKAKVE

SEQ ID NO: 7706 - protein, 2101 aa, synthetic construct
MPAAKRVKLDGGDKKYSIGLDIGTNSVGWAVITDEYKVPSKKFKVLGNTDRHSIKKNLIGALLFDSGETAEATRLKRTARRRYTRRKNRICYLQEIFSNEMAKVDDSFFHRLEESFLVEEDKKHERHPIFGNIVDEVAYHEKYPTIYHLRKKLVDSTDKADLRLIYLALAHMIKFRGHFLIEGDLNPDNSDVDKLFIQLVQTYNQLFEENPINASGVDAKAILSARLSKSRRLENLIAQLPGEKKNGLFGNLIALSLGLTPNFKSNFDLAEDAKLQLSKDTYDDDLDNLLAQIGDQYADLFLAAKNLSDAILLSDILRVNTEITKAPLSASMIKRYDEHHQDLTLLKALVRQQLPEKYKEIFFDQSKNGYAGYIDGGASQEEFYKFIKPILEKMDGTEELLVKLNREDLLRKQRTFDNGSIPHQIHLGELHAILRRQEDFYPFLKDNREKIEKILTFRIPYYVGPLARGNSRFAWMTRKSEETITPWNFEEVVDKGASAQSFIERMTNFDKNLPNEKVLPKHSLLYEYFTVYNELTKVKYVTEGMRKPAFLSGEQKKAIVDLLFKTNRKVTVKQLKEDYFKKIECFDSVEISGVEDRFNASLGTYHDLLKIIKDKDFLDNEENEDILEDIVLTLTLFEDREMIEERLKTYAHLFDDKVMKQLKRRRYTGWGRLSRKLINGIRDKQSGKTILDFLKSDGFANRNFMQLIHDDSLTFKEDIQKAQVSGQGDSLHEHIANLAGSPAIKKGILQTVKVVDELVKVMGRHKPENIVIEMARENQTTQKGQKNSRERMKRIEEGIKELGSQILKEHPVENTQLQNEKLYLYYLQNGRDMYVDQELDINRLSDYDVDHIVPQSFLKDDSIDNKVLTRSDKARGKSDNVPSEEVVKKMKNYWRQLLNAKLITQRKFDNLTKAERGGLSELDKAGFIKRQLVETRQITKHVAQILDSRMNTKYDENDKLIREVKVITLKSKLVSDFRKDFQFYKVREINNYHHAHDAYLNAVVGTALIKKYPKLESEFVYGDYKVYDVRKMIAKSEQEIGKATAKYFFYSNIMNFFKTEITLANGEIRKRPLIETNGETGEIVWDKGRDFATVRKVLSMPQVNIVKKTEVQTGGFSKESILPKRNSDKLIARKKDWDPKKYGGFDSPTVAYSVLVVAKVEKGKSKKLKSVKELLGITIMERSSFEKNPIDFLEAKGYKEVKKDLIIKLPKYSLFELENGRKRMLASAGELQKGNELALPSKYVNFLYLASHYEKLKGSPEDNEQKQLFVEQHKHYLDEIIEQISEFSKRVILADANLDKVLSAYNKHRDKPIREQAENIIHLFTLTNLGAPAAFKYFDTTIDRKRYTSTKEVLDATLIHQSITGLYETRIDLSQLGGDGGSGSETPGTSESATPESGGTLNIEDEYRLHETSKEPDVPLGSTWLSDFPQAWAETGGMGLAVRQAPLIIPLKATSTPVSIKQYPMSQEARLGIKPHIQRLLDQGILVPCQSPWNTPLLPVKKPGTNDYRPVQDLREVNKRVEDIHPTVPNPYNLLSGLPPSHQWYTVLDLKDAFFCLRLHPTSQPLFAFEWRDPEMGISGQLTWTRLPQGFKNSPTLFNEALHRDLADFRIQHPDLILLQYVDDLLLAATSEQDCQRGTRALLQTLGNLGYRASAKKAQICQKQVKYLGYLLKEGQRWLTEARKETVMGQPTPKTPRQLREFLGTAGFCRLWIPGFAEMAAPLYPLTKPGTLFNWGPDQQKAYQEIKQALLTAPALGLPDLTKPFELFVDEKQGYAKGVLTQKLGPWRRPVAYLSKKLDPVAAGWPPCLRMVAAIAVLTKDAGKLTMGQPLVILAPHAVEALVKQPPDRWLSNARMTHYQAMLLDTDRVQFGPVVALNPATLLPLPEKEAPHDCLEILAETHGTRPDLTDQPIPDADYTWYTDGSSFLQEGQRRAGAAVTTETEVIWARALPAGTSAQRAELIALTQALKMAEGKKLNVYTDSRYAFATAHVHGEIYRRRGWLTSEGREIKNKNEILALLKALFLPKRLSIIHCPGHQKGNSAEARGNRMADQAAREAAMKAVLETSTLLAGKRTADGSEFEKRTADGSEFESPKKKAKVE

SEQ ID NO: 7707 - protein, 2099 aa, synthetic construct
MPAAKRVKLDGGDKKYSIGLDIGTNSVGWAVITDEYKVPSKKFKVLGNTDRHSIKKNLIGALLFDSGETAEATRLKRTARRRYTRRKNRICYLQEIFSNEMAKVDDSFFHRLEESFLVEEDKKHERHPIFGNIVDEVAYHEKYPTIYHLRKKLVDSTDKADLRLIYLALAHMIKFRGHFLIEGDLNPDNSDVDKLFIQLVQTYNQLFEENPINASGVDAKAILSARLSKSRRLENLIAQLPGEKKNGLFGNLIALSLGLTPNFKSNFDLAEDAKLQLSKDTYDDDLDNLLAQIGDQYADLFLAAKNLSDAILLSDILRVNTEITKAPLSASMIKRYDEHHQDLTLLKALVRQQLPEKYKEIFFDQSKNGYAGYIDGGASQEEFYKFIKPILEKMDGTEELLVKLNREDLLRKQRTFDNGSIPHQIHLGELHAILRRQEDFYPFLKDNREKIEKILTFRIPYYVGPLARGNSRFAWMTRKSEETITPWNFEEVVDKGASAQSFIERMTNFDKNLPNEKVLPKHSLLYEYFTVYNELTKVKYVTEGMRKPAFLSGEQKKAIVDLLFKTNRKVTVKQLKEDYFKKIECFDSVEISGVEDRFNASLGTYHDLLKIIKDKDFLDNEENEDILEDIVLTLTLFEDREMIEERLKTYAHLFDDKVMKQLKRRRYTGWGRLSRKLINGIRDKQSGKTILDFLKSDGFANRNFMQLIHDDSLTFKEDIQKAQVSGQGDSLHEHIANLAGSPAIKKGILQTVKVVDELVKVMGRHKPENIVIEMARENQTTQKGQKNSRERMKRIEEGIKELGSQILKEHPVENTQLQNEKLYLYYLQNGRDMYVDQELDINRLSDYDVDHIVPQSFLKDDSIDNKVLTRSDKARGKSDNVPSEEVVKKMKNYWRQLLNAKLITQRKFDNLTKAERGGLSELDKAGFIKRQLVETRQITKHVAQILDSRMNTKYDENDKLIREVKVITLKSKLVSDFRKDFQFYKVREINNYHHAHDAYLNAVVGTALIKKYPKLESEFVYGDYKVYDVRKMIAKSEQEIGKATAKYFFYSNIMNFFKTEITLANGEIRKRPLIETNGETGEIVWDKGRDFATVRKVLSMPQVNIVKKTEVQTGGFSKESILPKRNSDKLIARKKDWDPKKYGGFDSPTVAYSVLVVAKVEKGKSKKLKSVKELLGITIMERSSFEKNPIDFLEAKGYKEVKKDLIIKLPKYSLFELENGRKRMLASAGELQKGNELALPSKYVNFLYLASHYEKLKGSPEDNEQKQLFVEQHKHYLDEIIEQISEFSKRVILADANLDKVLSAYNKHRDKPIREQAENIIHLFTLTNLGAPAAFKYFDTTIDRKRYTSTKEVLDATLIHQSITGLYETRIDLSQLGGDGGGSAGSAAGSGEFGGTAPLEEEYRLFLEAPIQNVTLLEQWKREIPKVWAEINPPGLASTQAPIHVQLLSTALPVRVRQYPITLEAKRSLRETIRKFRAAGILRPVHSPWNTPLLPVRKSGTSEYRMVQDLREVNKRVETIHPTVPNPYTLLSLLPPDRIWYSVLDLKDAFFCIPLAPESQLIFAFEWADAEEGESGQLTWTRLPQGFKNSPTLFNEALNRDLQGFRLDHPSVSLLQYVDDLLIAADTQAACLSATRDLLMTLAELGYRVSGKKAQLCQEEVTYLGFKIHKGSRSLSNSRTQAILQIPVPKTKRQVREFLGTIGYCRLWIPGFAELAQPLYAATRPGNDPLVWGEKEEEAFQSLKLALTQPPALALPSLDKPFQLFVEETSGAAKGVLTQALGPWKRPVAYLSKRLDPVAAGWPRCLRAIAAAALLTREASKLTFGQDIEITSSHNLESLLRSPPDKWLTNARITQYQVLLLDPPRVRFKQTAALNPATLLPETDDTLPIHHCLDTLDSLTSTRPDLTDQPLAQAEATLFTDGSSYIRDGKRYAGAAVVTLDSVIWAEPLPIGTSAQKAELIALTKALEWSKDKSVNIYTDSRYAFATLHVHGMIYRERGWLTAGGKAIKNAPEILALLTAVWLPKRVAVMHCKGHQKDDAPTSTGNRRADEVAREVAIRPLSTQATISAGKRTADGSEFEKRTADGSEFESPKKKAKVE

SEQ ID NO: 7708 - protein, 2002 aa, synthetic construct
MPAAKRVKLDGGDKKYSIGLDIGTNSVGWAVITDEYKVPSKKFKVLGNTDRHSIKKNLIGALLFDSGETAEATRLKRTARRRYTRRKNRICYLQEIFSNEMAKVDDSFFHRLEESFLVEEDKKHERHPIFGNIVDEVAYHEKYPTIYHLRKKLVDSTDKADLRLIYLALAHMIKFRGHFLIEGDLNPDNSDVDKLFIQLVQTYNQLFEENPINASGVDAKAILSARLSKSRRLENLIAQLPGEKKNGLFGNLIALSLGLTPNFKSNFDLAEDAKLQLSKDTYDDDLDNLLAQIGDQYADLFLAAKNLSDAILLSDILRVNTEITKAPLSASMIKRYDEHHQDLTLLKALVRQQLPEKYKEIFFDQSKNGYAGYIDGGASQEEFYKFIKPILEKMDGTEELLVKLNREDLLRKQRTFDNGSIPHQIHLGELHAILRRQEDFYPFLKDNREKIEKILTFRIPYYVGPLARGNSRFAWMTRKSEETITPWNFEEVVDKGASAQSFIERMTNFDKNLPNEKVLPKHSLLYEYFTVYNELTKVKYVTEGMRKPAFLSGEQKKAIVDLLFKTNRKVTVKQLKEDYFKKIECFDSVEISGVEDRFNASLGTYHDLLKIIKDKDFLDNEENEDILEDIVLTLTLFEDREMIEERLKTYAHLFDDKVMKQLKRRRYTGWGRLSRKLINGIRDKQSGKTILDFLKSDGFANRNFMQLIHDDSLTFKEDIQKAQVSGQGDSLHEHIANLAGSPAIKKGILQTVKVVDELVKVMGRHKPENIVIEMARENQTTQKGQKNSRERMKRIEEGIKELGSQILKEHPVENTQLQNEKLYLYYLQNGRDMYVDQELDINRLSDYDVDHIVPQSFLKDDSIDNKVLTRSDKARGKSDNVPSEEVVKKMKNYWRQLLNAKLITQRKFDNLTKAERGGLSELDKAGFIKRQLVETRQITKHVAQILDSRMNTKYDENDKLIREVKVITLKSKLVSDFRKDFQFYKVREINNYHHAHDAYLNAVVGTALIKKYPKLESEFVYGDYKVYDVRKMIAKSEQEIGKATAKYFFYSNIMNFFKTEITLANGEIRKRPLIETNGETGEIVWDKGRDFATVRKVLSMPQVNIVKKTEVQTGGFSKESILPKRNSDKLIARKKDWDPKKYGGFDSPTVAYSVLVVAKVEKGKSKKLKSVKELLGITIMERSSFEKNPIDFLEAKGYKEVKKDLIIKLPKYSLFELENGRKRMLASAGELQKGNELALPSKYVNFLYLASHYEKLKGSPEDNEQKQLFVEQHKHYLDEIIEQISEFSKRVILADANLDKVLSAYNKHRDKPIREQAENIIHLFTLTNLGAPAAFKYFDTTIDRKRYTSTKEVLDATLIHQSITGLYETRIDLSQLGGDGGGSAGSAAGSGEFGGGVLDTPPSHIGLEHLPPPPEVPQFPLNLERLQALQDLVHRSLEAGYISPWDGPGNNPVFPVRKPNGAWRFVHDLRATNALTKPIPALSPGPPDLTAPPTHPPHIICLDLKDAFFQIPVEDRFRFYLSFTLPSPGGLQPHRRFAWRVLPQGFINSPALFQRALQEPLRQVSAAFSQSLLVSYMDDILYASPTEEQRSQCYQALAARLRDLGFQVASEKTSQTPSPVPFLGQMVHEQIVTYQSLPTLQISSPISLHQLQAVLGDLQWVSRGTPTTRRPLQLLYSSLKRHHDPRAIIQLSPEQLQGIAELRQALSHNARSRYNEQEPLLAYVHLTRAGSTLVLFQKGAQFPLAYFQTPLTDNQASPWGLLLLLGCQYLQTQALSSYAKPILKYYHNLPKTSLDNWIQSSEDPRVQELLQLWPQISSQGIQPPGPWKTLITRAEVFLTPQFSPDPIPAALCLFSDGATGRGAYCLWKDHLLDFQAVPAPESAQKGELAGLLAGLAAAPPEPVNIWVDSKYLYSLLRTWVLGAWLQPDPVPSYALLYKSLLRHPAIVVGHVRSHSSASHPIASLNNYVDQLAGKRTADGSEFEKRTADGSEFESPKKKAKVE

SEQ ID NO: 7709 - protein, 2088 aa, synthetic construct
MPAAKRVKLDGGDKKYSIGLDIGTNSVGWAVITDEYKVPSKKFKVLGNTDRHSIKKNLIGALLFDSGETAEATRLKRTARRRYTRRKNRICYLQEIFSNEMAKVDDSFFHRLEESFLVEEDKKHERHPIFGNIVDEVAYHEKYPTIYHLRKKLVDSTDKADLRLIYLALAHMIKFRGHFLIEGDLNPDNSDVDKLFIQLVQTYNQLFEENPINASGVDAKAILSARLSKSRRLENLIAQLPGEKKNGLFGNLIALSLGLTPNFKSNFDLAEDAKLQLSKDTYDDDLDNLLAQIGDQYADLFLAAKNLSDAILLSDILRVNTEITKAPLSASMIKRYDEHHQDLTLLKALVRQQLPEKYKEIFFDQSKNGYAGYIDGGASQEEFYKFIKPILEKMDGTEELLVKLNREDLLRKQRTFDNGSIPHQIHLGELHAILRRQEDFYPFLKDNREKIEKILTFRIPYYVGPLARGNSRFAWMTRKSEETITPWNFEEVVDKGASAQSFIERMTNFDKNLPNEKVLPKHSLLYEYFTVYNELTKVKYVTEGMRKPAFLSGEQKKAIVDLLFKTNRKVTVKQLKEDYFKKIECFDSVEISGVEDRFNASLGTYHDLLKIIKDKDFLDNEENEDILEDIVLTLTLFEDREMIEERLKTYAHLFDDKVMKQLKRRRYTGWGRLSRKLINGIRDKQSGKTILDFLKSDGFANRNFMQLIHDDSLTFKEDIQKAQVSGQGDSLHEHIANLAGSPAIKKGILQTVKVVDELVKVMGRHKPENIVIEMARENQTTQKGQKNSRERMKRIEEGIKELGSQILKEHPVENTQLQNEKLYLYYLQNGRDMYVDQELDINRLSDYDVDHIVPQSFLKDDSIDNKVLTRSDKARGKSDNVPSEEVVKKMKNYWRQLLNAKLITQRKFDNLTKAERGGLSELDKAGFIKRQLVETRQITKHVAQILDSRMNTKYDENDKLIREVKVITLKSKLVSDFRKDFQFYKVREINNYHHAHDAYLNAVVGTALIKKYPKLESEFVYGDYKVYDVRKMIAKSEQEIGKATAKYFFYSNIMNFFKTEITLANGEIRKRPLIETNGETGEIVWDKGRDFATVRKVLSMPQVNIVKKTEVQTGGFSKESILPKRNSDKLIARKKDWDPKKYGGFDSPTVAYSVLVVAKVEKGKSKKLKSVKELLGITIMERSSFEKNPIDFLEAKGYKEVKKDLIIKLPKYSLFELENGRKRMLASAGELQKGNELALPSKYVNFLYLASHYEKLKGSPEDNEQKQLFVEQHKHYLDEIIEQISEFSKRVILADANLDKVLSAYNKHRDKPIREQAENIIHLFTLTNLGAPAAFKYFDTTIDRKRYTSTKEVLDATLIHQSITGLYETRIDLSQLGGDGGGSAGSAAGSGEFGGVPWILKKPLELTIKLDLEEQQGTLLNNSILSKKGKEELKQLFEKYSALWQSWENQVGHRRIRPHKIATGTVKPTPQKQYHINPKAKPDIQIVINDLLKQGVLIQKESTMNTPVYPVPKPNGRWRMVLDYRAVNKVTPLIAVQNQHSYGILGSLFKGRYKTTIDLSNGFWAHPIVPEDYWITAFTWQGKQYCWTVLPQGFLNSPGLFTGDVVDLLQGIPNVEVYVDDVYISHDSEKEHLEYLDILFNRLKEAGYIISLKKSNIANSIVDFLGFQITNEGRGLTDTFKEKLENITAPTTLKQLQSILGLLNFARNFIPDFTELIAPLYALIPKSTKNYVPWQIEHSTTLETLITKLNGAEYLQGRKGDKTLIMKVNASYTTGYIRYYNEGEKKPISYVSIVFSKTELKFTELEKLLTTVHKGLLKALDLSMGQNIHVYSPIVSMQNIQKTPQTAKKALASRWLSWLSYLEDPRIRFFYDPQMPALKDLPAVDTGKDNKKHPSNFQHIFYTDGSAITSPTKEGHLNAGMGIVYFINKDGNLQKQQEWSISLGNHTAQFAEIAAFEFALKKCLPLGGNILVVTDSNYVAKAYNEELDVWASNGFVNNRKKPLKHISKWKSVADLKRLRPDVVVTHEPGHQKLDSSPHAYGNNLADQLATQASFKVHAGKRTADGSEFEKRTADGSEFESPKKKAKVE

SEQ ID NO: 7710 - protein, 2088 aa, synthetic construct
MPAAKRVKLDGGDKKYSIGLDIGTNSVGWAVITDEYKVPSKKFKVLGNTDRHSIKKNLIGALLFDSGETAEATRLKRTARRRYTRRKNRICYLQEIFSNEMAKVDDSFFHRLEESFLVEEDKKHERHPIFGNIVDEVAYHEKYPTIYHLRKKLVDSTDKADLRLIYLALAHMIKFRGHFLIEGDLNPDNSDVDKLFIQLVQTYNQLFEENPINASGVDAKAILSARLSKSRRLENLIAQLPGEKKNGLFGNLIALSLGLTPNFKSNFDLAEDAKLQLSKDTYDDDLDNLLAQIGDQYADLFLAAKNLSDAILLSDILRVNTEITKAPLSASMIKRYDEHHQDLTLLKALVRQQLPEKYKEIFFDQSKNGYAGYIDGGASQEEFYKFIKPILEKMDGTEELLVKLNREDLLRKQRTFDNGSIPHQIHLGELHAILRRQEDFYPFLKDNREKIEKILTFRIPYYVGPLARGNSRFAWMTRKSEETITPWNFEEVVDKGASAQSFIERMTNFDKNLPNEKVLPKHSLLYEYFTVYNELTKVKYVTEGMRKPAFLSGEQKKAIVDLLFKTNRKVTVKQLKEDYFKKIECFDSVEISGVEDRFNASLGTYHDLLKIIKDKDFLDNEENEDILEDIVLTLTLFEDREMIEERLKTYAHLFDDKVMKQLKRRRYTGWGRLSRKLINGIRDKQSGKTILDFLKSDGFANRNFMQLIHDDSLTFKEDIQKAQVSGQGDSLHEHIANLAGSPAIKKGILQTVKVVDELVKVMGRHKPENIVIEMARENQTTQKGQKNSRERMKRIEEGIKELGSQILKEHPVENTQLQNEKLYLYYLQNGRDMYVDQELDINRLSDYDVDHIVPQSFLKDDSIDNKVLTRSDKARGKSDNVPSEEVVKKMKNYWRQLLNAKLITQRKFDNLTKAERGGLSELDKAGFIKRQLVETRQITKHVAQILDSRMNTKYDENDKLIREVKVITLKSKLVSDFRKDFQFYKVREINNYHHAHDAYLNAVVGTALIKKYPKLESEFVYGDYKVYDVRKMIAKSEQEIGKATAKYFFYSNIMNFFKTEITLANGEIRKRPLIETNGETGEIVWDKGRDFATVRKVLSMPQVNIVKKTEVQTGGFSKESILPKRNSDKLIARKKDWDPKKYGGFDSPTVAYSVLVVAKVEKGKSKKLKSVKELLGITIMERSSFEKNPIDFLEAKGYKEVKKDLIIKLPKYSLFELENGRKRMLASAGELQKGNELALPSKYVNFLYLASHYEKLKGSPEDNEQKQLFVEQHKHYLDEIIEQISEFSKRVILADANLDKVLSAYNKHRDKPIREQAENIIHLFTLTNLGAPAAFKYFDTTIDRKRYTSTKEVLDATLIHQSITGLYETRIDLSQLGGDGGGSAGSAAGSGEFGGVPWILKKPLELTIKLDLEEQQGTLLNNSILSKKGKEELKQLFEKYSALWQSWENQVGHRRIRPHKIATGTVKPTPQKQYHINPKAKPDIQIVINDLLKQGVLIQKESTMNTPVYPVPKPNGRWRMVLDYRAVNKVTPLIAVQNQHSYGILGSLFKGRYKTTIDLSNGFWAHPIVPEDYWITAFTWQGKQYCWTVLPQGFLNSPGLFNGDVVDLLQGIPNVEVYVDDVYISHDSEKEHLEYLDILFNRLKEAGYIISLKKSNIANSIVDFLGFQITNEGRGLTDTFKEKLENITAPTTLKQLQSILGLLNFARNFIPDFTELIAPLYALIPKSPKNYVPWQIEHSTTLETLITKLNGAEYLQGRKGDKTLIMKVNASYTTGYIRYYNEGEKKPISYVSIVFSKTELKFTELEKLLTTVHKGLLKALDLSMGQNIHVYSPIVSMQNIQKTPQTAKKALASRWLSWLSYLEDPRIRFFYDPQMPALKDLPAVDTGKDNKKHPSNFQHIFYTDGSAITSPTKEGHLNAGMGIVYFINKDGNLQKQQEWSISLGNHTAQFAEIAAFEFALKKCLPLGGNILVVTDSNYVAKAYNEELDVWASNGFVNNRKKPLKHISKWKSVADLKRLRPDVVVTHEPGHQKLDSSPHAYGNNLADQLATQASFKVHAGKRTADGSEFEKRTADGSEFESPKKKAKVE

SEQ ID NO: 7711 - protein, 2096 aa, synthetic construct
MPAAKRVKLDGGDKKYSIGLDIGTNSVGWAVITDEYKVPSKKFKVLGNTDRHSIKKNLIGALLFDSGETAEATRLKRTARRRYTRRKNRICYLQEIFSNEMAKVDDSFFHRLEESFLVEEDKKHERHPIFGNIVDEVAYHEKYPTIYHLRKKLVDSTDKADLRLIYLALAHMIKFRGHFLIEGDLNPDNSDVDKLFIQLVQTYNQLFEENPINASGVDAKAILSARLSKSRRLENLIAQLPGEKKNGLFGNLIALSLGLTPNFKSNFDLAEDAKLQLSKDTYDDDLDNLLAQIGDQYADLFLAAKNLSDAILLSDILRVNTEITKAPLSASMIKRYDEHHQDLTLLKALVRQQLPEKYKEIFFDQSKNGYAGYIDGGASQEEFYKFIKPILEKMDGTEELLVKLNREDLLRKQRTFDNGSIPHQIHLGELHAILRRQEDFYPFLKDNREKIEKILTFRIPYYVGPLARGNSRFAWMTRKSEETITPWNFEEVVDKGASAQSFIERMTNFDKNLPNEKVLPKHSLLYEYFTVYNELTKVKYVTEGMRKPAFLSGEQKKAIVDLLFKTNRKVTVKQLKEDYFKKIECFDSVEISGVEDRFNASLGTYHDLLKIIKDKDFLDNEENEDILEDIVLTLTLFEDREMIEERLKTYAHLFDDKVMKQLKRRRYTGWGRLSRKLINGIRDKQSGKTILDFLKSDGFANRNFMQLIHDDSLTFKEDIQKAQVSGQGDSLHEHIANLAGSPAIKKGILQTVKVVDELVKVMGRHKPENIVIEMARENQTTQKGQKNSRERMKRIEEGIKELGSQILKEHPVENTQLQNEKLYLYYLQNGRDMYVDQELDINRLSDYDVDHIVPQSFLKDDSIDNKVLTRSDKARGKSDNVPSEEVVKKMKNYWRQLLNAKLITQRKFDNLTKAERGGLSELDKAGFIKRQLVETRQITKHVAQILDSRMNTKYDENDKLIREVKVITLKSKLVSDFRKDFQFYKVREINNYHHAHDAYLNAVVGTALIKKYPKLESEFVYGDYKVYDVRKMIAKSEQEIGKATAKYFFYSNIMNFFKTEITLANGEIRKRPLIETNGETGEIVWDKGRDFATVRKVLSMPQVNIVKKTEVQTGGFSKESILPKRNSDKLIARKKDWDPKKYGGFDSPTVAYSVLVVAKVEKGKSKKLKSVKELLGITIMERSSFEKNPIDFLEAKGYKEVKKDLIIKLPKYSLFELENGRKRMLASAGELQKGNELALPSKYVNFLYLASHYEKLKGSPEDNEQKQLFVEQHKHYLDEIIEQISEFSKRVILADANLDKVLSAYNKHRDKPIREQAENIIHLFTLTNLGAPAAFKYFDTTIDRKRYTSTKEVLDATLIHQSITGLYETRIDLSQLGGDGGGSAGSAAGSGEFGGTLQLEEEYRLFEPESTQKQEMDIWLKNFPQAWAETGGMGTAHCQAPVLIQLKATATPISIRQYPMPHEAYQGIKPHIRRMLDQGILKPCQSPWNTPLLPVKKPGTEDYRPVQDLREVNKRVEDIHPTVPNPYNLLSTLPPSHPWYTVLDLKDAFFCLRLHSESQLLFAFEWRDPEIGLSGQLTWTRLPQGFKNSPTLFNEALHSDLADFRVRYPALVLLQYVDDLLLAAATRTECLEGTKALLETLGNKGYRASAKKAQICLQEVTYLGYSLKDGQRWLTKARKEAILSIPVPKNSRQVREFLGKAGYCRLFIPGFAELAAPLYPLTRPGTLFQWGTEQQLAFEDIKKALLSSPALGLPDITKPFELFIDENSGFAKGVLVQKLGPWKRPVAYLSKKLDTVASGWPPCLRMVAAIAILVKDAGKLTLGQPLTILTSHPVEALVRQPPNKWLSNARMTHYQAMLLDAERVHFGPTVSLNPATLLPLPSGGNHHDCLQILAETHGTRPDLTDQPLPDADLTWYTDGSSFIRNGEREAGAAVTTESEVIWAAPLPPGTSAQRAELIALTQALKMAEGKKLTVYTDSRYAFATTHVHGEIYRRRGWLTSEGKEIKNKNEILALLEALFLPKRLSIIHCPGHQKGDSPQAKGNRLADDTAKKAATETHSSLTVLPAGKRTADGSEFEKRTADGSEFESPKKKAKVE

SEQ ID NO: 7712 - protein, 2095 aa, synthetic construct
MPAAKRVKLDGGDKKYSIGLDIGTNSVGWAVITDEYKVPSKKFKVLGNTDRHSIKKNLIGALLFDSGETAEATRLKRTARRRYTRRKNRICYLQEIFSNEMAKVDDSFFHRLEESFLVEEDKKHERHPIFGNIVDEVAYHEKYPTIYHLRKKLVDSTDKADLRLIYLALAHMIKFRGHFLIEGDLNPDNSDVDKLFIQLVQTYNQLFEENPINASGVDAKAILSARLSKSRRLENLIAQLPGEKKNGLFGNLIALSLGLTPNFKSNFDLAEDAKLQLSKDTYDDDLDNLLAQIGDQYADLFLAAKNLSDAILLSDILRVNTEITKAPLSASMIKRYDEHHQDLTLLKALVRQQLPEKYKEIFFDQSKNGYAGYIDGGASQEEFYKFIKPILEKMDGTEELLVKLNREDLLRKQRTFDNGSIPHQIHLGELHAILRRQEDFYPFLKDNREKIEKILTFRIPYYVGPLARGNSRFAWMTRKSEETITPWNFEEVVDKGASAQSFIERMTNFDKNLPNEKVLPKHSLLYEYFTVYNELTKVKYVTEGMRKPAFLSGEQKKAIVDLLFKTNRKVTVKQLKEDYFKKIECFDSVEISGVEDRFNASLGTYHDLLKIIKDKDFLDNEENEDILEDIVLTLTLFEDREMIEERLKTYAHLFDDKVMKQLKRRRYTGWGRLSRKLINGIRDKQSGKTILDFLKSDGFANRNFMQLIHDDSLTFKEDIQKAQVSGQGDSLHEHIANLAGSPAIKKGILQTVKVVDELVKVMGRHKPENIVIEMARENQTTQKGQKNSRERMKRIEEGIKELGSQILKEHPVENTQLQNEKLYLYYLQNGRDMYVDQELDINRLSDYDVDHIVPQSFLKDDSIDNKVLTRSDKARGKSDNVPSEEVVKKMKNYWRQLLNAKLITQRKFDNLTKAERGGLSELDKAGFIKRQLVETRQITKHVAQILDSRMNTKYDENDKLIREVKVITLKSKLVSDFRKDFQFYKVREINNYHHAHDAYLNAVVGTALIKKYPKLESEFVYGDYKVYDVRKMIAKSEQEIGKATAKYFFYSNIMNFFKTEITLANGEIRKRPLIETNGETGEIVWDKGRDFATVRKVLSMPQVNIVKKTEVQTGGFSKESILPKRNSDKLIARKKDWDPKKYGGFDSPTVAYSVLVVAKVEKGKSKKLKSVKELLGITIMERSSFEKNPIDFLEAKGYKEVKKDLIIKLPKYSLFELENGRKRMLASAGELQKGNELALPSKYVNFLYLASHYEKLKGSPEDNEQKQLFVEQHKHYLDEIIEQISEFSKRVILADANLDKVLSAYNKHRDKPIREQAENIIHLFTLTNLGAPAAFKYFDTTIDRKRYTSTKEVLDATLIHQSITGLYETRIDLSQLGGDGGGSAGSAAGSGEFGGVLNLEEEYRLHEKPVPSSIDPSWLQLFPTVWAERAGMGLANQVPPVVVELRSGASPVAVRQYPMSKEAREGIRPHIQKFLDLGVLVPCRSPWNTPLLPVKKPGTNDYRPVQDLREINKRVQDIHPTVPNPYNLLSSLPPSYTWYSVLDLKDAFFCLRLHPNSQPLFAFEWKDPEKGNTGQLTWTRLPQGFKNSPTLFNEALHRDLAPFRALNPQVVLLQYVDDLLVAAPTYEDCKKGTQKLLQELSKLGYRVSAKKAQLCQREVTYLGYLLKEGKRWLTPARKATVMKIPVPTTPRQVREFLGKAGFCRLFIPGFASLAAPLYPLTKPSIPFIWTEEHQQAFDHIKKALLSAPALALPDLTKPFTLYIDERAGVARGVLTQTLGPWRRPVAYLSKKLDPVASGWPTCLKAVAAVALLLKDADKLTLGQNVTVIASHSLESIVRQPPDRWMTNARMTHYQSLLLNERVSFAPPAVLNPATLLPVESEATPVHRCSEILAEETGTRRDLEDQPLPGVPTWYTDGSSFITEGKRRAGAPIVDGKRTVWASSLPEGTSAQKAELVALTQALRLAEGKNINIYTDSRYAFATAHIHGAIYKQRGWLTSAGKDIKNKEEILALLEAIHLPRRVAIIHCPGHQRGSNPVATGNRRADEAAKQAALSTRVLAGTTKPAGKRTADGSEFEKRTADGSEFESPKKKAKVE

SEQ ID NO: 7713 - protein, 2219 aa, synthetic construct
MPAAKRVKLDGGDKKYSIGLDIGTNSVGWAVITDEYKVPSKKFKVLGNTDRHSIKKNLIGALLFDSGETAEATRLKRTARRRYTRRKNRICYLQEIFSNEMAKVDDSFFHRLEESFLVEEDKKHERHPIFGNIVDEVAYHEKYPTIYHLRKKLVDSTDKADLRLIYLALAHMIKFRGHFLIEGDLNPDNSDVDKLFIQLVQTYNQLFEENPINASGVDAKAILSARLSKSRRLENLIAQLPGEKKNGLFGNLIALSLGLTPNFKSNFDLAEDAKLQLSKDTYDDDLDNLLAQIGDQYADLFLAAKNLSDAILLSDILRVNTEITKAPLSASMIKRYDEHHQDLTLLKALVRQQLPEKYKEIFFDQSKNGYAGYIDGGASQEEFYKFIKPILEKMDGTEELLVKLNREDLLRKQRTFDNGSIPHQIHLGELHAILRRQEDFYPFLKDNREKIEKILTFRIPYYVGPLARGNSRFAWMTRKSEETITPWNFEEVVDKGASAQSFIERMTNFDKNLPNEKVLPKHSLLYEYFTVYNELTKVKYVTEGMRKPAFLSGEQKKAIVDLLFKTNRKVTVKQLKEDYFKKIECFDSVEISGVEDRFNASLGTYHDLLKIIKDKDFLDNEENEDILEDIVLTLTLFEDREMIEERLKTYAHLFDDKVMKQLKRRRYTGWGRLSRKLINGIRDKQSGKTILDFLKSDGFANRNFMQLIHDDSLTFKEDIQKAQVSGQGDSLHEHIANLAGSPAIKKGILQTVKVVDELVKVMGRHKPENIVIEMARENQTTQKGQKNSRERMKRIEEGIKELGSQILKEHPVENTQLQNEKLYLYYLQNGRDMYVDQELDINRLSDYDVDHIVPQSFLKDDSIDNKVLTRSDKARGKSDNVPSEEVVKKMKNYWRQLLNAKLITQRKFDNLTKAERGGLSELDKAGFIKRQLVETRQITKHVAQILDSRMNTKYDENDKLIREVKVITLKSKLVSDFRKDFQFYKVREINNYHHAHDAYLNAVVGTALIKKYPKLESEFVYGDYKVYDVRKMIAKSEQEIGKATAKYFFYSNIMNFFKTEITLANGEIRKRPLIETNGETGEIVWDKGRDFATVRKVLSMPQVNIVKKTEVQTGGFSKESILPKRNSDKLIARKKDWDPKKYGGFDSPTVAYSVLVVAKVEKGKSKKLKSVKELLGITIMERSSFEKNPIDFLEAKGYKEVKKDLIIKLPKYSLFELENGRKRMLASAGELQKGNELALPSKYVNFLYLASHYEKLKGSPEDNEQKQLFVEQHKHYLDEIIEQISEFSKRVILADANLDKVLSAYNKHRDKPIREQAENIIHLFTLTNLGAPAAFKYFDTTIDRKRYTSTKEVLDATLIHQSITGLYETRIDLSQLGGDGGGSAGSAAGSGEFGGTLGDQGSRGSDPLPEPRVTLTVEGIPTEFLVNTGAEHSVLTKPMGKMGSKRTVVAGATGSKVYPWTTKRLLKIGQKQVTHSFLVIPECPAPLLGRDLLTKLKAQIQFSTEGPQVTWEDRPAMCLVLNLEEEYRLHEKPVPPSIDPSWLQLFPMVWAEKAGMGLANQVPPVVVELKSDASPVAVRQYPMSKEAREGIRPHIQRFLDLGILVPCQSPWNTPLLPVKKPGTNDYRPVQDLREVNKRVQDIHPTVPNPYNLLSSLPPSHTWYSVLDLKDAFFCLKLHPNSQPLFAFEWRDPEKGNTGQLTWTRLPQGFKNSPTLFDEALHRDLASFRALNPQVVMLQYVDDLLVAAPTYRDCKEGTRRLLQELSKLGYRVSAKKAQLCREEVTYLGYLLKGGKRWLTPARKATVMKIPTPTTPRQVREFLGTAGFCRLWIPGFASLAAPLYPLTREKVPFTWTEAHQEAFGRIKEALLSAPALALPDLTKPFALYVDEKEGVARGVLTQTLGPWRRPVAYLSKKLDPVASGWPTCLKAIAAVALLLKDADKLTLGQNVLVIAPHNLESIVRQPPDRWMTNARMTHYQSLLLNERVSFAPPAILNPATLLPVESDDTPIHICSEILAEETGTRPDLRDQPLPGVPAWYTDGSSFIMDGRRQAGAAIVDNKRTVWASNLPEGTSAQKAELIALTQALRLAEGKSINIYTDSRYAFATAHVHGAIYKQRGLLTSAGKDIKNKEEILALLEAIHLPKRVAIIHCPGHQRGTDPVATGNRKADEAAKQAAQSTRILTETTKNAGKRTADGSEFEKRTADGSEFESPKKKAKVE

SEQ ID NO: 7714 - protein, 2128 aa, synthetic construct
MPAAKRVKLDGGDKKYSIGLDIGTNSVGWAVITDEYKVPSKKFKVLGNTDRHSIKKNLIGALLFDSGETAEATRLKRTARRRYTRRKNRICYLQEIFSNEMAKVDDSFFHRLEESFLVEEDKKHERHPIFGNIVDEVAYHEKYPTIYHLRKKLVDSTDKADLRLIYLALAHMIKFRGHFLIEGDLNPDNSDVDKLFIQLVQTYNQLFEENPINASGVDAKAILSARLSKSRRLENLIAQLPGEKKNGLFGNLIALSLGLTPNFKSNFDLAEDAKLQLSKDTYDDDLDNLLAQIGDQYADLFLAAKNLSDAILLSDILRVNTEITKAPLSASMIKRYDEHHQDLTLLKALVRQQLPEKYKEIFFDQSKNGYAGYIDGGASQEEFYKFIKPILEKMDGTEELLVKLNREDLLRKQRTFDNGSIPHQIHLGELHAILRRQEDFYPFLKDNREKIEKILTFRIPYYVGPLARGNSRFAWMTRKSEETITPWNFEEVVDKGASAQSFIERMTNFDKNLPNEKVLPKHSLLYEYFTVYNELTKVKYVTEGMRKPAFLSGEQKKAIVDLLFKTNRKVTVKQLKEDYFKKIECFDSVEISGVEDRFNASLGTYHDLLKIIKDKDFLDNEENEDILEDIVLTLTLFEDREMIEERLKTYAHLFDDKVMKQLKRRRYTGWGRLSRKLINGIRDKQSGKTILDFLKSDGFANRNFMQLIHDDSLTFKEDIQKAQVSGQGDSLHEHIANLAGSPAIKKGILQTVKVVDELVKVMGRHKPENIVIEMARENQTTQKGQKNSRERMKRIEEGIKELGSQILKEHPVENTQLQNEKLYLYYLQNGRDMYVDQELDINRLSDYDVDHIVPQSFLKDDSIDNKVLTRSDKARGKSDNVPSEEVVKKMKNYWRQLLNAKLITQRKFDNLTKAERGGLSELDKAGFIKRQLVETRQITKHVAQILDSRMNTKYDENDKLIREVKVITLKSKLVSDFRKDFQFYKVREINNYHHAHDAYLNAVVGTALIKKYPKLESEFVYGDYKVYDVRKMIAKSEQEIGKATAKYFFYSNIMNFFKTEITLANGEIRKRPLIETNGETGEIVWDKGRDFATVRKVLSMPQVNIVKKTEVQTGGFSKESILPKRNSDKLIARKKDWDPKKYGGFDSPTVAYSVLVVAKVEKGKSKKLKSVKELLGITIMERSSFEKNPIDFLEAKGYKEVKKDLIIKLPKYSLFELENGRKRMLASAGELQKGNELALPSKYVNFLYLASHYEKLKGSPEDNEQKQLFVEQHKHYLDEIIEQISEFSKRVILADANLDKVLSAYNKHRDKPIREQAENIIHLFTLTNLGAPAAFKYFDTTIDRKRYTSTKEVLDATLIHQSITGLYETRIDLSQLGGDGGGSAGSAAGSGEFGGLLGRDLLTKLKAQIQFSTEGPQVTWEDRPAMCLVLNLEEEYRLHEKPVPPSIDPSWLQLFPMVWAEKAGMGLANQVPPVVVELKSDASPVAVRQYPMSKEAREGIRPHIQRFLDLGILVPCQSPWNTPLLPVKKPGTNDYRPVQDLREVNKRVQDIHPTVPNPYNLLSSLPPSHTWYSVLDLKDAFFCLKLHPNSQPLFAFEWRDPEKGNTGQLTWTRLPQGFKNSPTLFNEALHRDLASFRALNPQVVMLQYVDDLLVAAPTYRDCKEGTRRLLQELSKLGYRVSAKKAQLCREEVTYLGYLLKGGKRWLTPARKATVMKIPTPTTPRQVREFLGTAGFCRLWIPGFASLAAPLYPLTRPKVPFTWTEAHQEAFGRIKEALLSAPALALPDLTKPFALYVDEKEGVARGVLTQTLGPWRRPVAYLSKKLDPVASGWPTCLKAIAAVALLLKDADKLTLGQNVLVIAPHNLESIVRQPPDRWMTNARMTHYQSLLLNERVSFAPPAILNPATLLPVESDDTPIHICSEILAEETGTRPDLRDQPLPGVPAWYTDGSSFIMDGRRQAGAAIVDNKRTVWASNLPEGTSAQKAELIALTQALRLAEGKSINIYTDSRYAFATAHVHGAIYKQRGWLTSAGKDIKNKEEILALLEAIHLPKRVAIIHCPGHQRGTDPVATGNRKADEAAKQAAQSTRILTETTKNAGKRTADGSEFEKRTADGSEFESPKKKAKVE

SEQ ID NO: 7715 - protein, 2219 aa, synthetic construct
MPAAKRVKLDGGDKKYSIGLDIGTNSVGWAVITDEYKVPSKKFKVLGNTDRHSIKKNLIGALLFDSGETAEATRLKRTARRRYTRRKNRICYLQEIFSNEMAKVDDSFFHRLEESFLVEEDKKHERHPIFGNIVDEVAYHEKYPTIYHLRKKLVDSTDKADLRLIYLALAHMIKFRGHFLIEGDLNPDNSDVDKLFIQLVQTYNQLFEENPINASGVDAKAILSARLSKSRRLENLIAQLPGEKKNGLFGNLIALSLGLTPNFKSNFDLAEDAKLQLSKDTYDDDLDNLLAQIGDQYADLFLAAKNLSDAILLSDILRVNTEITKAPLSASMIKRYDEHHQDLTLLKALVRQQLPEKYKEIFFDQSKNGYAGYIDGGASQEEFYKFIKPILEKMDGTEELLVKLNREDLLRKQRTFDNGSIPHQIHLGELHAILRRQEDFYPFLKDNREKIEKILTFRIPYYVGPLARGNSRFAWMTRKSEETITPWNFEEVVDKGASAQSFIERMTNFDKNLPNEKVLPKHSLLYEYFTVYNELTKVKYVTEGMRKPAFLSGEQKKAIVDLLFKTNRKVTVKQLKEDYFKKIECFDSVEISGVEDRFNASLGTYHDLLKIIKDKDFLDNEENEDILEDIVLTLTLFEDREMIEERLKTYAHLFDDKVMKQLKRRRYTGWGRLSRKLINGIRDKQSGKTILDFLKSDGFANRNFMQLIHDDSLTFKEDIQKAQVSGQGDSLHEHIANLAGSPAIKKGILQTVKVVDELVKVMGRHKPENIVIEMARENQTTQKGQKNSRERMKRIEEGIKELGSQILKEHPVENTQLQNEKLYLYYLQNGRDMYVDQELDINRLSDYDVDHIVPQSFLKDDSIDNKVLTRSDKARGKSDNVPSEEVVKKMKNYWRQLLNAKLITQRKFDNLTKAERGGLSELDKAGFIKRQLVETRQITKHVAQILDSRMNTKYDENDKLIREVKVITLKSKLVSDFRKDFQFYKVREINNYHHAHDAYLNAVVGTALIKKYPKLESEFVYGDYKVYDVRKMIAKSEQEIGKATAKYFFYSNIMNFFKTEITLANGEIRKRPLIETNGETGEIVWDKGRDFATVRKVLSMPQVNIVKKTEVQTGGFSKESILPKRNSDKLIARKKDWDPKKYGGFDSPTVAYSVLVVAKVEKGKSKKLKSVKELLGITIMERSSFEKNPIDFLEAKGYKEVKKDLIIKLPKYSLFELENGRKRMLASAGELQKGNELALPSKYVNFLYLASHYEKLKGSPEDNEQKQLFVEQHKHYLDEIIEQISEFSKRVILADANLDKVLSAYNKHRDKPIREQAENIIHLFTLTNLGAPAAFKYFDTTIDRKRYTSTKEVLDATLIHQSITGLYETRIDLSQLGGDGGGSAGSAAGSGEFGGTLGDQGSRGSDPLPEPRVTLTVEGIPTEFLVNTGAEHSVLTKPMGKMGSKRTVVAGATGSKVYPWTTKRLLKIGQKQVTHSFLVIPECPAPLLGRDLLTKLKAQIQFSTEGPQVTWEDRPAMCLVLNLEEEYRLHEKPVPPSIDPSWLQLFPMVWAEKAGMGLANQVPPVVVELKSDASPVAVRQYPMSKEAREGIRPHIQRFLDLGILVPCQSPWNTPLLPVKKPGTNDYRPVQDLREVNKRVQDIHPTVPNPYNLLSSLPPSHTWYSVLDLKDAFFCLKLHPNSQPLFAFEWRDPEKGNTGQLTWTRLPQGFKNSPTLFNEALHRDLASFRALNPQVVMLQYVDDLLVAAPTYRDCKEGTRRLLQELSKLGYRVSAKKAQLCREEVTYLGYLLKGGKRWLTPARKATVMKIPTPTTPRQVREFLGTAGFCRLWIPGFASLAAPLYPLTRPKVPFTWTEAHQEAFGRIKEALLSAPALALPDLTKPFALYVDEKEGVARGVLTQTLGPWRRPVAYLSKKLDPVASGWPTCLKAIAAVALLLKDADKLTLGQNVLVIAPHNLESIVRQPPDRWMTNARMTHYQSLLLNERVSFAPPAILNPATLLPVESDDTPIHICSEILAEETGTRPDLRDQPLPGVPAWYTDGSSFIMDGRRQAGAAIVDNKRTVWASNLPEGTSAQKAELIALTQALRLAEGKSINIYTDSRYAFATAHVHGAIYKQRGWLTSAGKDIKNKEEILALLEAIHLPKRVAIIHCPGHQRGTDPVATGNRKADEAAKQAAQSTRILTETTKNAGKRTADGSEFEKRTADGSEFESPKKKAKVE

SEQ ID NO: 7716 - protein, 2097 aa, synthetic construct
MPAAKRVKLDGGDKKYSIGLDIGTNSVGWAVITDEYKVPSKKFKVLGNTDRHSIKKNLIGALLFDSGETAEATRLKRTARRRYTRRKNRICYLQEIFSNEMAKVDDSFFHRLEESFLVEEDKKHERHPIFGNIVDEVAYHEKYPTIYHLRKKLVDSTDKADLRLIYLALAHMIKFRGHFLIEGDLNPDNSDVDKLFIQLVQTYNQLFEENPINASGVDAKAILSARLSKSRRLENLIAQLPGEKKNGLFGNLIALSLGLTPNFKSNFDLAEDAKLQLSKDTYDDDLDNLLAQIGDQYADLFLAAKNLSDAILLSDILRVNTEITKAPLSASMIKRYDEHHQDLTLLKALVRQQLPEKYKEIFFDQSKNGYAGYIDGGASQEEFYKFIKPILEKMDGTEELLVKLNREDLLRKQRTFDNGSIPHQIHLGELHAILRRQEDFYPFLKDNREKIEKILTFRIPYYVGPLARGNSRFAWMTRKSEETITPWNFEEVVDKGASAQSFIERMTNFDKNLPNEKVLPKHSLLYEYFTVYNELTKVKYVTEGMRKPAFLSGEQKKAIVDLLFKTNRKVTVKQLKEDYFKKIECFDSVEISGVEDRFNASLGTYHDLLKIIKDKDFLDNEENEDILEDIVLTLTLFEDREMIEERLKTYAHLFDDKVMKQLKRRRYTGWGRLSRKLINGIRDKQSGKTILDFLKSDGFANRNFMQLIHDDSLTFKEDIQKAQVSGQGDSLHEHIANLAGSPAIKKGILQTVKVVDELVKVMGRHKPENIVIEMARENQTTQKGQKNSRERMKRIEEGIKELGSQILKEHPVENTQLQNEKLYLYYLQNGRDMYVDQELDINRLSDYDVDHIVPQSFLKDDSIDNKVLTRSDKARGKSDNVPSEEVVKKMKNYWRQLLNAKLITQRKFDNLTKAERGGLSELDKAGFIKRQLVETRQITKHVAQILDSRMNTKYDENDKLIREVKVITLKSKLVSDFRKDFQFYKVREINNYHHAHDAYLNAVVGTALIKKYPKLESEFVYGDYKVYDVRKMIAKSEQEIGKATAKYFFYSNIMNFFKTEITLANGEIRKRPLIETNGETGEIVWDKGRDFATVRKVLSMPQVNIVKKTEVQTGGFSKESILPKRNSDKLIARKKDWDPKKYGGFDSPTVAYSVLVVAKVEKGKSKKLKSVKELLGITIMERSSFEKNPIDFLEAKGYKEVKKDLIIKLPKYSLFELENGRKRMLASAGELQKGNELALPSKYVNFLYLASHYEKLKGSPEDNEQKQLFVEQHKHYLDEIIEQISEFSKRVILADANLDKVLSAYNKHRDKPIREQAENIIHLFTLTNLGAPAAFKYFDTTIDRKRYTSTKEVLDATLIHQSITGLYETRIDLSQLGGDGGGSAGSAAGSGEFGGTLNLEDEYRLYETSAEPEVSPGSTWLSDFPQAWAETGGMGLAVRQAPLIIPLKATSTPVSIKQYPMSQEAKLGIKPHIQRLLDQGILVPCQSPWNTPLLPVKKPGTNDYRPVQDLREVNKRVEDIHPTVPNPYNLLSGLPPSHRWYTVLDLKDAFFCLRLHPTSQPLFAFEWRDPGMGISGQLTWTRLPQGFKNSPTLFNEALHRDLADFRIQHPDLILLQYVDDILLAATSELDCQQGTRALLLTLGNLGYRASAKKAQLCQKQVKYLGYLLKEGQRWLTEARKETVMGQPTPKTPRQLREFLGTAGFCRLWIPGFAEMAAPLYPLTKPGTLFNWGPDQQKAYQEIKQALLTAPALGLPDLTKPFELFVDEKQGYAKGVLTQKLGPWRRPVAYLSKKLDPVAAGWPPCLRMVAAIAVLRKDAGKLTMGQPLVILAPHAVEALVKQPPDRWLSNARMTHYQAMLLDTDRVQFGPVVALNPATLLPLPEEGAPHDCLEILAETHGTRPDLTDQPIPDADHTWYTDGSSFLQEGQRKAGAAVTTETEVIWARALPAGTSAQRAELIALTQALKMAEGKRLNVYTDSRYAFATAHIHGEIYRRRGWLTSEGREIKNKSEILALLKALFLPKRLSIIHCLGHQKGDSAEARGNRLADQAAREAAIKTPPDTSTLLAGKRTADGSEFEKRTADGSEFESPKKKAKVE

SEQ ID NO: 7717 - protein, 2097 aa, synthetic construct
MPAAKRVKLDGGDKKYSIGLDIGTNSVGWAVITDEYKVPSKKFKVLGNTDRHSIKKNLIGALLFDSGETAEATRLKRTARRRYTRRKNRICYLQEIFSNEMAKVDDSFFHRLEESFLVEEDKKHERHPIFGNIVDEVAYHEKYPTIYHLRKKLVDSTDKADLRLIYLALAHMIKFRGHFLIEGDLNPDNSDVDKLFIQLVQTYNQLFEENPINASGVDAKAILSARLSKSRRLENLIAQLPGEKKNGLFGNLIALSLGLTPNFKSNFDLAEDAKLQLSKDTYDDDLDNLLAQIGDQYADLFLAAKNLSDAILLSDILRVNTEITKAPLSASMIKRYDEHHQDLTLLKALVRQQLPEKYKEIFFDQSKNGYAGYIDGGASQEEFYKFIKPILEKMDGTEELLVKLNREDLLRKQRTFDNGSIPHQIHLGELHAILRRQEDFYPFLKDNREKIEKILTFRIPYYVGPLARGNSRFAWMTRKSEETITPWNFEEVVDKGASAQSFIERMTNFDKNLPNEKVLPKHSLLYEYFTVYNELTKVKYVTEGMRKPAFLSGEQKKAIVDLLFKTNRKVTVKQLKEDYFKKIECFDSVEISGVEDRFNASLGTYHDLLKIIKDKDFLDNEENEDILEDIVLTLTLFEDREMIEERLKTYAHLFDDKVMKQLKRRRYTGWGRLSRKLINGIRDKQSGKTILDFLKSDGFANRNFMQLIHDDSLTFKEDIQKAQVSGQGDSLHEHIANLAGSPAIKKGILQTVKVVDELVKVMGRHKPENIVIEMARENQTTQKGQKNSRERMKRIEEGIKELGSQILKEHPVENTQLQNEKLYLYYLQNGRDMYVDQELDINRLSDYDVDHIVPQSFLKDDSIDNKVLTRSDKARGKSDNVPSEEVVKKMKNYWRQLLNAKLITQRKFDNLTKAERGGLSELDKAGFIKRQLVETRQITKHVAQILDSRMNTKYDENDKLIREVKVITLKSKLVSDFRKDFQFYKVREINNYHHAHDAYLNAVVGTALIKKYPKLESEFVYGDYKVYDVRKMIAKSEQEIGKATAKYFFYSNIMNFFKTEITLANGEIRKRPLIETNGETGEIVWDKGRDFATVRKVLSMPQVNIVKKTEVQTGGFSKESILPKRNSDKLIARKKDWDPKKYGGFDSPTVAYSVLVVAKVEKGKSKKLKSVKELLGITIMERSSFEKNPIDFLEAKGYKEVKKDLIIKLPKYSLFELENGRKRMLASAGELQKGNELALPSKYVNFLYLASHYEKLKGSPEDNEQKQLFVEQHKHYLDEIIEQISEFSKRVILADANLDKVLSAYNKHRDKPIREQAENIIHLFTLTNLGAPAAFKYFDTTIDRKRYTSTKEVLDATLIHQSITGLYETRIDLSQLGGDGGGSAGSAAGSGEFGGTLNIEDEHRLHETSKEPDVSLGSTWLSDFPQAWAETGGMGLAVRQAPLIIPLKATSTPVSIKQYPMSQEARLGIKPHIQRLLDQGILVPCQSPWNTPLLPVKKPGTNDYRPVQDLREVNKRVEDIHPTVPNPYNLLSGLPPSHQWYTVLDLKDAFFCLRLHPTSQPLFAFEWRDPEMGISGQLTWTRLPQGFKNSPTLFDEALHRDLADFRIQHPDLILLQYVDDLLLAATSELDCQQGTRALLQTLGNLGYRASAKKAQICQKQVKYLGYLLKEGQRWLTEARKETVMGQPTPKTPRQLREFLGTAGFCRLWIPGFAEMAAPLYPLTKTGTLFNWGPDQQKAYQEIKQALLTAPALGLPDLTKPFELFVDEKQGYAKGVLTQKLGPWRRPVAYLSKKLDPVAAGWPPCLRMVAAIAVLTKDAGKLTMGQPLVILAPHAVEALVKQPPDRWLSNARMTHYQALLLDTDRVQFGPVVALNPATLLPLPEEGLQHNCLDILAEAHGTRPDLTDQPLPDADHTWYTDGSSLLQEGQRKAGAAVTTETEVIWAKALPAGTSAQRAELIALTQALKMAEGKKLNVYTDSRYAFATAHIHGEIYRRRGLLTSEGKEIKNKDEILALLKALFLPKRLSIIHCPGHQKGHSAEARGNRMADQAARKAAITETPDTSTLLAGKRTADGSEFEKRTADGSEFESPKKKAKVE

SEQ ID NO: 7718 - protein, 2177 aa, synthetic construct
MPAAKRVKLDGGDKKYSIGLDIGTNSVGWAVITDEYKVPSKKFKVLGNTDRHSIKKNLIGALLFDSGETAEATRLKRTARRRYTRRKNRICYLQEIFSNEMAKVDDSFFHRLEESFLVEEDKKHERHPIFGNIVDEVAYHEKYPTIYHLRKKLVDSTDKADLRLIYLALAHMIKFRGHFLIEGDLNPDNSDVDKLFIQLVQTYNQLFEENPINASGVDAKAILSARLSKSRRLENLIAQLPGEKKNGLFGNLIALSLGLTPNFKSNFDLAEDAKLQLSKDTYDDDLDNLLAQIGDQYADLFLAAKNLSDAILLSDILRVNTEITKAPLSASMIKRYDEHHQDLTLLKALVRQQLPEKYKEIFFDQSKNGYAGYIDGGASQEEFYKFIKPILEKMDGTEELLVKLNREDLLRKQRTFDNGSIPHQIHLGELHAILRRQEDFYPFLKDNREKIEKILTFRIPYYVGPLARGNSRFAWMTRKSEETITPWNFEEVVDKGASAQSFIERMTNFDKNLPNEKVLPKHSLLYEYFTVYNELTKVKYVTEGMRKPAFLSGEQKKAIVDLLFKTNRKVTVKQLKEDYFKKIECFDSVEISGVEDRFNASLGTYHDLLKIIKDKDFLDNEENEDILEDIVLTLTLFEDREMIEERLKTYAHLFDDKVMKQLKRRRYTGWGRLSRKLINGIRDKQSGKTILDFLKSDGFANRNFMQLIHDDSLTFKEDIQKAQVSGQGDSLHEHIANLAGSPAIKKGILQTVKVVDELVKVMGRHKPENIVIEMARENQTTQKGQKNSRERMKRIEEGIKELGSQILKEHPVENTQLQNEKLYLYYLQNGRDMYVDQELDINRLSDYDVDHIVPQSFLKDDSIDNKVLTRSDKARGKSDNVPSEEVVKKMKNYWRQLLNAKLITQRKFDNLTKAERGGLSELDKAGFIKRQLVETRQITKHVAQILDSRMNTKYDENDKLIREVKVITLKSKLVSDFRKDFQFYKVREINNYHHAHDAYLNAVVGTALIKKYPKLESEFVYGDYKVYDVRKMIAKSEQEIGKATAKYFFYSNIMNFFKTEITLANGEIRKRPLIETNGETGEIVWDKGRDFATVRKVLSMPQVNIVKKTEVQTGGFSKESILPKRNSDKLIARKKDWDPKKYGGFDSPTVAYSVLVVAKVEKGKSKKLKSVKELLGITIMERSSFEKNPIDFLEAKGYKEVKKDLIIKLPKYSLFELENGRKRMLASAGELQKGNELALPSKYVNFLYLASHYEKLKGSPEDNEQKQLFVEQHKHYLDEIIEQISEFSKRVILADANLDKVLSAYNKHRDKPIREQAENIIHLFTLTNLGAPAAFKYFDTTIDRKRYTSTKEVLDATLIHQSITGLYETRIDLSQLGGDGGGSAGSAAGSGEFGGMDPLQLLQPLEAEIKGTKLKAHWNSGATITCVPQAFLEEEVPIKNIWIKTIHGEKEQPVYYLTFKIQGRKVEAEVISSPYDYILVSPSDIPWLMKKPLQLTTLVPLQEYEERLLKQTMLTGSYKEKLQSLFLKYDALWQHWENQVGHRRIKPHHIATGTVNPRPQKQYPINPKAKASIQTVINDLLKQGVLIQQNSIMNTPVYPVPKPDGKWRMVLDYREVNKTIPLIAAQNQHSAGILSSIFRGKYKTTLDLSNGFWAHSITPESYWLTAFTWLGQQYCWTRLPQGFLNSPALFNADVVDLLKEVPNVQVYVDDIYISHDDPREHLEQLEKVFSLLLNAGYVVSLKKSEIAQHEVEFLGFNITKEGRGLTETFKQKLLNITPPRDLKQLQSILGLLNFARNFIPNFSELVKPLYNIIATAPGKYITWTTDNSQQLQNIISMLNSAENLEERNPEVRLIMKVNTSPSAGYIRFYNEFAKRPIMYLNYVYTKAEVKFTNTEKLLTTIHKGLIKALDLGMGQEILVYSPIVSMTKIQKTPLPERKALPIRWITWMSYLEDPRIQFHYDKTLPELQQVPTVTDDIIAKIKHPSEFSMVFYTDGSAIKHPNVNKSHNAGMGIAQVQFKPEFTVINTWSIPLGDHTAQLAEVAAVEFACKKALKIDGPVLIVTDSFYVAESVNKELPYWQSNGFFNNKKKPLKHVSKWKSIADCIQLKPDIIIIHEKGHQPTASTFHTEGNNLADKLATQGSYVVNAGKRTADGSEFEKRTADGSEFESPKKKAKVE

SEQ ID NO: 7719 - protein, 2097 aa, synthetic construct
MPAAKRVKLDGGDKKYSIGLDIGTNSVGWAVITDEYKVPSKKFKVLGNTDRHSIKKNLIGALLFDSGETAEATRLKRTARRRYTRRKNRICYLQEIFSNEMAKVDDSFFHRLEESFLVEEDKKHERHPIFGNIVDEVAYHEKYPTIYHLRKKLVDSTDKADLRLIYLALAHMIKFRGHFLIEGDLNPDNSDVDKLFIQLVQTYNQLFEENPINASGVDAKAILSARLSKSRRLENLIAQLPGEKKNGLFGNLIALSLGLTPNFKSNFDLAEDAKLQLSKDTYDDDLDNLLAQIGDQYADLFLAAKNLSDAILLSDILRVNTEITKAPLSASMIKRYDEHHQDLTLLKALVRQQLPEKYKEIFFDQSKNGYAGYIDGGASQEEFYKFIKPILEKMDGTEELLVKLNREDLLRKQRTFDNGSIPHQIHLGELHAILRRQEDFYPFLKDNREKIEKILTFRIPYYVGPLARGNSRFAWMTRKSEETITPWNFEEVVDKGASAQSFIERMTNFDKNLPNEKVLPKHSLLYEYFTVYNELTKVKYVTEGMRKPAFLSGEQKKAIVDLLFKTNRKVTVKQLKEDYFKKIECFDSVEISGVEDRFNASLGTYHDLLKIIKDKDFLDNEENEDILEDIVLTLTLFEDREMIEERLKTYAHLFDDKVMKQLKRRRYTGWGRLSRKLINGIRDKQSGKTILDFLKSDGFANRNFMQLIHDDSLTFKEDIQKAQVSGQGDSLHEHIANLAGSPAIKKGILQTVKVVDELVKVMGRHKPENIVIEMARENQTTQKGQKNSRERMKRIEEGIKELGSQILKEHPVENTQLQNEKLYLYYLQNGRDMYVDQELDINRLSDYDVDHIVPQSFLKDDSIDNKVLTRSDKARGKSDNVPSEEVVKKMKNYWRQLLNAKLITQRKFDNLTKAERGGLSELDKAGFIKRQLVETRQITKHVAQILDSRMNTKYDENDKLIREVKVITLKSKLVSDFRKDFQFYKVREINNYHHAHDAYLNAVVGTALIKKYPKLESEFVYGDYKVYDVRKMIAKSEQEIGKATAKYFFYSNIMNFFKTEITLANGEIRKRPLIETNGETGEIVWDKGRDFATVRKVLSMPQVNIVKKTEVQTGGFSKESILPKRNSDKLIARKKDWDPKKYGGFDSPTVAYSVLVVAKVEKGKSKKLKSVKELLGITIMERSSFEKNPIDFLEAKGYKEVKKDLIIKLPKYSLFELENGRKRMLASAGELQKGNELALPSKYVNFLYLASHYEKLKGSPEDNEQKQLFVEQHKHYLDEIIEQISEFSKRVILADANLDKVLSAYNKHRDKPIREQAENIIHLFTLTNLGAPAAFKYFDTTIDRKRYTSTKEVLDATLIHQSITGLYETRIDLSQLGGDGGGSAGSAAGSGEFGGTLNIEDEYRLHETSKEPDVPLGSTWLSDFPQAWAETGGMGLAVRQAPLIIPLKATSTPVSIKQYPMSQEARLGIKPHIQRLLDQGILVPCQSPWNTPLLPVKKPGTNDYRPVQDLREVNKRVEDIHPTVPNPYNLLSGLPPSHQWYTVLDLKDAFFCLRLHPTSQPLFAFEWRDPEMGISGQLTWTRLPQGFKNSPTLFNEALHRDLADFRIQHPDLILLQYVDDLLLAATSEQDCQRGTRALLQTLGNLGYRASAKKAQICQKQVKYLGYLLKEGQRWLTEARKETVMGQPTPKTPRQLREFLGTAGFCRLWIPGFAEMAAPLYPLTKPGTLFNWGPDQQKAYQEIKQALLTAPALGLPDLTKPFELFVDEKQGYAKGVLTQKLGPWRRPVAYLSKKLDPVAAGWPPCLRMVAAIAVLTKDAGKLTMGQPLVILAPHAVEALVKQPPDRWLSNARMTHYQAMLLDTDRVQFGPVVALNPATLLPLPEKEAPHDCLEILAETHGTRPDLTDQPIPDADYTWYTDGSSFLQEGQRRAGAAVTTETEVIWARALPAGTSAQRAELIALTQALKMAEGKKLNVYTDSRYAFATAHVHGEIYRRRGWLTSEGREIKNKNEILALLKALFLPKRLSIIHCPGHQKGNSAEARGNRMADQAAREAAMKAVLETSTLLAGKRTADGSEFEKRTADGSEFESPKKKAKVE

SEQ ID NO: 7720 - protein, 2120 aa, synthetic construct
MPAAKRVKLDGGDKKYSIGLDIGTNSVGWAVITDEYKVPSKKFKVLGNTDRHSIKKNLIGALLFDSGETAEATRLKRTARRRYTRRKNRICYLQEIFSNEMAKVDDSFFHRLEESFLVEEDKKHERHPIFGNIVDEVAYHEKYPTIYHLRKKLVDSTDKADLRLIYLALAHMIKFRGHFLIEGDLNPDNSDVDKLFIQLVQTYNQLFEENPINASGVDAKAILSARLSKSRRLENLIAQLPGEKKNGLFGNLIALSLGLTPNFKSNFDLAEDAKLQLSKDTYDDDLDNLLAQIGDQYADLFLAAKNLSDAILLSDILRVNTEITKAPLSASMIKRYDEHHQDLTLLKALVRQQLPEKYKEIFFDQSKNGYAGYIDGGASQEEFYKFIKPILEKMDGTEELLVKLNREDLLRKQRTFDNGSIPHQIHLGELHAILRRQEDFYPFLKDNREKIEKILTFRIPYYVGPLARGNSRFAWMTRKSEETITPWNFEEVVDKGASAQSFIERMTNFDKNLPNEKVLPKHSLLYEYFTVYNELTKVKYVTEGMRKPAFLSGEQKKAIVDLLFKTNRKVTVKQLKEDYFKKIECFDSVEISGVEDRFNASLGTYHDLLKIIKDKDFLDNEENEDILEDIVLTLTLFEDREMIEERLKTYAHLFDDKVMKQLKRRRYTGWGRLSRKLINGIRDKQSGKTILDFLKSDGFANRNFMQLIHDDSLTFKEDIQKAQVSGQGDSLHEHIANLAGSPAIKKGILQTVKVVDELVKVMGRHKPENIVIEMARENQTTQKGQKNSRERMKRIEEGIKELGSQILKEHPVENTQLQNEKLYLYYLQNGRDMYVDQELDINRLSDYDVDHIVPQSFLKDDSIDNKVLTRSDKARGKSDNVPSEEVVKKMKNYWRQLLNAKLITQRKFDNLTKAERGGLSELDKAGFIKRQLVETRQITKHVAQILDSRMNTKYDENDKLIREVKVITLKSKLVSDFRKDFQFYKVREINNYHHAHDAYLNAVVGTALIKKYPKLESEFVYGDYKVYDVRKMIAKSEQEIGKATAKYFFYSNIMNFFKTEITLANGEIRKRPLIETNGETGEIVWDKGRDFATVRKVLSMPQVNIVKKTEVQTGGFSKESILPKRNSDKLIARKKDWDPKKYGGFDSPTVAYSVLVVAKVEKGKSKKLKSVKELLGITIMERSSFEKNPIDFLEAKGYKEVKKDLIIKLPKYSLFELENGRKRMLASAGELQKGNELALPSKYVNFLYLASHYEKLKGSPEDNEQKQLFVEQHKHYLDEIIEQISEFSKRVILADANLDKVLSAYNKHRDKPIREQAENIIHLFTLTNLGAPAAFKYFDTTIDRKRYTSTKEVLDATLIHQSITGLYETRIDLSQLGGDGGSGGSSGGSSGSETPGTSESATPESSGGSSGGSSGGTAPLEEEYRLFLEAPIQNVTLLEQWKREIPKVWAEINPPGLASTQAPIHVQLLSTALPVRVRQYPITLEAKRSLRETIRKFRAAGILRPVHSPWNTPLLPVRKSGTSEYRMVQDLREVNKRVETIHPTVPNPYTLLSLLPPDRIWYSVLDLKDAFFCIPLAPESQLIFAFEWADAEEGESGQLTWTRLPQGFKNSPTLFDEALNRDLQGFRLDHPSVSLLQYVDDLLIAADTQAACLSATRDLLMTLAELGYRVSGKKAQLCQEEVTYLGFKIHKGSRSLSNSRTQAILQIPVPKTKRQVREFLGTIGYCRLWIPGFAELAQPLYAATRGGNDPLVWGEKEEEAFQSLKLALTQPPALALPSLDKPFQLFVEETSGAAKGVLTQALGPWKRPVAYLSKRLDPVAAGWPRCLRAIAAAALLTREASKLTFGQDIEITSSHNLESLLRSPPDKWLTNARITQYQVLLLDPPRVRFKQTAALNPATLLPETDDTLPIHHCLDTLDSLTSTRPDLTDQPLAQAEATLFTDGSSYIRDGKRYAGAAVVTLDSVIWAEPLPIGTSAQKAELIALTKALEWSKDKSVNIYTDSRYAFATLHVHGMIYRERGLLTAGGKAIKNAPEILALLTAVWLPKRVAVMHCKGHQKDDAPTSTGNRRADEVAREVAIRPLSTQATISAGKRTADGSEFEKRTADGSEFESPKKKAKVE

SEQ ID NO: 7721 - protein, 2120 aa, synthetic construct
MPAAKRVKLDGGDKKYSIGLDIGTNSVGWAVITDEYKVPSKKFKVLGNTDRHSIKKNLIGALLFDSGETAEATRLKRTARRRYTRRKNRICYLQEIFSNEMAKVDDSFFHRLEESFLVEEDKKHERHPIFGNIVDEVAYHEKYPTIYHLRKKLVDSTDKADLRLIYLALAHMIKFRGHFLIEGDLNPDNSDVDKLFIQLVQTYNQLFEENPINASGVDAKAILSARLSKSRRLENLIAQLPGEKKNGLFGNLIALSLGLTPNFKSNFDLAEDAKLQLSKDTYDDDLDNLLAQIGDQYADLFLAAKNLSDAILLSDILRVNTEITKAPLSASMIKRYDEHHQDLTLLKALVRQQLPEKYKEIFFDQSKNGYAGYIDGGASQEEFYKFIKPILEKMDGTEELLVKLNREDLLRKQRTFDNGSIPHQIHLGELHAILRRQEDFYPFLKDNREKIEKILTFRIPYYVGPLARGNSRFAWMTRKSEETITPWNFEEVVDKGASAQSFIERMTNFDKNLPNEKVLPKHSLLYEYFTVYNELTKVKYVTEGMRKPAFLSGEQKKAIVDLLFKTNRKVTVKQLKEDYFKKIECFDSVEISGVEDRFNASLGTYHDLLKIIKDKDFLDNEENEDILEDIVLTLTLFEDREMIEERLKTYAHLFDDKVMKQLKRRRYTGWGRLSRKLINGIRDKQSGKTILDFLKSDGFANRNFMQLIHDDSLTFKEDIQKAQVSGQGDSLHEHIANLAGSPAIKKGILQTVKVVDELVKVMGRHKPENIVIEMARENQTTQKGQKNSRERMKRIEEGIKELGSQILKEHPVENTQLQNEKLYLYYLQNGRDMYVDQELDINRLSDYDVDHIVPQSFLKDDSIDNKVLTRSDKARGKSDNVPSEEVVKKMKNYWRQLLNAKLITQRKFDNLTKAERGGLSELDKAGFIKRQLVETRQITKHVAQILDSRMNTKYDENDKLIREVKVITLKSKLVSDFRKDFQFYKVREINNYHHAHDAYLNAVVGTALIKKYPKLESEFVYGDYKVYDVRKMIAKSEQEIGKATAKYFFYSNIMNFFKTEITLANGEIRKRPLIETNGETGEIVWDKGRDFATVRKVLSMPQVNIVKKTEVQTGGFSKESILPKRNSDKLIARKKDWDPKKYGGFDSPTVAYSVLVVAKVEKGKSKKLKSVKELLGITIMERSSFEKNPIDFLEAKGYKEVKKDLIIKLPKYSLFELENGRKRMLASAGELQKGNELALPSKYVNFLYLASHYEKLKGSPEDNEQKQLFVEQHKHYLDEIIEQISEFSKRVILADANLDKVLSAYNKHRDKPIREQAENIIHLFTLTNLGAPAAFKYFDTTIDRKRYTSTKEVLDATLIHQSITGLYETRIDLSQLGGDGGSGGSSGGSSGSETPGTSESATPESSGGSSGGSSGGTAPLEEEYRLFLEAPIQNVTLLEQWKREIPKVWAEINPPGLASTQAPIHVQLLSTALPVRVRQYPITLEAKRSLRETIRKFRAAGILRPVHSPWNTPLLPVRKSGTSEYRMVQDLREVNKRVETIHPTVPNPYTLLSLLPPDRIWYSVLDLKDAFFCIPLAPESQLIFAFEWADAEEGESGQLTWTRLPQGFKNSPTLFNEALNRDLQGFRLDHPSVSLLQYVDDLLIAADTQAACLSATRDLLMTLAELGYRVSGKKAQLCQEEVTYLGFKIHKGSRSLSNSRTQAILQIPVPKTKRQVREFLGTIGYCRLWIPGFAELAQPLYAATRPGNDPLVWGEKEEEAFQSLKLALTQPPALALPSLDKPFQLFVEETSGAAKGVLTQALGPWKRPVAYLSKRLDPVAAGWPRCLRAIAAAALLTREASKLTFGQDIEITSSHNLESLLRSPPDKWLTNARITQYQVLLLDPPRVRFKQTAALNPATLLPETDDTLPIHHCLDTLDSLTSTRPDLTDQPLAQAEATLFTDGSSYIRDGKRYAGAAVVTLDSVIWAEPLPIGTSAQKAELIALTKALEWSKDKSVNIYTDSRYAFATLHVHGMIYRERGWLTAGGKAIKNAPEILALLTAVWLPKRVAVMHCKGHQKDDAPTSTGNRRADEVAREVAIRPLSTQATISAGKRTADGSEFEKRTADGSEFESPKKKAKVE

SEQ ID NO: 7722 - protein, 2124 aa, synthetic construct
MPAAKRVKLDGGDKKYSIGLDIGTNSVGWAVITDEYKVPSKKFKVLGNTDRHSIKKNLIGALLFDSGETAEATRLKRTARRRYTRRKNRICYLQEIFSNEMAKVDDSFFHRLEESFLVEEDKKHERHPIFGNIVDEVAYHEKYPTIYHLRKKLVDSTDKADLRLIYLALAHMIKFRGHFLIEGDLNPDNSDVDKLFIQLVQTYNQLFEENPINASGVDAKAILSARLSKSRRLENLIAQLPGEKKNGLFGNLIALSLGLTPNFKSNFDLAEDAKLQLSKDTYDDDLDNLLAQIGDQYADLFLAAKNLSDAILLSDILRVNTEITKAPLSASMIKRYDEHHQDLTLLKALVRQQLPEKYKEIFFDQSKNGYAGYIDGGASQEEFYKFIKPILEKMDGTEELLVKLNREDLLRKQRTFDNGSIPHQIHLGELHAILRRQEDFYPFLKDNREKIEKILTFRIPYYVGPLARGNSRFAWMTRKSEETITPWNFEEVVDKGASAQSFIERMTNFDKNLPNEKVLPKHSLLYEYFTVYNELTKVKYVTEGMRKPAFLSGEQKKAIVDLLFKTNRKVTVKQLKEDYFKKIECFDSVEISGVEDRFNASLGTYHDLLKIIKDKDFLDNEENEDILEDIVLTLTLFEDREMIEERLKTYAHLFDDKVMKQLKRRRYTGWGRLSRKLINGIRDKQSGKTILDFLKSDGFANRNFMQLIHDDSLTFKEDIQKAQVSGQGDSLHEHIANLAGSPAIKKGILQTVKVVDELVKVMGRHKPENIVIEMARENQTTQKGQKNSRERMKRIEEGIKELGSQILKEHPVENTQLQNEKLYLYYLQNGRDMYVDQELDINRLSDYDVDHIVPQSFLKDDSIDNKVLTRSDKARGKSDNVPSEEVVKKMKNYWRQLLNAKLITQRKFDNLTKAERGGLSELDKAGFIKRQLVETRQITKHVAQILDSRMNTKYDENDKLIREVKVITLKSKLVSDFRKDFQFYKVREINNYHHAHDAYLNAVVGTALIKKYPKLESEFVYGDYKVYDVRKMIAKSEQEIGKATAKYFFYSNIMNFFKTEITLANGEIRKRPLIETNGETGEIVWDKGRDFATVRKVLSMPQVNIVKKTEVQTGGFSKESILPKRNSDKLIARKKDWDPKKYGGFDSPTVAYSVLVVAKVEKGKSKKLKSVKELLGITIMERSSFEKNPIDFLEAKGYKEVKKDLIIKLPKYSLFELENGRKRMLASAGELQKGNELALPSKYVNFLYLASHYEKLKGSPEDNEQKQLFVEQHKHYLDEIIEQISEFSKRVILADANLDKVLSAYNKHRDKPIREQAENIIHLFTLTNLGAPAAFKYFDTTIDRKRYTSTKEVLDATLIHQSITGLYETRIDLSQLGGDGGSGGSSGGSSGSETPGTSESATPESSGGSSGGSSGGTVSLQDEHRLFDIPVTTSLPDVWLQDFPQAWAETGGLGRAKCQAPIIIDLKPTAVPVSIKQYPMSLEAHMGIRQHIIKFLELGVLRPCRSPWNTPLLPVKKPGTQDYRPVQDLREINKRTVDIHPTVPNPYNLLSTLKPDYSWYTVLDLKDAFFCLPLAPQSQELFAFEWKDPERGISGQLTWTRLPQGFKNSPTLFDEALHRDLTDFRTQHPEVTLLQYVDDLLLAAPTKKACTQGTRHLLQELGEKGYRASAKKAQICQTKVTYLGYILSEGKRWLTPGRIETVARIPPPRNPREVREFLGTAGFCRLWIPGFAELAAPLYALTKESTPFTWQTEHQLAFEALKKALLSAPALGLPDTSKPFTLFLDERQGIAKGVLTQKLGPWKRPVAYLSKKLDPVAAGWPPCLRIMAATAMLVKDSAKLTLGQPLTVITPHTLEAIVRQPPDRWITNARLTHYQALLLDTDRVQFGPPVTLNPATLLPVPENQPSPHDCRQVLAETHGTREDLKDQELPDADHTWYTDGSSYLDSGTRRAGAAVVDGHNTIWAQSLPPGTSAQKAELIALTKALELSKGKKANIYTDSRYAFATAHTHGSIYERRGLLTSEGKEIKNKAEIIALLKALFLPQEVAIIHCPGHQKGQDPVAVGNRQADRVARQAAMAEVLTLATEPDNTSHITAGKRTADGSEFEKRTADGSEFESPKKKAKVE

SEQ ID NO: 7723 - protein, 2124 aa, synthetic construct
MPAAKRVKLDGGDKKYSIGLDIGTNSVGWAVITDEYKVPSKKFKVLGNTDRHSIKKNLIGALLFDSGETAEATRLKRTARRRYTRRKNRICYLQEIFSNEMAKVDDSFFHRLEESFLVEEDKKHERHPIFGNIVDEVAYHEKYPTIYHLRKKLVDSTDKADLRLIYLALAHMIKFRGHFLIEGDLNPDNSDVDKLFIQLVQTYNQLFEENPINASGVDAKAILSARLSKSRRLENLIAQLPGEKKNGLFGNLIALSLGLTPNFKSNFDLAEDAKLQLSKDTYDDDLDNLLAQIGDQYADLFLAAKNLSDAILLSDILRVNTEITKAPLSASMIKRYDEHHQDLTLLKALVRQQLPEKYKEIFFDQSKNGYAGYIDGGASQEEFYKFIKPILEKMDGTEELLVKLNREDLLRKQRTFDNGSIPHQIHLGELHAILRRQEDFYPFLKDNREKIEKILTFRIPYYVGPLARGNSRFAWMTRKSEETITPWNFEEVVDKGASAQSFIERMTNFDKNLPNEKVLPKHSLLYEYFTVYNELTKVKYVTEGMRKPAFLSGEQKKAIVDLLFKTNRKVTVKQLKEDYFKKIECFDSVEISGVEDRFNASLGTYHDLLKIIKDKDFLDNEENEDILEDIVLTLTLFEDREMIEERLKTYAHLFDDKVMKQLKRRRYTGWGRLSRKLINGIRDKQSGKTILDFLKSDGFANRNFMQLIHDDSLTFKEDIQKAQVSGQGDSLHEHIANLAGSPAIKKGILQTVKVVDELVKVMGRHKPENIVIEMARENQTTQKGQKNSRERMKRIEEGIKELGSQILKEHPVENTQLQNEKLYLYYLQNGRDMYVDQELDINRLSDYDVDHIVPQSFLKDDSIDNKVLTRSDKARGKSDNVPSEEVVKKMKNYWRQLLNAKLITQRKFDNLTKAERGGLSELDKAGFIKRQLVETRQITKHVAQILDSRMNTKYDENDKLIREVKVITLKSKLVSDFRKDFQFYKVREINNYHHAHDAYLNAVVGTALIKKYPKLESEFVYGDYKVYDVRKMIAKSEQEIGKATAKYFFYSNIMNFFKTEITLANGEIRKRPLIETNGETGEIVWDKGRDFATVRKVLSMPQVNIVKKTEVQTGGFSKESILPKRNSDKLIARKKDWDPKKYGGFDSPTVAYSVLVVAKVEKGKSKKLKSVKELLGITIMERSSFEKNPIDFLEAKGYKEVKKDLIIKLPKYSLFELENGRKRMLASAGELQKGNELALPSKYVNFLYLASHYEKLKGSPEDNEQKQLFVEQHKHYLDEIIEQISEFSKRVILADANLDKVLSAYNKHRDKPIREQAENIIHLFTLTNLGAPAAFKYFDTTIDRKRYTSTKEVLDATLIHQSITGLYETRIDLSQLGGDGGSGGSSGGSSGSETPGTSESATPESSGGSSGGSSGGTVSLQDEHRLFDIPVTTSLPDVWLQDFPQAWAETGGLGRAKCQAPIIIDLKPTAVPVSIKQYPMSLEAHMGIRQHIIKFLELGVLRPCRSPWNTPLLPVKKPGTQDYRPVQDLREINKRTVDIHPTVPNPYNLLSTLKPDYSWYTVLDLKDAFFCLPLAPQSQELFAFEWKDPERGISGQLTWTRLPQGFKNSPTLFNEALHRDLTDFRTQHPEVTLLQYVDDLLLAAPTKKACTQGTRHLLQELGEKGYRASAKKAQICQTKVTYLGYILSEGKRWLTPGRIETVARIPPPRNPREVREFLGTAGFCRLWIPGFAELAAPLYALTKPSTPFTWQTEHQLAFEALKKALLSAPALGLPDTSKPFTLFLDERQGIAKGVLTQKLGPWKRPVAYLSKKLDPVAAGWPPCLRIMAATAMLVKDSAKLTLGQPLTVITPHTLEAIVRQPPDRWITNARLTHYQALLLDTDRVQFGPPVTLNPATLLPVPENQPSPHDCRQVLAETHGTREDLKDQELPDADHTWYTDGSSYLDSGTRRAGAAVVDGHNTIWAQSLPPGTSAQKAELIALTKALELSKGKKANIYTDSRYAFATAHTHGSIYERRGWLTSEGKEIKNKAEIIALLKALFLPQEVAIIHCPGHQKGQDPVAVGNRQADRVARQAAMAEVLTLATEPDNTSHITAGKRTADGSEFEKRTADGSEFESPKKKAKVE

SEQ ID NO: 7724 - protein, 2109 aa, synthetic construct
MPAAKRVKLDGGDKKYSIGLDIGTNSVGWAVITDEYKVPSKKFKVLGNTDRHSIKKNLIGALLFDSGETAEATRLKRTARRRYTRRKNRICYLQEIFSNEMAKVDDSFFHRLEESFLVEEDKKHERHPIFGNIVDEVAYHEKYPTIYHLRKKLVDSTDKADLRLIYLALAHMIKFRGHFLIEGDLNPDNSDVDKLFIQLVQTYNQLFEENPINASGVDAKAILSARLSKSRRLENLIAQLPGEKKNGLFGNLIALSLGLTPNFKSNFDLAEDAKLQLSKDTYDDDLDNLLAQIGDQYADLFLAAKNLSDAILLSDILRVNTEITKAPLSASMIKRYDEHHQDLTLLKALVRQQLPEKYKEIFFDQSKNGYAGYIDGGASQEEFYKFIKPILEKMDGTEELLVKLNREDLLRKQRTFDNGSIPHQIHLGELHAILRRQEDFYPFLKDNREKIEKILTFRIPYYVGPLARGNSRFAWMTRKSEETITPWNFEEVVDKGASAQSFIERMTNFDKNLPNEKVLPKHSLLYEYFTVYNELTKVKYVTEGMRKPAFLSGEQKKAIVDLLFKTNRKVTVKQLKEDYFKKIECFDSVEISGVEDRFNASLGTYHDLLKIIKDKDFLDNEENEDILEDIVLTLTLFEDREMIEERLKTYAHLFDDKVMKQLKRRRYTGWGRLSRKLINGIRDKQSGKTILDFLKSDGFANRNFMQLIHDDSLTFKEDIQKAQVSGQGDSLHEHIANLAGSPAIKKGILQTVKVVDELVKVMGRHKPENIVIEMARENQTTQKGQKNSRERMKRIEEGIKELGSQILKEHPVENTQLQNEKLYLYYLQNGRDMYVDQELDINRLSDYDVDHIVPQSFLKDDSIDNKVLTRSDKARGKSDNVPSEEVVKKMKNYWRQLLNAKLITQRKFDNLTKAERGGLSELDKAGFIKRQLVETRQITKHVAQILDSRMNTKYDENDKLIREVKVITLKSKLVSDFRKDFQFYKVREINNYHHAHDAYLNAVVGTALIKKYPKLESEFVYGDYKVYDVRKMIAKSEQEIGKATAKYFFYSNIMNFFKTEITLANGEIRKRPLIETNGETGEIVWDKGRDFATVRKVLSMPQVNIVKKTEVQTGGFSKESILPKRNSDKLIARKKDWDPKKYGGFDSPTVAYSVLVVAKVEKGKSKKLKSVKELLGITIMERSSFEKNPIDFLEAKGYKEVKKDLIIKLPKYSLFELENGRKRMLASAGELQKGNELALPSKYVNFLYLASHYEKLKGSPEDNEQKQLFVEQHKHYLDEIIEQISEFSKRVILADANLDKVLSAYNKHRDKPIREQAENIIHLFTLTNLGAPAAFKYFDTTIDRKRYTSTKEVLDATLIHQSITGLYETRIDLSQLGGDGGSGGSSGGSSGSETPGTSESATPESSGGSSGGSSGGVPWILKKPLELTIKLDLEEQQGTLLNNSILSKKGKEELKQLFEKYSALWQSWENQVGHRRIRPHKIATGTVKPTPQKQYHINPKAKPDIQIVINDLLKQGVLIQKESTMNTPVYPVPKPNGRWRMVLDYRAVNKVTPLIAVQNQHSYGILGSLFKGRYKTTIDLSNGFWAHPIVPEDYWITAFTWQGKQYCWTVLPQGFLNSPGLFTGDVVDLLQGIPNVEVYVDDVYISHDSEKEHLEYLDILFNRLKEAGYIISLKKSNIANSIVDFLGFQITNEGRGLTDTFKEKLENITAPTTLKQLQSILGLLNFARNFIPDFTELIAPLYALIPKSTKNYVPWQIEHSTTLETLITKLNGAEYLQGRKGDKTLIMKVNASYTTGYIRYYNEGEKKPISYVSIVFSKTELKFTELEKLLTTVHKGLLKALDLSMGQNIHVYSPIVSMQNIQKTPQTAKKALASRWLSWLSYLEDPRIRFFYDPQMPALKDLPAVDTGKDNKKHPSNFQHIFYTDGSAITSPTKEGHLNAGMGIVYFINKDGNLQKQQEWSISLGNHTAQFAEIAAFEFALKKCLPLGGNILVVTDSNYVAKAYNEELDVWASNGFVNNRKKPLKHISKWKSVADLKRLRPDVVVTHEPGHQKLDSSPHAYGNNLADQLATQASFKVHAGKRTADGSEFEKRTADGSEFESPKKKAKVE

SEQ ID NO: 7725 - protein, 2109 aa, synthetic construct
MPAAKRVKLDGGDKKYSIGLDIGTNSVGWAVITDEYKVPSKKFKVLGNTDRHSIKKNLIGALLFDSGETAEATRLKRTARRRYTRRKNRICYLQEIFSNEMAKVDDSFFHRLEESFLVEEDKKHERHPIFGNIVDEVAYHEKYPTIYHLRKKLVDSTDKADLRLIYLALAHMIKFRGHFLIEGDLNPDNSDVDKLFIQLVQTYNQLFEENPINASGVDAKAILSARLSKSRRLENLIAQLPGEKKNGLFGNLIALSLGLTPNFKSNFDLAEDAKLQLSKDTYDDDLDNLLAQIGDQYADLFLAAKNLSDAILLSDILRVNTEITKAPLSASMIKRYDEHHQDLTLLKALVRQQLPEKYKEIFFDQSKNGYAGYIDGGASQEEFYKFIKPILEKMDGTEELLVKLNREDLLRKQRTFDNGSIPHQIHLGELHAILRRQEDFYPFLKDNREKIEKILTFRIPYYVGPLARGNSRFAWMTRKSEETITPWNFEEVVDKGASAQSFIERMTNFDKNLPNEKVLPKHSLLYEYFTVYNELTKVKYVTEGMRKPAFLSGEQKKAIVDLLFKTNRKVTVKQLKEDYFKKIECFDSVEISGVEDRFNASLGTYHDLLKIIKDKDFLDNEENEDILEDIVLTLTLFEDREMIEERLKTYAHLFDDKVMKQLKRRRYTGWGRLSRKLINGIRDKQSGKTILDFLKSDGFANRNFMQLIHDDSLTFKEDIQKAQVSGQGDSLHEHIANLAGSPAIKKGILQTVKVVDELVKVMGRHKPENIVIEMARENQTTQKGQKNSRERMKRIEEGIKELGSQILKEHPVENTQLQNEKLYLYYLQNGRDMYVDQELDINRLSDYDVDHIVPQSFLKDDSIDNKVLTRSDKARGKSDNVPSEEVVKKMKNYWRQLLNAKLITQRKFDNLTKAERGGLSELDKAGFIKRQLVETRQITKHVAQILDSRMNTKYDENDKLIREVKVITLKSKLVSDFRKDFQFYKVREINNYHHAHDAYLNAVVGTALIKKYPKLESEFVYGDYKVYDVRKMIAKSEQEIGKATAKYFFYSNIMNFFKTEITLANGEIRKRPLIETNGETGEIVWDKGRDFATVRKVLSMPQVNIVKKTEVQTGGFSKESILPKRNSDKLIARKKDWDPKKYGGFDSPTVAYSVLVVAKVEKGKSKKLKSVKELLGITIMERSSFEKNPIDFLEAKGYKEVKKDLIIKLPKYSLFELENGRKRMLASAGELQKGNELALPSKYVNFLYLASHYEKLKGSPEDNEQKQLFVEQHKHYLDEIIEQISEFSKRVILADANLDKVLSAYNKHRDKPIREQAENIIHLFTLTNLGAPAAFKYFDTTIDRKRYTSTKEVLDATLIHQSITGLYETRIDLSQLGGDGGSGGSSGGSSGSETPGTSESATPESSGGSSGGSSGGVPWLTQQPLQLTILVPLQEYQEKILSKTALPEDQKQQLKTLFVKYDNLWQHWENQVGHRKIRPHNIATGDYPPRPQKQYPINPKAKPSIQIVIDDLLKQGVLTPQNSTMNTPVYPVPKPDGRWRMVLDYREVNKTIPLTAAQNQHSAGILATIVRQKYKTTLDLANGFWAHPITPESYWLTAFTWQGKQYCWTRLPQGFLNSPALFNADVVDLLKEIPNVQVYVDDIYLSHDDPKEHVQQLEKVFQILLQAGYVVSLKKSEIGQKTVEFLGFNITKEGRGLTDTFKTKLLNITPPKDLKQLQSILGLLNFARNFIPNFAELVQPLYNLIAPAKGKYIEWSEENTKQLNMVIEALNTASNLEERLPEQRLVIKVNTSPSAGYVRYYNETGKKPIMYLNYVFSKAELKFSMLEKLLTTMHKALIKAMDLAMGQEILVYSPIVSMTKIQKTPLPERKALPIRWITWMTYLEDPRIQFHYDKTLPELKHIPDVYTSSQSPVKHPSQYEGVFYTDGSAIKSPDPTKSNNAGMGIVHATYKPEYQVLNQWSIPLGNHTAQMAEIAAVEFACKKALKIPGPVLVITDSFYVAESANKELPYWKSNGFVNNKKKPLKHISKWKSIAECLSMKPDITIQHEKGISLQIPVFILKGNALADKLATQGSYVVNAGKRTADGSEFEKRTADGSEFESPKKKAKVE

SEQ ID NO: 7726 - protein, 2198 aa, synthetic construct
MPAAKRVKLDGGDKKYSIGLDIGTNSVGWAVITDEYKVPSKKFKVLGNTDRHSIKKNLIGALLFDSGETAEATRLKRTARRRYTRRKNRICYLQEIFSNEMAKVDDSFFHRLEESFLVEEDKKHERHPIFGNIVDEVAYHEKYPTIYHLRKKLVDSTDKADLRLIYLALAHMIKFRGHFLIEGDLNPDNSDVDKLFIQLVQTYNQLFEENPINASGVDAKAILSARLSKSRRLENLIAQLPGEKKNGLFGNLIALSLGLTPNFKSNFDLAEDAKLQLSKDTYDDDLDNLLAQIGDQYADLFLAAKNLSDAILLSDILRVNTEITKAPLSASMIKRYDEHHQDLTLLKALVRQQLPEKYKEIFFDQSKNGYAGYIDGGASQEEFYKFIKPILEKMDGTEELLVKLNREDLLRKQRTFDNGSIPHQIHLGELHAILRRQEDFYPFLKDNREKIEKILTFRIPYYVGPLARGNSRFAWMTRKSEETITPWNFEEVVDKGASAQSFIERMTNFDKNLPNEKVLPKHSLLYEYFTVYNELTKVKYVTEGMRKPAFLSGEQKKAIVDLLFKTNRKVTVKQLKEDYFKKIECFDSVEISGVEDRFNASLGTYHDLLKIIKDKDFLDNEENEDILEDIVLTLTLFEDREMIEERLKTYAHLFDDKVMKQLKRRRYTGWGRLSRKLINGIRDKQSGKTILDFLKSDGFANRNFMQLIHDDSLTFKEDIQKAQVSGQGDSLHEHIANLAGSPAIKKGILQTVKVVDELVKVMGRHKPENIVIEMARENQTTQKGQKNSRERMKRIEEGIKELGSQILKEHPVENTQLQNEKLYLYYLQNGRDMYVDQELDINRLSDYDVDHIVPQSFLKDDSIDNKVLTRSDKARGKSDNVPSEEVVKKMKNYWRQLLNAKLITQRKFDNLTKAERGGLSELDKAGFIKRQLVETRQITKHVAQILDSRMNTKYDENDKLIREVKVITLKSKLVSDFRKDFQFYKVREINNYHHAHDAYLNAVVGTALIKKYPKLESEFVYGDYKVYDVRKMIAKSEQEIGKATAKYFFYSNIMNFFKTEITLANGEIRKRPLIETNGETGEIVWDKGRDFATVRKVLSMPQVNIVKKTEVQTGGFSKESILPKRNSDKLIARKKDWDPKKYGGFDSPTVAYSVLVVAKVEKGKSKKLKSVKELLGITIMERSSFEKNPIDFLEAKGYKEVKKDLIIKLPKYSLFELENGRKRMLASAGELQKGNELALPSKYVNFLYLASHYEKLKGSPEDNEQKQLFVEQHKHYLDEIIEQISEFSKRVILADANLDKVLSAYNKHRDKPIREQAENIIHLFTLTNLGAPAAFKYFDTTIDRKRYTSTKEVLDATLIHQSITGLYETRIDLSQLGGDGGSGGSSGGSSGSETPGTSESATPESSGGSSGGSSGGMNPLQLLQPLPAEIKGTKLLAHWNSGATITCIPESFLEDEQPIKKTLIKTIHGEKQQNVYYVTFKVKGRKVEAEVIASPYEYILLSPTDVPWLTQQPLQLTILVPLQEYQEKILSKTALPEDQKQQLKTLFVKYDNLWQHWENQVGHRKIRPHNIATGDYPPRPQKQYPINPKAKPSIQIVIDDLLKQGVLTPQNSTMNTPVYPVPKPDGRWRMVLDYREVNKTIPLTAAQNQHSAGILATIVRQKYKTTLDLANGFWAHPITPESYWLTAFTWQGKQYCWTRLPQGFLNSPALFNADVVDLLKEIPNVQVYVDDIYLSHDDPKEHVQQLEKVFQILLQAGYVVSLKKSEIGQKTVEFLGFNITKEGRGLTDTFKTKLLNITPPKDLKQLQSILGLLNFARNFIPNFAELVQPLYNLIAPAKGKYIEWSEENTKQLNMVIEALNTASNLEERLPEQRLVIKVNTSPSAGYVRYYNETGKKPIMYLNYVFSKAELKFSMLEKLLTTMHKALIKAMDLAMGQEILVYSPIVSMTKIQKTPLPERKALPIRWITWMTYLEDPRIQFHYDKTLPELKHIPDVYTSSQSPVKHPSQYEGVFYTDGSAIKSPDPTKSNNAGMGIVHATYKPEYQVLNQWSIPLGNHTAQMAEIAAVEFACKKALKIPGPVLVITDSFYVAESANKELPYWKSNGFVNNKKKPLKHISKWKSIAECLSMKPDITIQHEKGISLQIPVFILKGNALADKLATQGSYVVNAGKRTADGSEFEKRTADGSEFESPKKKAKVE

SEQ ID NO: 7727 - protein, 2149 aa, synthetic construct
MPAAKRVKLDGGDKKYSIGLDIGTNSVGWAVITDEYKVPSKKFKVLGNTDRHSIKKNLIGALLFDSGETAEATRLKRTARRRYTRRKNRICYLQEIFSNEMAKVDDSFFHRLEESFLVEEDKKHERHPIFGNIVDEVAYHEKYPTIYHLRKKLVDSTDKADLRLIYLALAHMIKFRGHFLIEGDLNPDNSDVDKLFIQLVQTYNQLFEENPINASGVDAKAILSARLSKSRRLENLIAQLPGEKKNGLFGNLIALSLGLTPNFKSNFDLAEDAKLQLSKDTYDDDLDNLLAQIGDQYADLFLAAKNLSDAILLSDILRVNTEITKAPLSASMIKRYDEHHQDLTLLKALVRQQLPEKYKEIFFDQSKNGYAGYIDGGASQEEFYKFIKPILEKMDGTEELLVKLNREDLLRKQRTFDNGSIPHQIHLGELHAILRRQEDFYPFLKDNREKIEKILTFRIPYYVGPLARGNSRFAWMTRKSEETITPWNFEEVVDKGASAQSFIERMTNFDKNLPNEKVLPKHSLLYEYFTVYNELTKVKYVTEGMRKPAFLSGEQKKAIVDLLFKTNRKVTVKQLKEDYFKKIECFDSVEISGVEDRFNASLGTYHDLLKIIKDKDFLDNEENEDILEDIVLTLTLFEDREMIEERLKTYAHLFDDKVMKQLKRRRYTGWGRLSRKLINGIRDKQSGKTILDFLKSDGFANRNFMQLIHDDSLTFKEDIQKAQVSGQGDSLHEHIANLAGSPAIKKGILQTVKVVDELVKVMGRHKPENIVIEMARENQTTQKGQKNSRERMKRIEEGIKELGSQILKEHPVENTQLQNEKLYLYYLQNGRDMYVDQELDINRLSDYDVDHIVPQSFLKDDSIDNKVLTRSDKARGKSDNVPSEEVVKKMKNYWRQLLNAKLITQRKFDNLTKAERGGLSELDKAGFIKRQLVETRQITKHVAQILDSRMNTKYDENDKLIREVKVITLKSKLVSDFRKDFQFYKVREINNYHHAHDAYLNAVVGTALIKKYPKLESEFVYGDYKVYDVRKMIAKSEQEIGKATAKYFFYSNIMNFFKTEITLANGEIRKRPLIETNGETGEIVWDKGRDFATVRKVLSMPQVNIVKKTEVQTGGFSKESILPKRNSDKLIARKKDWDPKKYGGFDSPTVAYSVLVVAKVEKGKSKKLKSVKELLGITIMERSSFEKNPIDFLEAKGYKEVKKDLIIKLPKYSLFELENGRKRMLASAGELQKGNELALPSKYVNFLYLASHYEKLKGSPEDNEQKQLFVEQHKHYLDEIIEQISEFSKRVILADANLDKVLSAYNKHRDKPIREQAENIIHLFTLTNLGAPAAFKYFDTTIDRKRYTSTKEVLDATLIHQSITGLYETRIDLSQLGGDGGSGGSSGGSSGSETPGTSESATPESSGGSSGGSSGGLLGRDLLTKLKAQIQFSTEGPQVTWEDRPAMCLVLNLEEEYRLHEKPVPPSIDPSWLQLFPMVWAEKAGMGLANQVPPVVVELKSDASPVAVRQYPMSKEAREGIRPHIQRFLDLGILVPCQSPWNTPLLPVKKPGTNDYRPVQDLREVNKRVQDIHPTVPNPYNLLSSLPPSHTWYSVLDLKDAFFCLKLHPNSQPLFAFEWRDPEKGNTGQLTWTRLPQGFKNSPTLFDEALHRDLASFRALNPQVVMLQYVDDLLVAAPTYRDCKEGTRRLLQELSKLGYRVSAKKAQLCREEVTYLGYLLKGGKRWLTPARKATVMKIPTPTTPRQVREFLGTAGFCRLWIPGFASLAAPLYPLTREKVPFTWTEAHQEAFGRIKEALLSAPALALPDLTKPFALYVDEKEGVARGVLTQTLGPWRRPVAYLSKKLDPVASGWPTCLKAIAAVALLLKDADKLTLGQNVLVIAPHNLESIVRQPPDRWMTNARMTHYQSLLLNERVSFAPPAILNPATLLPVESDDTPIHICSEILAEETGTRPDLRDQPLPGVPAWYTDGSSFIMDGRRQAGAAIVDNKRTVWASNLPEGTSAQKAELIALTQALRLAEGKSINIYTDSRYAFATAHVHGAIYKQRGLLTSAGKDIKNKEEILALLEAIHLPKRVAIIHCPGHQRGTDPVATGNRKADEAAKQAAQSTRILTETTKNAGKRTADGSEFEKRTADGSEFESPKKKAKVE

SEQ ID NO: 7728 - protein, 2149 aa, synthetic construct
MPAAKRVKLDGGDKKYSIGLDIGTNSVGWAVITDEYKVPSKKFKVLGNTDRHSIKKNLIGALLFDSGETAEATRLKRTARRRYTRRKNRICYLQEIFSNEMAKVDDSFFHRLEESFLVEEDKKHERHPIFGNIVDEVAYHEKYPTIYHLRKKLVDSTDKADLRLIYLALAHMIKFRGHFLIEGDLNPDNSDVDKLFIQLVQTYNQLFEENPINASGVDAKAILSARLSKSRRLENLIAQLPGEKKNGLFGNLIALSLGLTPNFKSNFDLAEDAKLQLSKDTYDDDLDNLLAQIGDQYADLFLAAKNLSDAILLSDILRVNTEITKAPLSASMIKRYDEHHQDLTLLKALVRQQLPEKYKEIFFDQSKNGYAGYIDGGASQEEFYKFIKPILEKMDGTEELLVKLNREDLLRKQRTFDNGSIPHQIHLGELHAILRRQEDFYPFLKDNREKIEKILTFRIPYYVGPLARGNSRFAWMTRKSEETITPWNFEEVVDKGASAQSFIERMTNFDKNLPNEKVLPKHSLLYEYFTVYNELTKVKYVTEGMRKPAFLSGEQKKAIVDLLFKTNRKVTVKQLKEDYFKKIECFDSVEISGVEDRFNASLGTYHDLLKIIKDKDFLDNEENEDILEDIVLTLTLFEDREMIEERLKTYAHLFDDKVMKQLKRRRYTGWGRLSRKLINGIRDKQSGKTILDFLKSDGFANRNFMQLIHDDSLTFKEDIQKAQVSGQGDSLHEHIANLAGSPAIKKGILQTVKVVDELVKVMGRHKPENIVIEMARENQTTQKGQKNSRERMKRIEEGIKELGSQILKEHPVENTQLQNEKLYLYYLQNGRDMYVDQELDINRLSDYDVDHIVPQSFLKDDSIDNKVLTRSDKARGKSDNVPSEEVVKKMKNYWRQLLNAKLITQRKFDNLTKAERGGLSELDKAGFIKRQLVETRQITKHVAQILDSRMNTKYDENDKLIREVKVITLKSKLVSDFRKDFQFYKVREINNYHHAHDAYLNAVVGTALIKKYPKLESEFVYGDYKVYDVRKMIAKSEQEIGKATAKYFFYSNIMNFFKTEITLANGEIRKRPLIETNGETGEIVWDKGRDFATVRKVLSMPQVNIVKKTEVQTGGFSKESILPKRNSDKLIARKKDWDPKKYGGFDSPTVAYSVLVVAKVEKGKSKKLKSVKELLGITIMERSSFEKNPIDFLEAKGYKEVKKDLIIKLPKYSLFELENGRKRMLASAGELQKGNELALPSKYVNFLYLASHYEKLKGSPEDNEQKQLFVEQHKHYLDEIIEQISEFSKRVILADANLDKVLSAYNKHRDKPIREQAENIIHLFTLTNLGAPAAFKYFDTTIDRKRYTSTKEVLDATLIHQSITGLYETRIDLSQLGGDGGSGGSSGGSSGSETPGTSESATPESSGGSSGGSSGGLLGRDLLTKLKAQIQFSTEGPQVTWEDRPAMCLVLNLEEEYRLHEKPVPPSIDPSWLQLFPMVWAEKAGMGLANQVPPVVVELKSDASPVAVRQYPMSKEAREGIRPHIQRFLDLGILVPCQSPWNTPLLPVKKPGTNDYRPVQDLREVNKRVQDIHPTVPNPYNLLSSLPPSHTWYSVLDLKDAFFCLKLHPNSQPLFAFEWRDPEKGNTGQLTWTRLPQGFKNSPTLFNEALHRDLASFRALNPQVVMLQYVDDLLVAAPTYRDCKEGTRRLLQELSKLGYRVSAKKAQLCREEVTYLGYLLKGGKRWLTPARKATVMKIPTPTTPRQVREFLGKAGFCRLFIPGFASLAAPLYPLTRPKVPFTWTEAHQEAFGRIKEALLSAPALALPDLTKPFALYVDEKEGVARGVLTQTLGPWRRPVAYLSKKLDPVASGWPTCLKAIAAVALLLKDADKLTLGQNVLVIAPHNLESIVRQPPDRWMTNARMTHYQSLLLNERVSFAPPAILNPATLLPVESDDTPIHICSEILAEETGTRPDLRDQPLPGVPAWYTDGSSFIMDGRRQAGAAIVDNKRTVWASNLPEGTSAQKAELIALTQALRLAEGKSINIYTDSRYAFATAHVHGAIYKQRGWLTSAGKDIKNKEEILALLEAIHLPKRVAIIHCPGHQRGTDPVATGNRKADEAAKQAAQSTRILTETTKNAGKRTADGSEFEKRTADGSEFESPKKKAKVE

SEQ ID NO: 7729 - protein, 2118 aa, synthetic construct
MPAAKRVKLDGGDKKYSIGLDIGTNSVGWAVITDEYKVPSKKFKVLGNTDRHSIKKNLIGALLFDSGETAEATRLKRTARRRYTRRKNRICYLQEIFSNEMAKVDDSFFHRLEESFLVEEDKKHERHPIFGNIVDEVAYHEKYPTIYHLRKKLVDSTDKADLRLIYLALAHMIKFRGHFLIEGDLNPDNSDVDKLFIQLVQTYNQLFEENPINASGVDAKAILSARLSKSRRLENLIAQLPGEKKNGLFGNLIALSLGLTPNFKSNFDLAEDAKLQLSKDTYDDDLDNLLAQIGDQYADLFLAAKNLSDAILLSDILRVNTEITKAPLSASMIKRYDEHHQDLTLLKALVRQQLPEKYKEIFFDQSKNGYAGYIDGGASQEEFYKFIKPILEKMDGTEELLVKLNREDLLRKQRTFDNGSIPHQIHLGELHAILRRQEDFYPFLKDNREKIEKILTFRIPYYVGPLARGNSRFAWMTRKSEETITPWNFEEVVDKGASAQSFIERMTNFDKNLPNEKVLPKHSLLYEYFTVYNELTKVKYVTEGMRKPAFLSGEQKKAIVDLLFKTNRKVTVKQLKEDYFKKIECFDSVEISGVEDRFNASLGTYHDLLKIIKDKDFLDNEENEDILEDIVLTLTLFEDREMIEERLKTYAHLFDDKVMKQLKRRRYTGWGRLSRKLINGIRDKQSGKTILDFLKSDGFANRNFMQLIHDDSLTFKEDIQKAQVSGQGDSLHEHIANLAGSPAIKKGILQTVKVVDELVKVMGRHKPENIVIEMARENQTTQKGQKNSRERMKRIEEGIKELGSQILKEHPVENTQLQNEKLYLYYLQNGRDMYVDQELDINRLSDYDVDHIVPQSFLKDDSIDNKVLTRSDKARGKSDNVPSEEVVKKMKNYWRQLLNAKLITQRKFDNLTKAERGGLSELDKAGFIKRQLVETRQITKHVAQILDSRMNTKYDENDKLIREVKVITLKSKLVSDFRKDFQFYKVREINNYHHAHDAYLNAVVGTALIKKYPKLESEFVYGDYKVYDVRKMIAKSEQEIGKATAKYFFYSNIMNFFKTEITLANGEIRKRPLIETNGETGEIVWDKGRDFATVRKVLSMPQVNIVKKTEVQTGGFSKESILPKRNSDKLIARKKDWDPKKYGGFDSPTVAYSVLVVAKVEKGKSKKLKSVKELLGITIMERSSFEKNPIDFLEAKGYKEVKKDLIIKLPKYSLFELENGRKRMLASAGELQKGNELALPSKYVNFLYLASHYEKLKGSPEDNEQKQLFVEQHKHYLDEIIEQISEFSKRVILADANLDKVLSAYNKHRDKPIREQAENIIHLFTLTNLGAPAAFKYFDTTIDRKRYTSTKEVLDATLIHQSITGLYETRIDLSQLGGDGGSGGSSGGSSGSETPGTSESATPESSGGSSGGSSGGTLNLEDEYRLYETSAEPEVSPGSTWLSDFPQAWAETGGMGLAVRQAPLIIPLKATSTPVSIKQYPMSQEAKLGIKPHIQRLLDQGILVPCQSPWNTPLLPVKKPGTNDYRPVQDLREVNKRVEDIHPTVPNPYNLLSGLPPSHRWYTVLDLKDAFFCLRLHPTSQPLFAFEWRDPGMGISGQLTWTRLPQGFKNSPTLFNEALHRDLADFRIQHPDLILLQYVDDILLAATSELDCQQGTRALLLTLGNLGYRASAKKAQLCQKQVKYLGYLLKEGQRWLTEARKETVMGQPTPKTPRQLREFLGKAGFCRLFIPGFAEMAAPLYPLTKPGTLFNWGPDQQKAYQEIKQALLTAPALGLPDLTKPFELFVDEKQGYAKGVLTQKLGPWRRPVAYLSKKLDPVAAGWPPCLRMVAAIAVLRKDAGKLTMGQPLVILAPHAVEALVKQPPDRWLSNARMTHYQAMLLDTDRVQFGPVVALNPATLLPLPEEGAPHDCLEILAETHGTRPDLTDQPIPDADHTWYTDGSSFLQEGQRKAGAAVTTETEVIWARALPAGTSAQRAELIALTQALKMAEGKRLNVYTDSRYAFATAHIHGEIYRRRGWLTSEGREIKNKSEILALLKALFLPKRLSIIHCLGHQKGDSAEARGNRLADQAAREAAIKTPPDTSTLLAGKRTADGSEFEKRTADGSEFESPKKKAKVE

SEQ ID NO: 7730 - protein, 2118 aa, synthetic construct
MPAAKRVKLDGGDKKYSIGLDIGTNSVGWAVITDEYKVPSKKFKVLGNTDRHSIKKNLIGALLFDSGETAEATRLKRTARRRYTRRKNRICYLQEIFSNEMAKVDDSFFHRLEESFLVEEDKKHERHPIFGNIVDEVAYHEKYPTIYHLRKKLVDSTDKADLRLIYLALAHMIKFRGHFLIEGDLNPDNSDVDKLFIQLVQTYNQLFEENPINASGVDAKAILSARLSKSRRLENLIAQLPGEKKNGLFGNLIALSLGLTPNFKSNFDLAEDAKLQLSKDTYDDDLDNLLAQIGDQYADLFLAAKNLSDAILLSDILRVNTEITKAPLSASMIKRYDEHHQDLTLLKALVRQQLPEKYKEIFFDQSKNGYAGYIDGGASQEEFYKFIKPILEKMDGTEELLVKLNREDLLRKQRTFDNGSIPHQIHLGELHAILRRQEDFYPFLKDNREKIEKILTFRIPYYVGPLARGNSRFAWMTRKSEETITPWNFEEVVDKGASAQSFIERMTNFDKNLPNEKVLPKHSLLYEYFTVYNELTKVKYVTEGMRKPAFLSGEQKKAIVDLLFKTNRKVTVKQLKEDYFKKIECFDSVEISGVEDRFNASLGTYHDLLKIIKDKDFLDNEENEDILEDIVLTLTLFEDREMIEERLKTYAHLFDDKVMKQLKRRRYTGWGRLSRKLINGIRDKQSGKTILDFLKSDGFANRNFMQLIHDDSLTFKEDIQKAQVSGQGDSLHEHIANLAGSPAIKKGILQTVKVVDELVKVMGRHKPENIVIEMARENQTTQKGQKNSRERMKRIEEGIKELGSQILKEHPVENTQLQNEKLYLYYLQNGRDMYVDQELDINRLSDYDVDHIVPQSFLKDDSIDNKVLTRSDKARGKSDNVPSEEVVKKMKNYWRQLLNAKLITQRKFDNLTKAERGGLSELDKAGFIKRQLVETRQITKHVAQILDSRMNTKYDENDKLIREVKVITLKSKLVSDFRKDFQFYKVREINNYHHAHDAYLNAVVGTALIKKYPKLESEFVYGDYKVYDVRKMIAKSEQEIGKATAKYFFYSNIMNFFKTEITLANGEIRKRPLIETNGETGEIVWDKGRDFATVRKVLSMPQVNIVKKTEVQTGGFSKESILPKRNSDKLIARKKDWDPKKYGGFDSPTVAYSVLVVAKVEKGKSKKLKSVKELLGITIMERSSFEKNPIDFLEAKGYKEVKKDLIIKLPKYSLFELENGRKRMLASAGELQKGNELALPSKYVNFLYLASHYEKLKGSPEDNEQKQLFVEQHKHYLDEIIEQISEFSKRVILADANLDKVLSAYNKHRDKPIREQAENIIHLFTLTNLGAPAAFKYFDTTIDRKRYTSTKEVLDATLIHQSITGLYETRIDLSQLGGDGGSGGSSGGSSGSETPGTSESATPESSGGSSGGSSGGTLNIEDEYRLHETSKEPDVSLGSTWLSDFPQAWAETGGMGLAVRQAPLIIPLKATSTPVSIKQYPMSQEARLGIKPHIQRLLDQGILVPCQSPWNTPLLPVKKPGTNDYRPVQDLREVNKRVEDIHPTVPNPYNLLSGLPPSHQWYTVLDLKDAFFCLRLHPTSQPLFAFEWRDPEMGISGQLTWTRLPQGFKNSPTLFNEALHRDLAGFRIQHPDLILLQYVDDLLLAATSELDCQQGTRALLQTLGDLGYRASAKKAQICQKQVKYLGYLLKEGQRWLTEARKETVMGQPIPKTPRQLREFLGTAGFCRLWIPGFAEMAAPLYPLTKPGTLFNWGPDQQKAFQEIKQALLTAPALGLPDLTKPFELFVDEKQGYAKGVLTQKLGPWRRPVAYLSKKLDPVAAGWPPCLRMVAAIAVLTKDAGKLTMGQPLVILAPHAVEALVKQPPDRWLSNARMTHYQALLLDTDRVQFGPVVALNPATLLPLPEEGLQHDCLDILAEAHGTRSDLMDQPLPDADHTWYTDGSSFLQEGQRKAGAAVTTETEVIWARALPAGTSAQRAELIALTQALKMAEGKKLNVYTDSRYAFATAHIHGEIYRRRGWLTSEGKEIKNKDEILALLKALFLPKRLSIIHCPGHQKGNSAEARGNRMADQAAREVATRETPETSTLLAGKRTADGSEFEKRTADGSEFESPKKKAKVE

SEQ ID NO: 7731 - protein, 2118 aa, synthetic construct
MPAAKRVKLDGGDKKYSIGLDIGTNSVGWAVITDEYKVPSKKFKVLGNTDRHSIKKNLIGALLFDSGETAEATRLKRTARRRYTRRKNRICYLQEIFSNEMAKVDDSFFHRLEESFLVEEDKKHERHPIFGNIVDEVAYHEKYPTIYHLRKKLVDSTDKADLRLIYLALAHMIKFRGHFLIEGDLNPDNSDVDKLFIQLVQTYNQLFEENPINASGVDAKAILSARLSKSRRLENLIAQLPGEKKNGLFGNLIALSLGLTPNFKSNFDLAEDAKLQLSKDTYDDDLDNLLAQIGDQYADLFLAAKNLSDAILLSDILRVNTEITKAPLSASMIKRYDEHHQDLTLLKALVRQQLPEKYKEIFFDQSKNGYAGYIDGGASQEEFYKFIKPILEKMDGTEELLVKLNREDLLRKQRTFDNGSIPHQIHLGELHAILRRQEDFYPFLKDNREKIEKILTFRIPYYVGPLARGNSRFAWMTRKSEETITPWNFEEVVDKGASAQSFIERMTNFDKNLPNEKVLPKHSLLYEYFTVYNELTKVKYVTEGMRKPAFLSGEQKKAIVDLLFKTNRKVTVKQLKEDYFKKIECFDSVEISGVEDRFNASLGTYHDLLKIIKDKDFLDNEENEDILEDIVLTLTLFEDREMIEERLKTYAHLFDDKVMKQLKRRRYTGWGRLSRKLINGIRDKQSGKTILDFLKSDGFANRNFMQLIHDDSLTFKEDIQKAQVSGQGDSLHEHIANLAGSPAIKKGILQTVKVVDELVKVMGRHKPENIVIEMARENQTTQKGQKNSRERMKRIEEGIKELGSQILKEHPVENTQLQNEKLYLYYLQNGRDMYVDQELDINRLSDYDVDHIVPQSFLKDDSIDNKVLTRSDKARGKSDNVPSEEVVKKMKNYWRQLLNAKLITQRKFDNLTKAERGGLSELDKAGFIKRQLVETRQITKHVAQILDSRMNTKYDENDKLIREVKVITLKSKLVSDFRKDFQFYKVREINNYHHAHDAYLNAVVGTALIKKYPKLESEFVYGDYKVYDVRKMIAKSEQEIGKATAKYFFYSNIMNFFKTEITLANGEIRKRPLIETNGETGEIVWDKGRDFATVRKVLSMPQVNIVKKTEVQTGGFSKESILPKRNSDKLIARKKDWDPKKYGGFDSPTVAYSVLVVAKVEKGKSKKLKSVKELLGITIMERSSFEKNPIDFLEAKGYKEVKKDLIIKLPKYSLFELENGRKRMLASAGELQKGNELALPSKYVNFLYLASHYEKLKGSPEDNEQKQLFVEQHKHYLDEIIEQISEFSKRVILADANLDKVLSAYNKHRDKPIREQAENIIHLFTLTNLGAPAAFKYFDTTIDRKRYTSTKEVLDATLIHQSITGLYETRIDLSQLGGDGGSGGSSGGSSGSETPGTSESATPESSGGSSGGSSGGTLNIEDEHRLHETSKEPDVSLGSTWLSDFPQAWAETGGMGLAVRQAPLIIPLKATSTPVSIKQYPMSQEARLGIKPHIQRLLDQGILVPCQSPWNTPLLPVKKPGTNDYRPVQDLREVNKRVEDIHPTVPNPYNLLSGLPPSHQWYTVLDLKDAFFCLRLHPTSQPLFAFEWRDPEMGISGQLTWTRLPQGFKNSPTLFDEALHRDLADFRIQHPDLILLQYVDDLLLAATSELDCQQGTRALLQTLGNLGYRASAKKAQICQKQVKYLGYLLKEGQRWLTEARKETVMGQPTPKTPRQLREFLGTAGFCRLWIPGFAEMAAPLYPLTKTGTLFNWGPDQQKAYQEIKQALLTAPALGLPDLTKPFELFVDEKQGYAKGVLTQKLGPWRRPVAYLSKKLDPVAAGWPPCLRMVAAIAVLTKDAGKLTMGQPLVILAPHAVEALVKQPPDRWLSNARMTHYQALLLDTDRVQFGPVVALNPATLLPLPEEGLQHNCLDILAEAHGTRPDLTDQPLPDADHTWYTDGSSLLQEGQRKAGAAVTTETEVIWAKALPAGTSAQRAELIALTQALKMAEGKKLNVYTDSRYAFATAHIHGEIYRRRGLLTSEGKEIKNKDEILALLKALFLPKRLSIIHCPGHQKGHSAEARGNRMADQAARKAAITETPDTSTLLAGKRTADGSEFEKRTADGSEFESPKKKAKVE

SEQ ID NO: 7732 - protein, 2118 aa, synthetic construct; identical to SEQ ID NO: 7731

SEQ ID NO: 7733 - protein, 2138 aa, synthetic construct
MPAAKRVKLDGGDKKYSIGLDIGTNSVGWAVITDEYKVPSKKFKVLGNTDRHSIKKNLIGALLFDSGETAEATRLKRTARRRYTRRKNRICYLQEIFSNEMAKVDDSFFHRLEESFLVEEDKKHERHPIFGNIVDEVAYHEKYPTIYHLRKKLVDSTDKADLRLIYLALAHMIKFRGHFLIEGDLNPDNSDVDKLFIQLVQTYNQLFEENPINASGVDAKAILSARLSKSRRLENLIAQLPGEKKNGLFGNLIALSLGLTPNFKSNFDLAEDAKLQLSKDTYDDDLDNLLAQIGDQYADLFLAAKNLSDAILLSDILRVNTEITKAPLSASMIKRYDEHHQDLTLLKALVRQQLPEKYKEIFFDQSKNGYAGYIDGGASQEEFYKFIKPILEKMDGTEELLVKLNREDLLRKQRTFDNGSIPHQIHLGELHAILRRQEDFYPFLKDNREKIEKILTFRIPYYVGPLARGNSRFAWMTRKSEETITPWNFEEVVDKGASAQSFIERMTNFDKNLPNEKVLPKHSLLYEYFTVYNELTKVKYVTEGMRKPAFLSGEQKKAIVDLLFKTNRKVTVKQLKEDYFKKIECFDSVEISGVEDRFNASLGTYHDLLKIIKDKDFLDNEENEDILEDIVLTLTLFEDREMIEERLKTYAHLFDDKVMKQLKRRRYTGWGRLSRKLINGIRDKQSGKTILDFLKSDGFANRNFMQLIHDDSLTFKEDIQKAQVSGQGDSLHEHIANLAGSPAIKKGILQTVKVVDELVKVMGRHKPENIVIEMARENQTTQKGQKNSRERMKRIEEGIKELGSQILKEHPVENTQLQNEKLYLYYLQNGRDMYVDQELDINRLSDYDVDHIVPQSFLKDDSIDNKVLTRSDKARGKSDNVPSEEVVKKMKNYWRQLLNAKLITQRKFDNLTKAERGGLSELDKAGFIKRQLVETRQITKHVAQILDSRMNTKYDENDKLIREVKVITLKSKLVSDFRKDFQFYKVREINNYHHAHDAYLNAVVGTALIKKYPKLESEFVYGDYKVYDVRKMIAKSEQEIGKATAKYFFYSNIMNFFKTEITLANGEIRKRPLIETNGETGEIVWDKGRDFATVRKVLSMPQVNIVKKTEVQTGGFSKESILPKRNSDKLIARKKDWDPKKYGGFDSPTVAYSVLVVAKVEKGKSKKLKSVKELLGITIMERSSFEKNPIDFLEAKGYKEVKKDLIIKLPKYSLFELENGRKRMLASAGELQKGNELALPSKYVNFLYLASHYEKLKGSPEDNEQKQLFVEQHKHYLDEIIEQISEFSKRVILADANLDKVLSAYNKHRDKPIREQAENIIHLFTLTNLGAPAAFKYFDTTIDRKRYTSTKEVLDATLIHQSITGLYETRIDLSQLGGDGGSGGSSGGSSGSETPGTSESATPESSGGSSGGSSGGWVQEISDSRPMLHIYLNGRRFLGLLNTGADKTCIAGRDWPANWPIHQTESSLQGLGMACGVARSSQPLRWQHEDKSGIIHPFVIPTLPFTLWGRDIMKDIKVRLMTDSPDDSQDLMIGAIESNLFADQISWKSDQPVWLNQWPLKQEKLQALQQLVTEQLQLGHLEESNSPWNTPVFVIKKKSGKWRLLQDLRAVNATMHDMGALQPGLPSPVAVPKGWEIIIIDLQDCFFNIKLHPEDCKRFAFSVPSPNFKRPYQRFQWKVLPQGMKNSPTLCQKFVDKAILTVRDKYQDSYIVHYMDDILLAHPSRSIVDEILTSMIQALNKHGLVVSTEKIQKYDNLKYLGTHIQGDSVSYQKLQIRTDKLRTLNDFQKLLGNINWIRPFLKLTTGELKPLFEILNGDSNPISTRKLTPEACKALQLMNERLSTARVKRLDLSQPWSLCILKTEYTPTACLWQDGVVEWIHLPHISPKVITPYDIFCTQLIIKGRHRSKELFSKDPDYIVVPYTKVQFDLLLQEKEDWPISLLGFLGEVHFHLPKDPLLTFTLQTAIIFPHMTSTTPLEKGIVIFTDGSANGRSVTYIQGREPIIKENTQNTAQQAEIVAVITAFEEVSQPFNLYTDSKYVTGLFPEIETATLSPRTKIYTELKHLQRLIHKRQEKFYIGHIRGHTGLPGPLAQGNAYADSLTRILTAGKRTADGSEFEKRTADGSEFESPKKKAKVE

SEQ ID NO: 7734 - protein, 2110 aa, synthetic construct
MPAAKRVKLDGGDKKYSIGLDIGTNSVGWAVITDEYKVPSKKFKVLGNTDRHSIKKNLIGALLFDSGETAEATRLKRTARRRYTRRKNRICYLQEIFSNEMAKVDDSFFHRLEESFLVEEDKKHERHPIFGNIVDEVAYHEKYPTIYHLRKKLVDSTDKADLRLIYLALAHMIKFRGHFLIEGDLNPDNSDVDKLFIQLVQTYNQLFEENPINASGVDAKAILSARLSKSRRLENLIAQLPGEKKNGLFGNLIALSLGLTPNFKSNFDLAEDAKLQLSKDTYDDDLDNLLAQIGDQYADLFLAAKNLSDAILLSDILRVNTEITKAPLSASMIKRYDEHHQDLTLLKALVRQQLPEKYKEIFFDQSKNGYAGYIDGGASQEEFYKFIKPILEKMDGTEELLVKLNREDLLRKQRTFDNGSIPHQIHLGELHAILRRQEDFYPFLKDNREKIEKILTFRIPYYVGPLARGNSRFAWMTRKSEETITPWNFEEVVDKGASAQSFIERMTNFDKNLPNEKVLPKHSLLYEYFTVYNELTKVKYVTEGMRKPAFLSGEQKKAIVDLLFKTNRKVTVKQLKEDYFKKIECFDSVEISGVEDRFNASLGTYHDLLKIIKDKDFLDNEENEDILEDIVLTLTLFEDREMIEERLKTYAHLFDDKVMKQLKRRRYTGWGRLSRKLINGIRDKQSGKTILDFLKSDGFANRNFMQLIHDDSLTFKEDIQKAQVSGQGDSLHEHIANLAGSPAIKKGILQTVKVVDELVKVMGRHKPENIVIEMARENQTTQKGQKNSRERMKRIEEGIKELGSQILKEHPVENTQLQNEKLYLYYLQNGRDMYVDQELDINRLSDYDVDHIVPQSFLKDDSIDNKVLTRSDKARGKSDNVPSEEVVKKMKNYWRQLLNAKLITQRKFDNLTKAERGGLSELDKAGFIKRQLVETRQITKHVAQILDSRMNTKYDENDKLIREVKVITLKSKLVSDFRKDFQFYKVREINNYHHAHDAYLNAVVGTALIKKYPKLESEFVYGDYKVYDVRKMIAKSEQEIGKATAKYFFYSNIMNFFKTEITLANGEIRKRPLIETNGETGEIVWDKGRDFATVRKVLSMPQVNIVKKTEVQTGGFSKESILPKRNSDKLIARKKDWDPKKYGGFDSPTVAYSVLVVAKVEKGKSKKLKSVKELLGITIMERSSFEKNPIDFLEAKGYKEVKKDLIIKLPKYSLFELENGRKRMLASAGELQKGNELALPSKYVNFLYLASHYEKLKGSPEDNEQKQLFVEQHKHYLDEIIEQISEFSKRVILADANLDKVLSAYNKHRDKPIREQAENIIHLFTLTNLGAPAAFKYFDTTIDRKRYTSTKEVLDATLIHQSITGLYETRIDLSQLGGDGGSGGSSGGSSGSETPGTSESATPESSGGSSGGSSGGLDDEYRLYSPLVKPDQNIQFWLEQFPQAWAETAGMGLAKQVPPQVIQLKASATPVSVRQYPLSKEAQEGIRPHVQRLIQQGILVPVQSPWNTPLLPVRKPGTNDYRPVQDLREVNKRVQDIHPTVPNPYNLLCALPPQRSWYTVLDLKDAFFCLRLHPTSQPLFAFEWRDPGTGRTGQLTWTRLPQGFKNSPTIFNEALHRDLANFRIQHPQVTLLQYVDDLLLAGATKQDCLEGTKALLLELSDLGYRASAKKAQICRREVTYLGYSLRDGQRWLTEARKKTVVQIPAPTTAKQVREFLGKAGFCRLFIPGFATLAAPLYPLTKPKGEFSWAPEHQKAFDAIKKALLSAPALALPDVTKPFTLYVDERKGVARGVLTQTLGPWRRPVAYLSKKLDPVASGWPVCLKAIAAVAILVKDADKLTLGQNITVIAPHALENIVRQPPDRWMTNARMTHYQSLLLTERVTFAPPAALNPATLLPEETDEPVTHDCHQLLIEETGVRKDLTDIPLTGEVLTWFTDGSSYVVEGKRMAGAAVVDGTRTIWASSLPEGTSAQKAELMALTQALRLAEGKSINIYTDSRYAFATAHVHGAIYKQRGWLTSAGREIKNKEEILSLLEALHLPKRLAIIHCPGHQKAKDPISRGNQMADRVAKQAAQGVNLLPAGKRTADGSEFEKRTADGSEFESPKKKAKVE

SEQ ID NO: 7735 - protein, 2110 aa, synthetic construct; identical to SEQ ID NO: 7734

SEQ ID NO: 7736 - protein, 2109 aa, synthetic construct
MPAAKRVKLDGGDKKYSIGLDIGTNSVGWAVITDEYKVPSKKFKVLGNTDRHSIKKNLIGALLFDSGETAEATRLKRTARRRYTRRKNRICYLQEIFSNEMAKVDDSFFHRLEESFLVEEDKKHERHPIFGNIVDEVAYHEKYPTIYHLRKKLVDSTDKADLRLIYLALAHMIKFRGHFLIEGDLNPDNSDVDKLFIQLVQTYNQLFEENPINASGVDAKAILSARLSKSRRLENLIAQLPGEKKNGLFGNLIALSLGLTPNFKSNFDLAEDAKLQLSKDTYDDDLDNLLAQIGDQYADLFLAAKNLSDAILLSDILRVNTEITKAPLSASMIKRYDEHHQDLTLLKALVRQQLPEKYKEIFFDQSKNGYAGYIDGGASQEEFYKFIKPILEKMDGTEELLVKLNREDLLRKQRTFDNGSIPHQIHLGELHAILRRQEDFYPFLKDNREKIEKILTFRIPYYVGPLARGNSRFAWMTRKSEETITPWNFEEVVDKGASAQSFIERMTNFDKNLPNEKVLPKHSLLYEYFTVYNELTKVKYVTEGMRKPAFLSGEQKKAIVDLLFKTNRKVTVKQLKEDYFKKIECFDSVEISGVEDRFNASLGTYHDLLKIIKDKDFLDNEENEDILEDIVLTLTLFEDREMIEERLKTYAHLFDDKVMKQLKRRRYTGWGRLSRKLINGIRDKQSGKTILDFLKSDGFANRNFMQLIHDDSLTFKEDIQKAQVSGQGDSLHEHIANLAGSPAIKKGILQTVKVVDELVKVMGRHKPENIVIEMARENQTTQKGQKNSRERMKRIEEGIKELGSQILKEHPVENTQLQNEKLYLYYLQNGRDMYVDQELDINRLSDYDVDHIVPQSFLKDDSIDNKVLTRSDKARGKSDNVPSEEVVKKMKNYWRQLLNAKLITQRKFDNLTKAERGGLSELDKAGFIKRQLVETRQITKHVAQILDSRMNTKYDENDKLIREVKVITLKSKLVSDFRKDFQFYKVREINNYHHAHDAYLNAVVGTALIKKYPKLESEFVYGDYKVYDVRKMIAKSEQEIGKATAKYFFYSNIMNFFKTEITLANGEIRKRPLIETNGETGEIVWDKGRDFATVRKVLSMPQVNIVKKTEVQTGGFSKESILPKRNSDKLIARKKDWDPKKYGGFDSPTVAYSVLVVAKVEKGKSKKLKSVKELLGITIMERSSFEKNPIDFLEAKGYKEVKKDLIIKLPKYSLFELENGRKRMLASAGELQKGNELALPSKYVNFLYLASHYEKLKGSPEDNEQKQLFVEQHKHYLDEIIEQISEFSKRVILADANLDKVLSAYNKHRDKPIREQAENIIHLFTLTNLGAPAAFKYFDTTIDRKRYTSTKEVLDATLIHQSITGLYETRIDLSQLGGDGGSGGSSGGSSGSETPGTSESATPESSGGSSGGSSGGVPWLMKKPLQLTVLVPLHEYQERLLQQTALPKEQKELLQKLFLKYDALWQHWENQVGHRRIKPHNIATGTLAPRPQKQYPINPKAKPSIQIVIDDLLKQGVLIQQNSTMNTPVYPVPKPDGKWRMVLDYREVNKTIPLIAAQNQHSAGILSSIYRGKYKTTLDLTNGFWAHPITPESYWLTAFTWQGKQYCWTRLPQGFLNSPALFTADVVDLLKEIPNVQAYVDDIYISHDDPQEHLEQLEKIFSILLNAGYVVSLKKSEIAQREVEFLGFNITKEGRGLTDTFKQKLLNITPPKDLKQLQSILGLLNFARNFIPNYSELVKPLYTIVANANGKFISWTEDNSNQLQHIISVLNQADNLEERNPETRLIIKVNSSPSAGYIRYYNEGSKRPIMYVNYIFSKAEAKFTQTEKLLTTMHKGLIKAMDLAMGQEILVYSPIVSMTKIQRTPLPERKALPVRWITWMTYLEDPRIQFHYDKSLPELQQIPNVTEDVIAKTKHPSEFAMVFYTDGSAIKHPDVNKSHSAGMGIAQVQFIPEYKIVHQWSIPLGDHTAQLAEIAAVEFACKKALKISGPVLIVTDSFYVAESANKELPYWKSNGFLNNKKKPLRHVSKWKSIAECLQLKPDIIIMHEKGHQQPMTTLHTEGNNLADKLATQGSYVVHAGKRTADGSEFEKRTADGSEFESPKKKAKVE

SEQ ID NO: 7737 - protein, 2109 aa, synthetic construct
MPAAKRVKLDGGDKKYSIGLDIGTNSVGWAVITDEYKVPSKKFKVLGNTDRHSIKKNLIGALLFDSGETAEATRLKRTARRRYTRRKNRICYLQEIFSNEMAKVDDSFFHRLEESFLVEEDKKHERHPIFGNIVDEVAYHEKYPTIYHLRKKLVDSTDKADLRLIYLALAHMIKFRGHFLIEGDLNPDNSDVDKLFIQLVQTYNQLFEENPINASGVDAKAILSARLSKSRRLENLIAQLPGEKKNGLFGNLIALSLGLTPNFKSNFDLAEDAKLQLSKDTYDDDLDNLLAQIGDQYADLFLAAKNLSDAILLSDILRVNTEITKAPLSASMIKRYDEHHQDLTLLKALVRQQLPEKYKEIFFDQSKNGYAGYIDGGASQEEFYKFIKPILEKMDGTEELLVKLNREDLLRKQRTFDNGSIPHQIHLGELHAILRRQEDFYPFLKDNREKIEKILTFRIPYYVGPLARGNSRFAWMTRKSEETITPWNFEEVVDKGASAQSFIERMTNFDKNLPNEKVLPKHSLLYEYFTVYNELTKVKYVTEGMRKPAFLSGEQKKAIVDLLFKTNRKVTVKQLKEDYFKKIECFDSVEISGVEDRFNASLGTYHDLLKIIKDKDFLDNEENEDILEDIVLTLTLFEDREMIEERLKTYAHLFDDKVMKQLKRRRYTGWGRLSRKLINGIRDKQSGKTILDFLKSDGFANRNFMQLIHDDSLTFKEDIQKAQVSGQGDSLHEHIANLAGSPAIKKGILQTVKVVDELVKVMGRHKPENIVIEMARENQTTQKGQKNSRERMKRIEEGIKELGSQILKEHPVENTQLQNEKLYLYYLQNGRDMYVDQELDINRLSDYDVDHIVPQSFLKDDSIDNKVLTRSDKARGKSDNVPSEEVVKKMKNYWRQLLNAKLITQRKFDNLTKAERGGLSELDKAGFIKRQLVETRQITKHVAQILDSRMNTKYDENDKLIREVKVITLKSKLVSDFRKDFQFYKVREINNYHHAHDAYLNAVVGTALIKKYPKLESEFVYGDYKVYDVRKMIAKSEQEIGKATAKYFFYSNIMNFFKTEITLANGEIRKRPLIETNGETGEIVWDKGRDFATVRKVLSMPQVNIVKKTEVQTGGFSKESILPKRNSDKLIARKKDWDPKKYGGFDSPTVAYSVLVVAKVEKGKSKKLKSVKELLGITIMERSSFEKNPIDFLEAKGYKEVKKDLIIKLPKYSLFELENGRKRMLASAGELQKGNELALPSKYVNFLYLASHYEKLKGSPEDNEQKQLFVEQHKHYLDEIIEQISEFSKRVILADANLDKVLSAYNKHRDKPIREQAENIIHLFTLTNLGAPAAFKYFDTTIDRKRYTSTKEVLDATLIHQSITGLYETRIDLSQLGGDGGSGGSSGGSSGSETPGTSESATPESSGGSSGGSSGGVPWLMKKPLQLTVLVPLHEYQERLLQQTALPKEQKELLQKLFLKYDALWQHWENQVGHRRIKPHNIATGTLAPRPQKQYPINPKAKPSIQIVIDDLLKQGVLIQQNSTMNTPVYPVPKPDGKWRMVLDYREVNKTIPLIAAQNQHSAGILSSIYRGKYKTTLDLTNGFWAHPITPESYWLTAFTWQGKQYCWTRLPQGFLNSPALFNADVVDLLKEIPNVQAYVDDIYISHDDPQEHLEQLEKIFSILLNAGYVVSLKKSEIAQREVEFLGFNITKEGRGLTDTFKQKLLNITPPKDLKQLQSILGLLNFARNFIPNYSELVKPLYTIVAPANGKFISWTEDNSNQLQHIISVLNQADNLEERNPETRLIIKVNSSPSAGYIRYYNEGSKRPIMYVNYIFSKAEAKFTQTEKLLTTMHKGLIKAMDLAMGQEILVYSPIVSMTKIQRTPLPERKALPVRWITWMTYLEDPRIQFHYDKSLPELQQIPNVTEDVIAKTKHPSEFAMVFYTDGSAIKHPDVNKSHSAGMGIAQVQFIPEYKIVHQWSIPLGDHTAQLAEIAAVEFACKKALKISGPVLIVTDSFYVAESANKELPYWKSNGFLNNKKKPLRHVSKWKSIAECLQLKPDIIIMHEKGHQQPMTTLHTEGNNLADKLATQGSYVVHAGKRTADGSEFEKRTADGSEFESPKKKAKVE

SEQ ID NO: 7738 - protein, 2198 aa, synthetic construct
MPAAKRVKLDGGDKKYSIGLDIGTNSVGWAVITDEYKVPSKKFKVLGNTDRHSIKKNLIGALLFDSGETAEATRLKRTARRRYTRRKNRICYLQEIFSNEMAKVDDSFFHRLEESFLVEEDKKHERHPIFGNIVDEVAYHEKYPTIYHLRKKLVDSTDKADLRLIYLALAHMIKFRGHFLIEGDLNPDNSDVDKLFIQLVQTYNQLFEENPINASGVDAKAILSARLSKSRRLENLIAQLPGEKKNGLFGNLIALSLGLTPNFKSNFDLAEDAKLQLSKDTYDDDLDNLLAQIGDQYADLFLAAKNLSDAILLSDILRVNTEITKAPLSASMIKRYDEHHQDLTLLKALVRQQLPEKYKEIFFDQSKNGYAGYIDGGASQEEFYKFIKPILEKMDGTEELLVKLNREDLLRKQRTFDNGSIPHQIHLGELHAILRRQEDFYPFLKDNREKIEKILTFRIPYYVGPLARGNSRFAWMTRKSEETITPWNFEEVVDKGASAQSFIERMTNFDKNLPNEKVLPKHSLLYEYFTVYNELTKVKYVTEGMRKPAFLSGEQKKAIVDLLFKTNRKVTVKQLKEDYFKKIECFDSVEISGVEDRFNASLGTYHDLLKIIKDKDFLDNEENEDILEDIVLTLTLFEDREMIEERLKTYAHLFDDKVMKQLKRRRYTGWGRLSRKLINGIRDKQSGKTILDFLKSDGFANRNFMQLIHDDSLTFKEDIQKAQVSGQGDSLHEHIANLAGSPAIKKGILQTVKVVDELVKVMGRHKPENIVIEMARENQTTQKGQKNSRERMKRIEEGIKELGSQILKEHPVENTQLQNEKLYLYYLQNGRDMYVDQELDINRLSDYDVDHIVPQSFLKDDSIDNKVLTRSDKARGKSDNVPSEEVVKKMKNYWRQLLNAKLITQRKFDNLTKAERGGLSELDKAGFIKRQLVETRQITKHVAQILDSRMNTKYDENDKLIREVKVITLKSKLVSDFRKDFQFYKVREINNYHHAHDAYLNAVVGTALIKKYPKLESEFVYGDYKVYDVRKMIAKSEQEIGKATAKYFFYSNIMNFFKTEITLANGEIRKRPLIETNGETGEIVWDKGRDFATVRKVLSMPQVNIVKKTEVQTGGFSKESILPKRNSDKLIARKKDWDPKKYGGFDSPTVAYSVLVVAKVEKGKSKKLKSVKELLGITIMERSSFEKNPIDFLEAKGYKEVKKDLIIKLPKYSLFELENGRKRMLASAGELQKGNELALPSKYVNFLYLASHYEKLKGSPEDNEQKQLFVEQHKHYLDEIIEQISEFSKRVILADANLDKVLSAYNKHRDKPIREQAENIIHLFTLTNLGAPAAFKYFDTTIDRKRYTSTKEVLDATLIHQSITGLYETRIDLSQLGGDGGSGGSSGGSSGSETPGTSESATPESSGGSSGGSSGGMDPLQLLQPLEAEIKGTKLKAHWNSGATITCVPEAFLEDERPIQTMLIKTIHGEKQQDVYYLTFKVQGRKVEAEVLASPYDYILLNPSDVPWLMKKPLQLTVLVPLHEYQERLLQQTALPKEQKELLQKLFLKYDALWQHWENQVGHRRIKPHNIATGTLAPRPQKQYPINPKAKPSIQIVIDDLLKQGVLIQQNSTMNTPVYPVPKPDGKWRMVLDYREVNKTIPLIAAQNQHSAGILSSIYRGKYKTTLDLTNGFWAHPITPESYWLTAFTWQGKQYCWTRLPQGFLNSPALFNADVVDLLKEIPNVQAYVDDIYISHDDPQEHLEQLEKIFSILLNAGYVVSLKKSEIAQREVEFLGFNITKEGRGLTDTFKQKLLNITPPKDLKQLQSILGKLNFARNFIPNYSELVKPLYTIVAPANGKFISWTEDNSNQLQHIISVLNQADNLEERNPETRLIIKVNSSPSAGYIRYYNEGSKRPIMYVNYIFSKAEAKFTQTEKLLTTMHKGLIKAMDLAMGQEILVYSPIVSMTKIQRTPLPERKALPVRWITWMTYLEDPRIQFHYDKSLPELQQIPNVTEDVIAKTKHPSEFAMVFYTDGSAIKHPDVNKSHSAGMGIAQVQFIPEYKIVHQWSIPLGDHTAQLAEIAAVEFACKKALKISGPVLIVTDSFYVAESANKELPYWKSNGFLNNKKKPLRHVSKWKSIAECLQLKPDIIIMHEKGHQQPMTTLHTEGNNLADKLATQGSYVVHAGKRTADGSEFEKRTADGSEFESPKKKAKVE

SEQ ID NO: 7739 - protein, 2109 aa, synthetic construct
MPAAKRVKLDGGDKKYSIGLDIGTNSVGWAVITDEYKVPSKKFKVLGNTDRHSIKKNLIGALLFDSGETAEATRLKRTARRRYTRRKNRICYLQEIFSNEMAKVDDSFFHRLEESFLVEEDKKHERHPIFGNIVDEVAYHEKYPTIYHLRKKLVDSTDKADLRLIYLALAHMIKFRGHFLIEGDLNPDNSDVDKLFIQLVQTYNQLFEENPINASGVDAKAILSARLSKSRRLENLIAQLPGEKKNGLFGNLIALSLGLTPNFKSNFDLAEDAKLQLSKDTYDDDLDNLLAQIGDQYADLFLAAKNLSDAILLSDILRVNTEITKAPLSASMIKRYDEHHQDLTLLKALVRQQLPEKYKEIFFDQSKNGYAGYIDGGASQEEFYKFIKPILEKMDGTEELLVKLNREDLLRKQRTFDNGSIPHQIHLGELHAILRRQEDFYPFLKDNREKIEKILTFRIPYYVGPLARGNSRFAWMTRKSEETITPWNFEEVVDKGASAQSFIERMTNFDKNLPNEKVLPKHSLLYEYFTVYNELTKVKYVTEGMRKPAFLSGEQKKAIVDLLFKTNRKVTVKQLKEDYFKKIECFDSVEISGVEDRFNASLGTYHDLLKIIKDKDFLDNEENEDILEDIVLTLTLFEDREMIEERLKTYAHLFDDKVMKQLKRRRYTGWGRLSRKLINGIRDKQSGKTILDFLKSDGFANRNFMQLIHDDSLTFKEDIQKAQVSGQGDSLHEHIANLAGSPAIKKGILQTVKVVDELVKVMGRHKPENIVIEMARENQTTQKGQKNSRERMKRIEEGIKELGSQILKEHPVENTQLQNEKLYLYYLQNGRDMYVDQELDINRLSDYDVDHIVPQSFLKDDSIDNKVLTRSDKARGKSDNVPSEEVVKKMKNYWRQLLNAKLITQRKFDNLTKAERGGLSELDKAGFIKRQLVETRQITKHVAQILDSRMNTKYDENDKLIREVKVITLKSKLVSDFRKDFQFYKVREINNYHHAHDAYLNAVVGTALIKKYPKLESEFVYGDYKVYDVRKMIAKSEQEIGKATAKYFFYSNIMNFFKTEITLANGEIRKRPLIETNGETGEIVWDKGRDFATVRKVLSMPQVNIVKKTEVQTGGFSKESILPKRNSDKLIARKKDWDPKKYGGFDSPTVAYSVLVVAKVEKGKSKKLKSVKELLGITIMERSSFEKNPIDFLEAKGYKEVKKDLIIKLPKYSLFELENGRKRMLASAGELQKGNELALPSKYVNFLYLASHYEKLKGSPEDNEQKQLFVEQHKHYLDEIIEQISEFSKRVILADANLDKVLSAYNKHRDKPIREQAENIIHLFTLTNLGAPAAFKYFDTTIDRKRYTSTKEVLDATLIHQSITGLYETRIDLSQLGGDGGSGGSSGGSSGSETPGTSESATPESSGGSSGGSSGGIPWLMKKPLQLTTLVPLQEYEERLLKQTMLTGSYKEKLQSLFLKYDALWQHWENQVGHRRIKPHHIATGTVNPRPQKQYPINPKAKASIQTVINDLLKQGVLIQQNSIMNTPVYPVPKPDGKWRMVLDYREVNKTIPLIAAQNQHSAGILSSIFRGKYKTTLDLSNGFWAHSITPESYWLTAFTWLGQQYCWTRLPQGFLNSPALFNADVVDLLKEVPNVQVYVDDIYISHDDPREHLEQLEKVFSLLLNAGYVVSLKKSEIAQHEVEFLGFNITKEGRGLTETFKQKLLNITPPRDLKQLQSILGLLNFARNFIPNFSELVKPLYNIIATAPGKYITWTTDNSQQLQNIISMLNSAENLEERNPEVRLIMKVNTSPSAGYIRFYNEFAKRPIMYLNYVYTKAEVKFTNTEKLLTTIHKGLIKALDLGMGQEILVYSPIVSMTKIQKTPLPERKALPIRWITWMSYLEDPRIQFHYDKTLPELQQVPTVTDDIIAKIKHPSEFSMVFYTDGSAIKHPNVNKSHNAGMGIAQVQFKPEFTVINTWSIPLGDHTAQLAEVAAVEFACKKALKIDGPVLIVTDSFYVAESVNKELPYWQSNGFFNNKKKPLKHVSKWKSIADCIQLKPDIIIIHEKGHQPTASTFHTEGNNLADKLATQGSYVVNAGKRTADGSEFEKRTADGSEFESPKKKAKVE

SEQ ID NO: 7740 - protein, 2198 aa, synthetic construct
MPAAKRVKLDGGDKKYSIGLDIGTNSVGWAVITDEYKVPSKKFKVLGNTDRHSIKKNLIGALLFDSGETAEATRLKRTARRRYTRRKNRICYLQEIFSNEMAKVDDSFFHRLEESFLVEEDKKHERHPIFGNIVDEVAYHEKYPTIYHLRKKLVDSTDKADLRLIYLALAHMIKFRGHFLIEGDLNPDNSDVDKLFIQLVQTYNQLFEENPINASGVDAKAILSARLSKSRRLENLIAQLPGEKKNGLFGNLIALSLGLTPNFKSNFDLAEDAKLQLSKDTYDDDLDNLLAQIGDQYADLFLAAKNLSDAILLSDILRVNTEITKAPLSASMIKRYDEHHQDLTLLKALVRQQLPEKYKEIFFDQSKNGYAGYIDGGASQEEFYKFIKPILEKMDGTEELLVKLNREDLLRKQRTFDNGSIPHQIHLGELHAILRRQEDFYPFLKDNREKIEKILTFRIPYYVGPLARGNSRFAWMTRKSEETITPWNFEEVVDKGASAQSFIERMTNFDKNLPNEKVLPKHSLLYEYFTVYNELTKVKYVTEGMRKPAFLSGEQKKAIVDLLFKTNRKVTVKQLKEDYFKKIECFDSVEISGVEDRFNASLGTYHDLLKIIKDKDFLDNEENEDILEDIVLTLTLFEDREMIEERLKTYAHLFDDKVMKQLKRRRYTGWGRLSRKLINGIRDKQSGKTILDFLKSDGFANRNFMQLIHDDSLTFKEDIQKAQVSGQGDSLHEHIANLAGSPAIKKGILQTVKVVDELVKVMGRHKPENIVIEMARENQTTQKGQKNSRERMKRIEEGIKELGSQILKEHPVENTQLQNEKLYLYYLQNGRDMYVDQELDINRLSDYDVDHIVPQSFLKDDSIDNKVLTRSDKARGKSDNVPSEEVVKKMKNYWRQLLNAKLITQRKFDNLTKAERGGLSELDKAGFIKRQLVETRQITKHVAQILDSRMNTKYDENDKLIREVKVITLKSKLVSDFRKDFQFYKVREINNYHHAHDAYLNAVVGTALIKKYPKLESEFVYGDYKVYDVRKMIAKSEQEIGKATAKYFFYSNIMNFFKTEITLANGEIRKRPLIETNGETGEIVWDKGRDFATVRKVLSMPQVNIVKKTEVQTGGFSKESILPKRNSDKLIARKKDWDPKKYGGFDSPTVAYSVLVVAKVEKGKSKKLKSVKELLGITIMERSSFEKNPIDFLEAKGYKEVKKDLIIKLPKYSLFELENGRKRMLASAGELQKGNELALPSKYVNFLYLASHYEKLKGSPEDNEQKQLFVEQHKHYLDEIIEQISEFSKRVILADANLDKVLSAYNKHRDKPIREQAENIIHLFTLTNLGAPAAFKYFDTTIDRKRYTSTKEVLDATLIHQSITGLYETRIDLSQLGGDGGSGGSSGGSSGSETPGTSESATPESSGGSSGGSSGGMDPLQLLQPLEAEIKGTKLKAHWNSGATITCVPQAFLEEEVPIKNIWIKTIHGEKEQPVYYLTFKIQGRKVEAEVISSPYDYILVSPSDIPWLMKKPLQLTTLVPLQEYEERLLKQTMLTGSYKEKLQSLFLKYDALWQHWENQVGHRRIKPHHIATGTVNPRPQKQYPINPKAKASIQTVINDLLKQGVLIQQNSIMNTPVYPVPKPDGKWRMVLDYREVNKTIPLIAAQNQHSAGILSSIFRGKYKTTLDLSNGFWAHSITPESYWLTAFTWLGQQYCWTRLPQGFLNSPALFNADVVDLLKEVPNVQVYVDDIYISHDDPREHLEQLEKVFSLLLNAGYVVSLKKSEIAQHEVEFLGFNITKEGRGLTETFKQKLLNITPPRDLKQLQSILGLLNFARNFIPNFSELVKPLYNIIATAPGKYITWTTDNSQQLQNIISMLNSAENLEERNPEVRLIMKVNTSPSAGYIRFYNEFAKRPIMYLNYVYTKAEVKFTNTEKLLTTIHKGLIKALDLGMGQEILVYSPIVSMTKIQKTPLPERKALPIRWITWMSYLEDPRIQFHYDKTLPELQQVPTVTDDIIAKIKHPSEFSMVFYTDGSAIKHPNVNKSHNAGMGIAQVQFKPEFTVINTWSIPLGDHTAQLAEVAAVEFACKKALKIDGPVLIVTDSFYVAESVNKELPYWQSNGFFNNKKKPLKHVSKWKSIADCIQLKPDIIIIHEKGHQPTASTFHTEGNNLADKLATQGSYVVNAGKRTADGSEFEKRTADGSEFESPKKKAKVE

SEQ ID NO: 7741 - protein, 2116 aa, synthetic construct
MPAAKRVKLDGGDKKYSIGLDIGTNSVGWAVITDEYKVPSKKFKVLGNTDRHSIKKNLIGALLFDSGETAEATRLKRTARRRYTRRKNRICYLQEIFSNEMAKVDDSFFHRLEESFLVEEDKKHERHPIFGNIVDEVAYHEKYPTIYHLRKKLVDSTDKADLRLIYLALAHMIKFRGHFLIEGDLNPDNSDVDKLFIQLVQTYNQLFEENPINASGVDAKAILSARLSKSRRLENLIAQLPGEKKNGLFGNLIALSLGLTPNFKSNFDLAEDAKLQLSKDTYDDDLDNLLAQIGDQYADLFLAAKNLSDAILLSDILRVNTEITKAPLSASMIKRYDEHHQDLTLLKALVRQQLPEKYKEIFFDQSKNGYAGYIDGGASQEEFYKFIKPILEKMDGTEELLVKLNREDLLRKQRTFDNGSIPHQIHLGELHAILRRQEDFYPFLKDNREKIEKILTFRIPYYVGPLARGNSRFAWMTRKSEETITPWNFEEVVDKGASAQSFIERMTNFDKNLPNEKVLPKHSLLYEYFTVYNELTKVKYVTEGMRKPAFLSGEQKKAIVDLLFKTNRKVTVKQLKEDYFKKIECFDSVEISGVEDRFNASLGTYHDLLKIIKDKDFLDNEENEDILEDIVLTLTLFEDREMIEERLKTYAHLFDDKVMKQLKRRRYTGWGRLSRKLINGIRDKQSGKTILDFLKSDGFANRNFMQLIHDDSLTFKEDIQKAQVSGQGDSLHEHIANLAGSPAIKKGILQTVKVVDELVKVMGRHKPENIVIEMARENQTTQKGQKNSRERMKRIEEGIKELGSQILKEHPVENTQLQNEKLYLYYLQNGRDMYVDQELDINRLSDYDVDHIVPQSFLKDDSIDNKVLTRSDKARGKSDNVPSEEVVKKMKNYWRQLLNAKLITQRKFDNLTKAERGGLSELDKAGFIKRQLVETRQITKHVAQILDSRMNTKYDENDKLIREVKVITLKSKLVSDFRKDFQFYKVREINNYHHAHDAYLNAVVGTALIKKYPKLESEFVYGDYKVYDVRKMIAKSEQEIGKATAKYFFYSNIMNFFKTEITLANGEIRKRPLIETNGETGEIVWDKGRDFATVRKVLSMPQVNIVKKTEVQTGGFSKESILPKRNSDKLIARKKDWDPKKYGGFDSPTVAYSVLVVAKVEKGKSKKLKSVKELLGITIMERSSFEKNPIDFLEAKGYKEVKKDLIIKLPKYSLFELENGRKRMLASAGELQKGNELALPSKYVNFLYLASHYEKLKGSPEDNEQKQLFVEQHKHYLDEIIEQISEFSKRVILADANLDKVLSAYNKHRDKPIREQAENIIHLFTLTNLGAPAAFKYFDTTIDRKRYTSTKEVLDATLIHQSITGLYETRIDLSQLGGDGGSGGSSGGSSGSETPGTSESATPESSGGSSGGSSGGVLNLEEEYRLHEKPVPSSIDPSWLQLFPTVWAERAGMGLANQVPPVVVELRSGASPVAVRQYPMSKEAREGIRPHIQRFLDLGVLVPCQSPWNTPLLPVKKPGTNDYRPVQDLREINKRVQDIHPTVPNPYNLLSSLPPSHTWYSVLDLKDAFFCLKLHPNSQPLFAFEWRDPEKGNTGQLTWTRLPQGFKNSPTLFDEALHRDLAPFRALNPQVVLLQYVDDLLVAAPTYRDCKEGTQKLLQELSKLGYRVSAKKAQLCQKEVTYLGYLLKEGKRWLTPARKATVMKIPPPTTPRQVREFLGTAGFCRLWIPGFASLAAPLYPLTKESIPFIWTEEHQKAFDRIKEALLSAPALALPDLTKPFTLYVDERAGVARGVLTQTLGPWRRPVAYLSKKLDPVASGWPTCLKAVAAVALLLKDADKLTLGQNVTVIASHSLESIVRQPPDRWMTNARMTHYQSLLLNERVSFAPPAVLNPATLLPVESEATPVHRCSEILAEETGTRRDLKDQPLPGVPAWYTDGSSFIAEGKRRAGAAIVDGKRTVWASSLPEGTSAQKAELVALTQALRLAEGKDINIYTDSRYAFATAHIHGAIYKQRGLLTSAGKDIKNKEEILALLEAIHLPKRVAIIHCPGHQKGNDPVATGNRRADEAAKQAALSTRVLAETTKPAGKRTADGSEFEKRTADGSEFESPKKKAKVE

SEQ ID NO: 7742 - protein, 2116 aa, synthetic construct
MPAAKRVKLDGGDKKYSIGLDIGTNSVGWAVITDEYKVPSKKFKVLGNTDRHSIKKNLIGALLFDSGETAEATRLKRTARRRYTRRKNRICYLQEIFSNEMAKVDDSFFHRLEESFLVEEDKKHERHPIFGNIVDEVAYHEKYPTIYHLRKKLVDSTDKADLRLIYLALAHMIKFRGHFLIEGDLNPDNSDVDKLFIQLVQTYNQLFEENPINASGVDAKAILSARLSKSRRLENLIAQLPGEKKNGLFGNLIALSLGLTPNFKSNFDLAEDAKLQLSKDTYDDDLDNLLAQIGDQYADLFLAAKNLSDAILLSDILRVNTEITKAPLSASMIKRYDEHHQDLTLLKALVRQQLPEKYKEIFFDQSKNGYAGYIDGGASQEEFYKFIKPILEKMDGTEELLVKLNREDLLRKQRTFDNGSIPHQIHLGELHAILRRQEDFYPFLKDNREKIEKILTFRIPYYVGPLARGNSRFAWMTRKSEETITPWNFEEVVDKGASAQSFIERMTNFDKNLPNEKVLPKHSLLYEYFTVYNELTKVKYVTEGMRKPAFLSGEQKKAIVDLLFKTNRKVTVKQLKEDYFKKIECFDSVEISGVEDRFNASLGTYHDLLKIIKDKDFLDNEENEDILEDIVLTLTLFEDREMIEERLKTYAHLFDDKVMKQLKRRRYTGWGRLSRKLINGIRDKQSGKTILDFLKSDGFANRNFMQLIHDDSLTFKEDIQKAQVSGQGDSLHEHIANLAGSPAIKKGILQTVKVVDELVKVMGRHKPENIVIEMARENQTTQKGQKNSRERMKRIEEGIKELGSQILKEHPVENTQLQNEKLYLYYLQNGRDMYVDQELDINRLSDYDVDHIVPQSFLKDDSIDNKVLTRSDKARGKSDNVPSEEVVKKMKNYWRQLLNAKLITQRKFDNLTKAERGGLSELDKAGFIKRQLVETRQITKHVAQILDSRMNTKYDENDKLIREVKVITLKSKLVSDFRKDFQFYKVREINNYHHAHDAYLNAVVGTALIKKYPKLESEFVYGDYKVYDVRKMIAKSEQEIGKATAKYFFYSNIMNFFKTEITLANGEIRKRPLIETNGETGEIVWDKGRDFATVRKVLSMPQVNIVKKTEVQTGGFSKESILPKRNSDKLIARKKDWDPKKYGGFDSPTVAYSVLVVAKVEKGKSKKLKSVKELLGITIMERSSFEKNPIDFLEAKGYKEVKKDLIIKLPKYSLFELENGRKRMLASAGELQKGNELALPSKYVNFLYLASHYEKLKGSPEDNEQKQLFVEQHKHYLDEIIEQISEFSKRVILADANLDKVLSAYNKHRDKPIREQAENIIHLFTLTNLGAPAAFKYFDTTIDRKRYTSTKEVLDATLIHQSITGLYETRIDLSQLGGDGGSGGSSGGSSGSETPGTSESATPESSGGSSGGSSGGVLNLEEEYRLHEKPVPSSIDPSWLQLFPTVWAERAGMGLANQVPPVVVELRSGASPVAVRQYPMSKEAREGIRPHIQRFLDLGVLVPCQSPWNTPLLPVKKPGTNDYRPVQDLREINKRVQDIHPTVPNPYNLLSSLPPSHTWYSVLDLKDAFFCLKLHPNSQPLFAFEWRDPEKGNTGQLTWTRLPQGFKNSPTLFNEALHRDLAPFRALNPQVVLLQYVDDLLVAAPTYRDCKEGTQKLLQELSKLGYRVSAKKAQLCQKEVTYLGYLLKEGKRWLTPARKATVMKIPPPTTPRQVREFLGTAGFCRLWIPGFASLAAPLYPLTKPSIPFIWTEEHQKAFDRIKEALLSAPALALPDLTKPFTLYVDERAGVARGVLTQTLGPWRRPVAYLSKKLDPVASGWPTCLKAVAAVALLLKDADKLTLGQNVTVIASHSLESIVRQPPDRWMTNARMTHYQSLLLNERVSFAPPAVLNPATLLPVESEATPVHRCSEILAEETGTRRDLKDQPLPGVPAWYTDGSSFIAEGKRRAGAAIVDGKRTVWASSLPEGTSAQKAELVALTQALRLAEGKDINIYTDSRYAFATAHIHGAIYKQRGWLTSAGKDIKNKEEILALLEAIHLPKRVAIIHCPGHQKGNDPVATGNRRADEAAKQAALSTRVLAETTKPAGKRTADGSEFEKRTADGSEFESPKKKAKVE

SEQ ID NO: 7743 - protein, 2116 aa, synthetic construct
MPAAKRVKLDGGDKKYSIGLDIGTNSVGWAVITDEYKVPSKKFKVLGNTDRHSIKKNLIGALLFDSGETAEATRLKRTARRRYTRRKNRICYLQEIFSNEMAKVDDSFFHRLEESFLVEEDKKHERHPIFGNIVDEVAYHEKYPTIYHLRKKLVDSTDKADLRLIYLALAHMIKFRGHFLIEGDLNPDNSDVDKLFIQLVQTYNQLFEENPINASGVDAKAILSARLSKSRRLENLIAQLPGEKKNGLFGNLIALSLGLTPNFKSNFDLAEDAKLQLSKDTYDDDLDNLLAQIGDQYADLFLAAKNLSDAILLSDILRVNTEITKAPLSASMIKRYDEHHQDLTLLKALVRQQLPEKYKEIFFDQSKNGYAGYIDGGASQEEFYKFIKPILEKMDGTEELLVKLNREDLLRKQRTFDNGSIPHQIHLGELHAILRRQEDFYPFLKDNREKIEKILTFRIPYYVGPLARGNSRFAWMTRKSEETITPWNFEEVVDKGASAQSFIERMTNFDKNLPNEKVLPKHSLLYEYFTVYNELTKVKYVTEGMRKPAFLSGEQKKAIVDLLFKTNRKVTVKQLKEDYFKKIECFDSVEISGVEDRFNASLGTYHDLLKIIKDKDFLDNEENEDILEDIVLTLTLFEDREMIEERLKTYAHLFDDKVMKQLKRRRYTGWGRLSRKLINGIRDKQSGKTILDFLKSDGFANRNFMQLIHDDSLTFKEDIQKAQVSGQGDSLHEHIANLAGSPAIKKGILQTVKVVDELVKVMGRHKPENIVIEMARENQTTQKGQKNSRERMKRIEEGIKELGSQILKEHPVENTQLQNEKLYLYYLQNGRDMYVDQELDINRLSDYDVDHIVPQSFLKDDSIDNKVLTRSDKARGKSDNVPSEEVVKKMKNYWRQLLNAKLITQRKFDNLTKAERGGLSELDKAGFIKRQLVETRQITKHVAQILDSRMNTKYDENDKLIREVKVITLKSKLVSDFRKDFQFYKVREINNYHHAHDAYLNAVVGTALIKKYPKLESEFVYGDYKVYDVRKMIAKSEQEIGKATAKYFFYSNIMNFFKTEITLANGEIRKRPLIETNGETGEIVWDKGRDFATVRKVLSMPQVNIVKKTEVQTGGFSKESILPKRNSDKLIARKKDWDPKKYGGFDSPTVAYSVLVVAKVEKGKSKKLKSVKELLGITIMERSSFEKNPIDFLEAKGYKEVKKDLIIKLPKYSLFELENGRKRMLASAGELQKGNELALPSKYVNFLYLASHYEKLKGSPEDNEQKQLFVEQHKHYLDEIIEQISEFSKRVILADANLDKVLSAYNKHRDKPIREQAENIIHLFTLTNLGAPAAFKYFDTTIDRKRYTSTKEVLDATLIHQSITGLYETRIDLSQLGGDGGSGGSSGGSSGSETPGTSESATPESSGGSSGGSSGGVLNLEEEYRLHEKPVPSSIDPSWLQLFPTVWAERAGMGLANQVPPVVVELRSGASPVAVRQYPMSKEAREGIRPHIQRFLDLGVLVPCQSPWNTPLLPVKKPGTNDYRPVQDLREINKRVQDIHPTVPNPYNLLSSLPPSHTWYSVLDLKDAFFCLKLHPNSQPLFAFEWRDPEKGNTGQLTWTRLPQGFKNSPTLFNEALHRDLAPFRALNPQVVLLQYVDDLLVAAPTYRDCKEGTQKLLQELSKLGYRVSAKKAQLCQKEVTYLGYLLKEGKRWLTPARKATVMKIPPPTTPRQVREFLGKAGFCRLFIPGFASLAAPLYPLTKPSIPFIWTEEHQKAFDRIKEALLSAPALALPDLTKPFTLYVDERAGVARGVLTQTLGPWRRPVAYLSKKLDPVASGWPTCLKAVAAVALLLKDADKLTLGQNVTVIASHSLESIVRQPPDRWMTNARMTHYQSLLLNERVSFAPPAVLNPATLLPVESEATPVHRCSEILAEETGTRRDLKDQPLPGVPAWYTDGSSFIAEGKRRAGAAIVDGKRTVWASSLPEGTSAQKAELVALTQALRLAEGKDINIYTDSRYAFATAHIHGAIYKQRGWLTSAGKDIKNKEEILALLEAIHLPKRVAIIHCPGHQKGNDPVATGNRRADEAAKQAALSTRVLAETTKPAGKRTADGSEFEKRTADGSEFESPKKKAKVE

SEQ ID NO: 7744-8000 - skipped (257 entries)

SEQ ID NO: 8001 - protein, 673 aa, Reticuloendotheliosis virus
TAPLEEEYRLFLEAPIQNVTLLEQWKREIPKVWAEINPPGLASTQAPIHVQLLSTALPVRVRQYPITLEAKRSLRETIRKFRAAGILRPVHSPWNTPLLPVRKSGTSEYRMVQDLREVNKRVETIHPTVPNPYTLLSLLPPDRIWYSVLDLKDAFFCIPLAPESQLIFAFEWADAEEGESGQLTWTRLPQGFKNSPTLFDEALNRDLQGFRLDHPSVSLLQYVDDLLIAADTQAACLSATRDLLMTLAELGYRVSGKKAQLCQEEVTYLGFKIHKGSRSLSNSRTQAILQIPVPKTKRQVREFLGTIGYCRLWIPGFAELAQPLYAATRGGNDPLVWGEKEEEAFQSLKLALTQPPALALPSLDKPFQLFVEETSGAAKGVLTQALGPWKRPVAYLSKRLDPVAAGWPRCLRAIAAAALLTREASKLTFGQDIEITSSHNLESLLRSPPDKWLTNARITQYQVLLLDPPRVRFKQTAALNPATLLPETDDTLPIHHCLDTLDSLTSTRPDLTDQPLAQAEATLFTDGSSYIRDGKRYAGAAVVTLDSVIWAEPLPIGTSAQKAELIALTKALEWSKDKSVNIYTDSRYAFATLHVHGMIYRERGLLTAGGKAIKNAPEILALLTAVWLPKRVAVMHCKGHQKDDAPTSTGNRRADEVAREVAIRPLSTQATIS

SEQ ID NO: 8002 - protein, 673 aa, synthetic construct
TAPLEEEYRLFLEAPIQNVTLLEQWKREIPKVWAEINPPGLASTQAPIHVQLLSTALPVRVRQYPITLEAKRSLRETIRKFRAAGILRPVHSPWNTPLLPVRKSGTSEYRMVQDLREVNKRVETIHPTVPNPYTLLSLLPPDRIWYSVLDLKDAFFCIPLAPESQLIFAFEWADAEEGESGQLTWTRLPQGFKNSPTLFNEALNRDLQGFRLDHPSVSLLQYVDDLLIAADTQAACLSATRDLLMTLAELGYRVSGKKAQLCQEEVTYLGFKIHKGSRSLSNSRTQAILQIPVPKTKRQVREFLGTIGYCRLWIPGFAELAQPLYAATRPGNDPLVWGEKEEEAFQSLKLALTQPPALALPSLDKPFQLFVEETSGAAKGVLTQALGPWKRPVAYLSKRLDPVAAGWPRCLRAIAAAALLTREASKLTFGQDIEITSSHNLESLLRSPPDKWLTNARITQYQVLLLDPPRVRFKQTAALNPATLLPETDDTLPIHHCLDTLDSLTSTRPDLTDQPLAQAEATLFTDGSSYIRDGKRYAGAAVVTLDSVIWAEPLPIGTSAQKAELIALTKALEWSKDKSVNIYTDSRYAFATLHVHGMIYRERGWLTAGGKAIKNAPEILALLTAVWLPKRVAVMHCKGHQKDDAPTSTGNRRADEVAREVAIRPLSTQATIS

SEQ ID NO: 8003 - protein, 673 aa, synthetic construct
TAPLEEEYRLFLEAPIQNVTLLEQWKREIPKVWAEINPPGLASTQAPIHVQLLSTALPVRVRQYPITLEAKRSLRETIRKFRAAGILRPVHSPWNTPLLPVRKSGTSEYRMVQDLREVNKRVETIHPTVPNPYTLLSLLPPDRIWYSVLDLKDAFFCIPLAPESQLIFAFEWADAEEGESGQLTWTRLPQGFKNSPTLFNEALNRDLQGFRLDHPSVSLLQYVDDLLIAADTQAACLSATRDLLMTLAELGYRVSGKKAQLCQEEVTYLGFKIHKGSRSLSNSRTQAILQIPVPKTKRQVREFLGKIGYCRLFIPGFAELAQPLYAATRPGNDPLVWGEKEEEAFQSLKLALTQPPALALPSLDKPFQLFVEETSGAAKGVLTQALGPWKRPVAYLSKRLDPVAAGWPRCLRAIAAAALLTREASKLTFGQDIEITSSHNLESLLRSPPDKWLTNARITQYQVLLLDPPRVRFKQTAALNPATLLPETDDTLPIHHCLDTLDSLTSTRPDLTDQPLAQAEATLFTDGSSYIRDGKRYAGAAVVTLDSVIWAEPLPIGTSAQKAELIALTKALEWSKDKSVNIYTDSRYAFATLHVHGMIYRERGWLTAGGKAIKNAPEILALLTAVWLPKRVAVMHCKGHQKDDAPTSTGNRRADEVAREVAIRPLSTQATIS

SEQ ID NO: 8004 - protein, 677 aa, Baboon endogenous virus
TVSLQDEHRLFDIPVTTSLPDVWLQDFPQAWAETGGLGRAKCQAPIIIDLKPTAVPVSIKQYPMSLEAHMGIRQHIIKFLELGVLRPCRSPWNTPLLPVKKPGTQDYRPVQDLREINKRTVDIHPTVPNPYNLLSTLKPDYSWYTVLDLKDAFFCLPLAPQSQELFAFEWKDPERGISGQLTWTRLPQGFKNSPTLFDEALHRDLTDFRTQHPEVTLLQYVDDLLLAAPTKKACTQGTRHLLQELGEKGYRASAKKAQICQTKVTYLGYILSEGKRWLTPGRIETVARIPPPRNPREVREFLGTAGFCRLWIPGFAELAAPLYALTKESTPFTWQTEHQLAFEALKKALLSAPALGLPDTSKPFTLFLDERQGIAKGVLTQKLGPWKRPVAYLSKKLDPVAAGWPPCLRIMAATAMLVKDSAKLTLGQPLTVITPHTLEAIVRQPPDRWITNARLTHYQALLLDTDRVQFGPPVTLNPATLLPVPENQPSPHDCRQVLAETHGTREDLKDQELPDADHTWYTDGSSYLDSGTRRAGAAVVDGHNTIWAQSLPPGTSAQKAELIALTKALELSKGKKANIYTDSRYAFATAHTHGSIYERRGLLTSEGKEIKNKAEIIALLKALFLPQEVAIIHCPGHQKGQDPVAVGNRQADRVARQAAMAEVLTLATEPDNTSHIT

SEQ ID NO: 8005 - protein, 677 aa, synthetic construct
TVSLQDEHRLFDIPVTTSLPDVWLQDFPQAWAETGGLGRAKCQAPIIIDLKPTAVPVSIKQYPMSLEAHMGIRQHIIKFLELGVLRPCRSPWNTPLLPVKKPGTQDYRPVQDLREINKRTVDIHPTVPNPYNLLSTLKPDYSWYTVLDLKDAFFCLPLAPQSQELFAFEWKDPERGISGQLTWTRLPQGFKNSPTLFNEALHRDLTDFRTQHPEVTLLQYVDDLLLAAPTKKACTQGTRHLLQELGEKGYRASAKKAQICQTKVTYLGYILSEGKRWLTPGRIETVARIPPPRNPREVREFLGTAGFCRLWIPGFAELAAPLYALTKPSTPFTWQTEHQLAFEALKKALLSAPALGLPDTSKPFTLFLDERQGIAKGVLTQKLGPWKRPVAYLSKKLDPVAAGWPPCLRIMAATAMLVKDSAKLTLGQPLTVITPHTLEAIVRQPPDRWITNARLTHYQALLLDTDRVQFGPPVTLNPATLLPVPENQPSPHDCRQVLAETHGTREDLKDQELPDADHTWYTDGSSYLDSGTRRAGAAVVDGHNTIWAQSLPPGTSAQKAELIALTKALELSKGKKANIYTDSRYAFATAHTHGSIYERRGWLTSEGKEIKNKAEIIALLKALFLPQEVAIIHCPGHQKGQDPVAVGNRQADRVARQAAMAEVLTLATEPDNTSHIT

SEQ ID NO: 8006 - protein, 677 aa, synthetic construct
TVSLQDEHRLFDIPVTTSLPDVWLQDFPQAWAETGGLGRAKCQAPIIIDLKPTAVPVSIKQYPMSLEAHMGIRQHIIKFLELGVLRPCRSPWNTPLLPVKKPGTQDYRPVQDLREINKRTVDIHPTVPNPYNLLSTLKPDYSWYTVLDLKDAFFCLPLAPQSQELFAFEWKDPERGISGQLTWTRLPQGFKNSPTLFNEALHRDLTDFRTQHPEVTLLQYVDDLLLAAPTKKACTQGTRHLLQELGEKGYRASAKKAQICQTKVTYLGYILSEGKRWLTPGRIETVARIPPPRNPREVREFLGKAGFCRLFIPGFAELAAPLYALTKPSTPFTWQTEHQLAFEALKKALLSAPALGLPDTSKPFTLFLDERQGIAKGVLTQKLGPWKRPVAYLSKKLDPVAAGWPPCLRIMAATAMLVKDSAKLTLGQPLTVITPHTLEAIVRQPPDRWITNARLTHYQALLLDTDRVQFGPPVTLNPATLLPVPENQPSPHDCRQVLAETHGTREDLKDQELPDADHTWYTDGSSYLDSGTRRAGAAVVDGHNTIWAQSLPPGTSAQKAELIALTKALELSKGKKANIYTDSRYAFATAHTHGSIYERRGWLTSEGKEIKNKAEIIALLKALFLPQEVAIIHCPGHQKGQDPVAVGNRQADRVARQAAMAEVLTLATEPDNTSHIT

SEQ ID NO: 8007 - protein, 576 aa, Bovine leukemia virus
GVLDAPPSHIGLEHLPPPPEVPQFPLNLERLQALQDLVHRSLEAGYISPWDGPGNNPVFPVRKPNGAWRFVHDLRVTNALTKPIPALSPGPPDLTAIPTHLPHIICLDLKDAFFQIPVEDRFRSYFAFTLPTPGGLQPHRRFAWRVLPQGFINSPALFERALQEPLRQVSAAFSQSLLVSYMDDILYVSPTEEQRLQCYQTMAAHLRDLGFQVASEKTRQTPSPVPFLGQMVHERMVTYQSLPTLQISSPISLHQLQTVLGDLQWVSRGTPTTRRPLQLLYSSLKGIDDPRAIIHLSPEQQQGIAELRQALSHNARSRYNEQEPLLAYVHLTRAGSTLVLFQKGAQFPLAYFQTPLTDNQASPWGLLLLLGCQYLQAQALSSYAKTILKYYHNLPKTSLDNWIQSSEDPRVQELLQLWPQISSQGIQPPGPWKTLVTRAEVFLTPQFSPEPIPAALCLFSDGAARRGAYCLWKDHLLDFQAVPAPESAQKGELAGLLAGLAAAPPEPLNIWVDSKYLYSLLRTLVLGAWLQPDPVPSYALLYKSLLRHPAIFVGHVRSHSSASHPIASLNNYVDQL

SEQ ID NO: 8008 - protein, 576 aa, synthetic construct
GVLDAPPSHIGLEHLPPPPEVPQFPLNLERLQALQDLVHRSLEAGYISPWDGPGNNPVFPVRKPNGAWRFVHDLRVTNALTKPIPALSPGPPDLTAIPTHLPHIICLDLKDAFFQIPVEDRFRSYFAFTLPTPGGLQPHRRFAWRVLPQGFINSPALFQRALQEPLRQVSAAFSQSLLVSYMDDILYVSPTEEQRLQCYQTMAAHLRDLGFQVASEKTRQTPSPVPFLGQMVHERMVTYQSLPTLQISSPISLHQLQTVLGDLQWVSRGTPTTRRPLQLLYSSLKPIDDPRAIIHLSPEQQQGIAELRQALSHNARSRYNEQEPLLAYVHLTRAGSTLVLFQKGAQFPLAYFQTPLTDNQASPWGLLLLLGCQYLQAQALSSYAKTILKYYHNLPKTSLDNWIQSSEDPRVQELLQLWPQISSQGIQPPGPWKTLVTRAEVFLTPQFSPEPIPAALCLFSDGAARRGAYCLWKDHLLDFQAVPAPESAQKGELAGLLAGLAAAPPEPLNIWVDSKYLYSLLRTLVLGAWLQPDPVPSYALLYKSLLRHPAIFVGHVRSHSSASHPIASLNNYVDQL

SEQ ID NO: 8009 - protein, 576 aa, Bovine leukemia virus
GVLDTPPSHIGLEHLPPPPEVPQFPLNLERLQALQDLVHRSLEAGYISPWDGPGNNPVFPVRKPNGAWRFVHDLRATNALTKPIPALSPGPPDLTAIPTHPPHIICLDLKDAFFQIPVEDRFRFYLSFTLPSPGGLQPHRRFAWRVLPQGFINSPALFERALQEPLRQVSAAFSQSLLVSYMDDILYASPTEEQRSQCYQALAARLRDLGFQVASEKTSQTPSPVPFLGQMVHEQIVTYQSLPTLQISSPISLHQLQAVLGDLQWVSRGTPTTRRPLQLLYSSLKRHHDPRAIIQLSPEQLQGIAELRQALSHNARSRYNEQEPLLAYVHLTRAGSTLVLFQKGAQFPLAYFQTPLTDNQASPWGLLLLLGCQYLQTQALSSYAKPILKYYHNLPKTSLDNWIQSSEDPRVQELLQLWPQISSQGIQPPGPWKTLITRAEVFLTPQFSPDPIPAALCLFSDGATGRGAYCLWKDHLLDFQAVPAPESAQKGELAGLLAGLAAAPPEPVNIWVDSKYLYSLLRTLVLGAWLQPDPVPSYALLYKSLLRHPAIVVGHVRSHSSASHPIASLNNYVDQL

SEQ ID NO: 8010 - protein, 576 aa, synthetic construct
GVLDTPPSHIGLEHLPPPPEVPQFPLNLERLQALQDLVHRSLEAGYISPWDGPGNNPVFPVRKPNGAWRFVHDLRATNALTKPIPALSPGPPDLTAIPTHPPHIICLDLKDAFFQIPVEDRFRFYLSFTLPSPGGLQPHRRFAWRVLPQGFINSPALFNRALQEPLRQVSAAFSQSLLVSYMDDILYASPTEEQRSQCYQALAARLRDLGFQVASEKTSQTPSPVPFLGQMVHEQIVTYQSLPTLQISSPISLHQLQAVLGDLQWVSRGTPTTRRPLQLLYSSLKRHHDPRAIIQLSPEQLQGIAELRQALSHNARSRYNEQEPLLAYVHLTRAGSTLVLFQKGAQFPLAYFQTPLTDNQASPWGLLLLLGCQYLQTQALSSYAKPILKYYHNLPKTSLDNWIQSSEDPRVQELLQLWPQISSQGIQPPGPWKTLITRAEVFLTPQFSPDPIPAALCLFSDGATGRGAYCLWKDHLLDFQAVPAPESAQKGELAGLLAGLAAAPPEPVNIWVDSKYLYSLLRTWVLGAWLQPDPVPSYALLYKSLLRHPAIVVGHVRSHSSASHPIASLNNYVDQL

SEQ ID NO: 8011 - protein, 576 aa, synthetic construct
GVLDTPPSHIGLEHLPPPPEVPQFPLNLERLQALQDLVHRSLEAGYISPWDGPGNNPVFPVRKPNGAWRFVHDLRATNALTKPIPALSPGPPDLTAPPTHPPHIICLDLKDAFFQIPVEDRFRFYLSFTLPSPGGLQPHRRFAWRVLPQGFINSPALFQRALQEPLRQVSAAFSQSLLVSYMDDILYASPTEEQRSQCYQALAARLRDLGFQVASEKTSQTPSPVPFLGQMVHEQIVTYQSLPTLQISSPISLHQLQAVLGDLQWVSRGTPTTRRPLQLLYSSLKRHHDPRAIIQLSPEQLQGIAELRQALSHNARSRYNEQEPLLAYVHLTRAGSTLVLFQKGAQFPLAYFQTPLTDNQASPWGLLLLLGCQYLQTQALSSYAKPILKYYHNLPKTSLDNWIQSSEDPRVQELLQLWPQISSQGIQPPGPWKTLITRAEVFLTPQFSPDPIPAALCLFSDGATGRGAYCLWKDHLLDFQAVPAPESAQKGELAGLLAGLAAAPPEPVNIWVDSKYLYSLLRTWVLGAWLQPDPVPSYALLYKSLLRHPAIVVGHVRSHSSASHPIASLNNYVDQL

SEQ ID NO: 8012 - protein, 748 aa, Feline foamy virus
MDLLKPLTVERKGVKIKGYWNSQADITCVPKDLLQGEEPVRQQNVTTIHGTQEGDVYYVNLKIDGRRINTEVIGTTLDYAIITPGDVPWILKKPLELTIKLDLEEQQGTLLNNSILSKKGKEELKQLFEKYSALWQSWENQVGHRRIRPHKIATGTVKPTPQKQYHINPKAKPDIQIVINDLLKQGVLIQKESTMNTPVYPVPKPNGRWRMVLDYRAVNKVTPLIAVQNQHSYGILGSLFKGRYKTTIDLSNGFWAHPIVPEDYWITAFTWQGKQYCWTVLPQGFLNSPGLFTGDVVDLLQGIPNVEVYVDDVYISHDSEKEHLEYLDILFNRLKEAGYIISLKKSNIANSIVDFLGFQITNEGRGLTDTFKEKLENITAPTTLKQLQSILGLLNFARNFIPDFTELIAPLYALIPKSTKNYVPWQIEHSTTLETLITKLNGAEYLQGRKGDKTLIMKVNASYTTGYIRYYNEGEKKPISYVSIVFSKTELKFTELEKLLTTVHKGLLKALDLSMGQNIHVYSPIVSMQNIQKTPQTAKKALASRWLSWLSYLEDPRIRFFYDPQMPALKDLPAVDTGKDNKKHPSNFQHIFYTDGSAITSPTKEGHLNAGMGIVYFINKDGNLQKQQEWSISLGNHTAQFAEIAAFEFALKKCLPLGGNILVVTDSNYVAKAYNEELDVWASNGFVNNRKKPLKHISKWKSVADLKRLRPDVVVTHEPGHQKLDSSPHAYGNNLADQLATQASFKVH

SEQ ID NO: 8013 - protein, 748 aa, synthetic construct
MDLLKPLTVERKGVKIKGYWNSQADITCVPKDLLQGEEPVRQQNVTTIHGTQEGDVYYVNLKIDGRRINTEVIGTTLDYAIITPGDVPWILKKPLELTIKLDLEEQQGTLLNNSILSKKGKEELKQLFEKYSALWQSWENQVGHRRIRPHKIATGTVKPTPQKQYHINPKAKPDIQIVINDLLKQGVLIQKESTMNTPVYPVPKPNGRWRMVLDYRAVNKVTPLIAVQNQHSYGILGSLFKGRYKTTIDLSNGFWAHPIVPEDYWITAFTWQGKQYCWTVLPQGFLNSPGLFNGDVVDLLQGIPNVEVYVDDVYISHDSEKEHLEYLDILFNRLKEAGYIISLKKSNIANSIVDFLGFQITNEGRGLTDTFKEKLENITAPTTLKQLQSILGLLNFARNFIPDFTELIAPLYALIPKSPKNYVPWQIEHSTTLETLITKLNGAEYLQGRKGDKTLIMKVNASYTTGYIRYYNEGEKKPISYVSIVFSKTELKFTELEKLLTTVHKGLLKALDLSMGQNIHVYSPIVSMQNIQKTPQTAKKALASRWLSWLSYLEDPRIRFFYDPQMPALKDLPAVDTGKDNKKHPSNFQHIFYTDGSAITSPTKEGHLNAGMGIVYFINKDGNLQKQQEWSISLGNHTAQFAEIAAFEFALKKCLPLGGNILVVTDSNYVAKAYNEELDVWASNGFVNNRKKPLKHISKWKSVADLKRLRPDVVVTHEPGHQKLDSSPHAYGNNLADQLATQASFKVH

SEQ ID NO: 8014 - protein, 748 aa, synthetic construct
MDLLKPLTVERKGVKIKGYWNSQADITCVPKDLLQGEEPVRQQNVTTIHGTQEGDVYYVNLKIDGRRINTEVIGTTLDYAIITPGDVPWILKKPLELTIKLDLEEQQGTLLNNSILSKKGKEELKQLFEKYSALWQSWENQVGHRRIRPHKIATGTVKPTPQKQYHINPKAKPDIQIVINDLLKQGVLIQKESTMNTPVYPVPKPNGRWRMVLDYRAVNKVTPLIAVQNQHSYGILGSLFKGRYKTTIDLSNGFWAHPIVPEDYWITAFTWQGKQYCWTVLPQGFLNSPGLFNGDVVDLLQGIPNVEVYVDDVYISHDSEKEHLEYLDILFNRLKEAGYIISLKKSNIANSIVDFLGFQITNEGRGLTDTFKEKLENITAPTTLKQLQSILGKLNFARNFIPDFTELIAPLYALIPKSPKNYVPWQIEHSTTLETLITKLNGAEYLQGRKGDKTLIMKVNASYTTGYIRYYNEGEKKPISYVSIVFSKTELKFTELEKLLTTVHKGLLKALDLSMGQNIHVYSPIVSMQNIQKTPQTAKKALASRWLSWLSYLEDPRIRFFYDPQMPALKDLPAVDTGKDNKKHPSNFQHIFYTDGSAITSPTKEGHLNAGMGIVYFINKDGNLQKQQEWSISLGNHTAQFAEIAAFEFALKKCLPLGGNILVVTDSNYVAKAYNEELDVWASNGFVNNRKKPLKHISKWKSVADLKRLRPDVVVTHEPGHQKLDSSPHAYGNNLADQLATQASFKVH

SEQ ID NO: 8015 - protein, 662 aa, Feline foamy virus
VPWILKKPLELTIKLDLEEQQGTLLNNSILSKKGKEELKQLFEKYSALWQSWENQVGHRRIRPHKIATGTVKPTPQKQYHINPKAKPDIQIVINDLLKQGVLIQKESTMNTPVYPVPKPNGRWRMVLDYRAVNKVTPLIAVQNQHSYGILGSLFKGRYKTTIDLSNGFWAHPIVPEDYWITAFTWQGKQYCWTVLPQGFLNSPGLFTGDVVDLLQGIPNVEVYVDDVYISHDSEKEHLEYLDILFNRLKEAGYIISLKKSNIANSIVDFLGFQITNEGRGLTDTFKEKLENITAPTTLKQLQSILGLLNFARNFIPDFTELIAPLYALIPKSTKNYVPWQIEHSTTLETLITKLNGAEYLQGRKGDKTLIMKVNASYTTGYIRYYNEGEKKPISYVSIVFSKTELKFTELEKLLTTVHKGLLKALDLSMGQNIHVYSPIVSMQNIQKTPQTAKKALASRWLSWLSYLEDPRIRFFYDPQMPALKDLPAVDTGKDNKKHPSNFQHIFYTDGSAITSPTKEGHLNAGMGIVYFINKDGNLQKQQEWSISLGNHTAQFAEIAAFEFALKKCLPLGGNILVVTDSNYVAKAYNEELDVWASNGFVNNRKKPLKHISKWKSVADLKRLRPDVVVTHEPGHQKLDSSPHAYGNNLADQLATQASFKVH

SEQ ID NO: 8016 - protein, 662 aa, synthetic construct
VPWILKKPLELTIKLDLEEQQGTLLNNSILSKKGKEELKQLFEKYSALWQSWENQVGHRRIRPHKIATGTVKPTPQKQYHINPKAKPDIQIVINDLLKQGVLIQKESTMNTPVYPVPKPNGRWRMVLDYRAVNKVTPLIAVQNQHSYGILGSLFKGRYKTTIDLSNGFWAHPIVPEDYWITAFTWQGKQYCWTVLPQGFLNSPGLFNGDVVDLLQGIPNVEVYVDDVYISHDSEKEHLEYLDILFNRLKEAGYIISLKKSNIANSIVDFLGFQITNEGRGLTDTFKEKLENITAPTTLKQLQSILGLLNFARNFIPDFTELIAPLYALIPKSPKNYVPWQIEHSTTLETLITKLNGAEYLQGRKGDKTLIMKVNASYTTGYIRYYNEGEKKPISYVSIVFSKTELKFTELEKLLTTVHKGLLKALDLSMGQNIHVYSPIVSMQNIQKTPQTAKKALASRWLSWLSYLEDPRIRFFYDPQMPALKDLPAVDTGKDNKKHPSNFQHIFYTDGSAITSPTKEGHLNAGMGIVYFINKDGNLQKQQEWSISLGNHTAQFAEIAAFEFALKKCLPLGGNILVVTDSNYVAKAYNEELDVWASNGFVNNRKKPLKHISKWKSVADLKRLRPDVVVTHEPGHQKLDSSPHAYGNNLADQLATQASFKVH

SEQ ID NO: 8017 - protein, 662 aa, synthetic construct
VPWILKKPLELTIKLDLEEQQGTLLNNSILSKKGKEELKQLFEKYSALWQSWENQVGHRRIRPHKIATGTVKPTPQKQYHINPKAKPDIQIVINDLLKQGVLIQKESTMNTPVYPVPKPNGRWRMVLDYRAVNKVTPLIAVQNQHSYGILGSLFKGRYKTTIDLSNGFWAHPIVPEDYWITAFTWQGKQYCWTVLPQGFLNSPGLFNGDVVDLLQGIPNVEVYVDDVYISHDSEKEHLEYLDILFNRLKEAGYIISLKKSNIANSIVDFLGFQITNEGRGLTDTFKEKLENITAPTTLKQLQSILGKLNFARNFIPDFTELIAPLYALIPKSPKNYVPWQIEHSTTLETLITKLNGAEYLQGRKGDKTLIMKVNASYTTGYIRYYNEGEKKPISYVSIVFSKTELKFTELEKLLTTVHKGLLKALDLSMGQNIHVYSPIVSMQNIQKTPQTAKKALASRWLSWLSYLEDPRIRFFYDPQMPALKDLPAVDTGKDNKKHPSNFQHIFYTDGSAITSPTKEGHLNAGMGIVYFINKDGNLQKQQEWSISLGNHTAQFAEIAAFEFALKKCLPLGGNILVVTDSNYVAKAYNEELDVWASNGFVNNRKKPLKHISKWKSVADLKRLRPDVVVTHEPGHQKLDSSPHAYGNNLADQLATQASFKVH

SEQ ID NO: 8018 - protein, 670 aa, Feline leukemia virus
TLQLEEEYRLFEPESTQKQEMDIWLKNFPQAWAETGGMGTAHCQAPVLIQLKATATPISIRQYPMPHEAYQGIKPHIRRMLDQGILKPCQSPWNTPLLPVKKPGTEDYRPVQDLREVNKRVEDIHPTVPNPYNLLSTLPPSHPWYTVLDLKDAFFCLRLHSESQLLFAFEWRDPEIGLSGQLTWTRLPQGFKNSPTLFDEALHSDLADFRVRYPALVLLQYVDDLLLAAATRTECLEGTKALLETLGNKGYRASAKKAQICLQEVTYLGYSLKDGQRWLTKARKEAILSIPVPKNSRQVREFLGTAGYCRLWIPGFAELAAPLYPLTRPGTLFQWGTEQQLAFEDIKKALLSSPALGLPDITKPFELFIDENSGFAKGVLVQKLGPWKRPVAYLSKKLDTVASGWPPCLRMVAAIAILVKDAGKLTLGQPLTILTSHPVEALVRQPPNKWLSNARMTHYQAMLLDAERVHFGPTVSLNPATLLPLPSGGNHHDCLQILAETHGTRPDLTDQPLPDADLTWYTDGSSFIRNGEREAGAAVTTESEVIWAAPLPPGTSAQRAELIALTQALKMAEGKKLTVYTDSRYAFATTHVHGEIYRRRGLLTSEGKEIKNKNEILALLEALFLPKRLSIIHCPGHQKGDSPQAKGNRLADDTAKKAATETHSSLTVLP

SEQ ID NO: 8019 - protein, 670 aa, synthetic construct
TLQLEEEYRLFEPESTQKQEMDIWLKNFPQAWAETGGMGTAHCQAPVLIQLKATATPISIRQYPMPHEAYQGIKPHIRRMLDQGILKPCQSPWNTPLLPVKKPGTEDYRPVQDLREVNKRVEDIHPTVPNPYNLLSTLPPSHPWYTVLDLKDAFFCLRLHSESQLLFAFEWRDPEIGLSGQLTWTRLPQGFKNSPTLFNEALHSDLADFRVRYPALVLLQYVDDLLLAAATRTECLEGTKALLETLGNKGYRASAKKAQICLQEVTYLGYSLKDGQRWLTKARKEAILSIPVPKNSRQVREFLGTAGYCRLWIPGFAELAAPLYPLTRPGTLFQWGTEQQLAFEDIKKALLSSPALGLPDITKPFELFIDENSGFAKGVLVQKLGPWKRPVAYLSKKLDTVASGWPPCLRMVAAIAILVKDAGKLTLGQPLTILTSHPVEALVRQPPNKWLSNARMTHYQAMLLDAERVHFGPTVSLNPATLLPLPSGGNHHDCLQILAETHGTRPDLTDQPLPDADLTWYTDGSSFIRNGEREAGAAVTTESEVIWAAPLPPGTSAQRAELIALTQALKMAEGKKLTVYTDSRYAFATTHVHGEIYRRRGWLTSEGKEIKNKNEILALLEALFLPKRLSIIHCPGHQKGDSPQAKGNRLADDTAKKAATETHSSLTVLP

SEQ ID NO: 8020 - protein, 670 aa, synthetic construct
TLQLEEEYRLFEPESTQKQEMDIWLKNFPQAWAETGGMGTAHCQAPVLIQLKATATPISIRQYPMPHEAYQGIKPHIRRMLDQGILKPCQSPWNTPLLPVKKPGTEDYRPVQDLREVNKRVEDIHPTVPNPYNLLSTLPPSHPWYTVLDLKDAFFCLRLHSESQLLFAFEWRDPEIGLSGQLTWTRLPQGFKNSPTLFNEALHSDLADFRVRYPALVLLQYVDDLLLAAATRTECLEGTKALLETLGNKGYRASAKKAQICLQEVTYLGYSLKDGQRWLTKARKEAILSIPVPKNSRQVREFLGKAGYCRLFIPGFAELAAPLYPLTRPGTLFQWGTEQQLAFEDIKKALLSSPALGLPDITKPFELFIDENSGFAKGVLVQKLGPWKRPVAYLSKKLDTVASGWPPCLRMVAAIAILVKDAGKLTLGQPLTILTSHPVEALVRQPPNKWLSNARMTHYQAMLLDAERVHFGPTVSLNPATLLPLPSGGNHHDCLQILAETHGTRPDLTDQPLPDADLTWYTDGSSFIRNGEREAGAAVTTESEVIWAAPLPPGTSAQRAELIALTQALKMAEGKKLTVYTDSRYAFATTHVHGEIYRRRGWLTSEGKEIKNKNEILALLEALFLPKRLSIIHCPGHQKGDSPQAKGNRLADDTAKKAATETHSSLTVLP

SEQ ID NO: 8021 - protein, 751 aa, unidentified
MNPLQLLQPLPAEIKGTKLLAHWNSGATITCIPESFLEDEQPIKKTLIKTIHGEKQQNVYYVTFKVKGRKVEAEVIASPYEYILLSPTDVPWLTQQPLQLTILVPLQEYQEKILSKTALPEDQKQQLKTLFVKYDNLWQHWENQVGHRKIRPHNIATGDYPPRPQKQYPINPKAKPSIQIVIDDLLKQGVLTPQNSTMNTPVYPVPKPDGRWRMVLDYREVNKTIPLTAAQNQHSAGILATIVRQKYKTTLDLANGFWAHPITPESYWLTAFTWQGKQYCWTRLPQGFLNSPALFTADVVDLLKEIPNVQVYVDDIYLSHDDPKEHVQQLEKVFQILLQAGYVVSLKKSEIGQKTVEFLGFNITKEGRGLTDTFKTKLLNITPPKDLKQLQSILGLLNFARNFIPNFAELVQPLYNLIASAKGKYIEWSEENTKQLNMVIEALNTASNLEERLPEQRLVIKVNTSPSAGYVRYYNETGKKPIMYLNYVFSKAELKFSMLEKLLTTMHKALIKAMDLAMGQEILVYSPIVSMTKIQKTPLPERKALPIRWITWMTYLEDPRIQFHYDKTLPELKHIPDVYTSSQSPVKHPSQYEGVFYTDGSAIKSPDPTKSNNAGMGIVHATYKPEYQVLNQWSIPLGNHTAQMAEIAAVEFACKKALKIPGPVLVITDSFYVAESANKELPYWKSNGFVNNKKKPLKHISKWKSIAECLSMKPDITIQHEKGISLQIPVFILKGNALADKLATQGSYVVN

SEQ ID NO: 8022 - protein, 751 aa, synthetic construct
MNPLQLLQPLPAEIKGTKLLAHWNSGATITCIPESFLEDEQPIKKTLIKTIHGEKQQNVYYVTFKVKGRKVEAEVIASPYEYILLSPTDVPWLTQQPLQLTILVPLQEYQEKILSKTALPEDQKQQLKTLFVKYDNLWQHWENQVGHRKIRPHNIATGDYPPRPQKQYPINPKAKPSIQIVIDDLLKQGVLTPQNSTMNTPVYPVPKPDGRWRMVLDYREVNKTIPLTAAQNQHSAGILATIVRQKYKTTLDLANGFWAHPITPESYWLTAFTWQGKQYCWTRLPQGFLNSPALFNADVVDLLKEIPNVQVYVDDIYLSHDDPKEHVQQLEKVFQILLQAGYVVSLKKSEIGQKTVEFLGFNITKEGRGLTDTFKTKLLNITPPKDLKQLQSILGLLNFARNFIPNFAELVQPLYNLIAPAKGKYIEWSEENTKQLNMVIEALNTASNLEERLPEQRLVIKVNTSPSAGYVRYYNETGKKPIMYLNYVFSKAELKFSMLEKLLTTMHKALIKAMDLAMGQEILVYSPIVSMTKIQKTPLPERKALPIRWITWMTYLEDPRIQFHYDKTLPELKHIPDVYTSSQSPVKHPSQYEGVFYTDGSAIKSPDPTKSNNAGMGIVHATYKPEYQVLNQWSIPLGNHTAQMAEIAAVEFACKKALKIPGPVLVITDSFYVAESANKELPYWKSNGFVNNKKKPLKHISKWKSIAECLSMKPDITIQHEKGISLQIPVFILKGNALADKLATQGSYVVN

SEQ ID NO: 8023 - protein, 751 aa, synthetic construct
MNPLQLLQPLPAEIKGTKLLAHWNSGATITCIPESFLEDEQPIKKTLIKTIHGEKQQNVYYVTFKVKGRKVEAEVIASPYEYILLSPTDVPWLTQQPLQLTILVPLQEYQEKILSKTALPEDQKQQLKTLFVKYDNLWQHWENQVGHRKIRPHNIATGDYPPRPQKQYPINPKAKPSIQIVIDDLLKQGVLTPQNSTMNTPVYPVPKPDGRWRMVLDYREVNKTIPLTAAQNQHSAGILATIVRQKYKTTLDLANGFWAHPITPESYWLTAFTWQGKQYCWTRLPQGFLNSPALFNADVVDLLKEIPNVQVYVDDIYLSHDDPKEHVQQLEKVFQILLQAGYVVSLKKSEIGQKTVEFLGFNITKEGRGLTDTFKTKLLNITPPKDLKQLQSILGKLNFARNFIPNFAELVQPLYNLIAPAKGKYIEWSEENTKQLNMVIEALNTASNLEERLPEQRLVIKVNTSPSAGYVRYYNETGKKPIMYLNYVFSKAELKFSMLEKLLTTMHKALIKAMDLAMGQEILVYSPIVSMTKIQKTPLPERKALPIRWITWMTYLEDPRIQFHYDKTLPELKHIPDVYTSSQSPVKHPSQYEGVFYTDGSAIKSPDPTKSNNAGMGIVHATYKPEYQVLNQWSIPLGNHTAQMAEIAAVEFACKKALKIPGPVLVITDSFYVAESANKELPYWKSNGFVNNKKKPLKHISKWKSIAECLSMKPDITIQHEKGISLQIPVFILKGNALADKLATQGSYVVN

SEQ ID NO: 8024 - protein, 662 aa, unidentified
VPWLTQQPLQLTILVPLQEYQEKILSKTALPEDQKQQLKTLFVKYDNLWQHWENQVGHRKIRPHNIATGDYPPRPQKQYPINPKAKPSIQIVIDDLLKQGVLTPQNSTMNTPVYPVPKPDGRWRMVLDYREVNKTIPLTAAQNQHSAGILATIVRQKYKTTLDLANGFWAHPITPESYWLTAFTWQGKQYCWTRLPQGFLNSPALFTADVVDLLKEIPNVQVYVDDIYLSHDDPKEHVQQLEKVFQILLQAGYVVSLKKSEIGQKTVEFLGFNITKEGRGLTDTFKTKLLNITPPKDLKQLQSILGLLNFARNFIPNFAELVQPLYNLIASAKGKYIEWSEENTKQLNMVIEALNTASNLEERLPEQRLVIKVNTSPSAGYVRYYNETGKKPIMYLNYVFSKAELKFSMLEKLLTTMHKALIKAMDLAMGQEILVYSPIVSMTKIQKTPLPERKALPIRWITWMTYLEDPRIQFHYDKTLPELKHIPDVYTSSQSPVKHPSQYEGVFYTDGSAIKSPDPTKSNNAGMGIVHATYKPEYQVLNQWSIPLGNHTAQMAEIAAVEFACKKALKIPGPVLVITDSFYVAESANKELPYWKSNGFVNNKKKPLKHISKWKSIAECLSMKPDITIQHEKGISLQIPVFILKGNALADKLATQGSYVVN

SEQ ID NO: 8025 - protein, 662 aa, synthetic construct
VPWLTQQPLQLTILVPLQEYQEKILSKTALPEDQKQQLKTLFVKYDNLWQHWENQVGHRKIRPHNIATGDYPPRPQKQYPINPKAKPSIQIVIDDLLKQGVLTPQNSTMNTPVYPVPKPDGRWRMVLDYREVNKTIPLTAAQNQHSAGILATIVRQKYKTTLDLANGFWAHPITPESYWLTAFTWQGKQYCWTRLPQGFLNSPALFNADVVDLLKEIPNVQVYVDDIYLSHDDPKEHVQQLEKVFQILLQAGYVVSLKKSEIGQKTVEFLGFNITKEGRGLTDTFKTKLLNITPPKDLKQLQSILGLLNFARNFIPNFAELVQPLYNLIAPAKGKYIEWSEENTKQLNMVIEALNTASNLEERLPEQRLVIKVNTSPSAGYVRYYNETGKKPIMYLNYVFSKAELKFSMLEKLLTTMHKALIKAMDLAMGQEILVYSPIVSMTKIQKTPLPERKALPIRWITWMTYLEDPRIQFHYDKTLPELKHIPDVYTSSQSPVKHPSQYEGVFYTDGSAIKSPDPTKSNNAGMGIVHATYKPEYQVLNQWSIPLGNHTAQMAEIAAVEFACKKALKIPGPVLVITDSFYVAESANKELPYWKSNGFVNNKKKPLKHISKWKSIAECLSMKPDITIQHEKGISLQIPVFILKGNALADKLATQGSYVVN

SEQ ID NO: 8026 - protein, 662 aa, synthetic construct
VPWLTQQPLQLTILVPLQEYQEKILSKTALPEDQKQQLKTLFVKYDNLWQHWENQVGHRKIRPHNIATGDYPPRPQKQYPINPKAKPSIQIVIDDLLKQGVLTPQNSTMNTPVYPVPKPDGRWRMVLDYREVNKTIPLTAAQNQHSAGILATIVRQKYKTTLDLANGFWAHPITPESYWLTAFTWQGKQYCWTRLPQGFLNSPALFNADVVDLLKEIPNVQVYVDDIYLSHDDPKEHVQQLEKVFQILLQAGYVVSLKKSEIGQKTVEFLGFNITKEGRGLTDTFKTKLLNITPPKDLKQLQSILGKLNFARNFIPNFAELVQPLYNLIAPAKGKYIEWSEENTKQLNMVIEALNTASNLEERLPEQRLVIKVNTSPSAGYVRYYNETGKKPIMYLNYVFSKAELKFSMLEKLLTTMHKALIKAMDLAMGQEILVYSPIVSMTKIQKTPLPERKALPIRWITWMTYLEDPRIQFHYDKTLPELKHIPDVYTSSQSPVKHPSQYEGVFYTDGSAIKSPDPTKSNNAGMGIVHATYKPEYQVLNQWSIPLGNHTAQMAEIAAVEFACKKALKIPGPVLVITDSFYVAESANKELPYWKSNGFVNNKKKPLKHISKWKSIAECLSMKPDITIQHEKGISLQIPVFILKGNALADKLATQGSYVVN

SEQ ID NO: 8027 - protein, 669 aa, Gibbon ape leukemia virus
VLNLEEEYRLHEKPVPSSIDPSWLQLFPTVWAERAGMGLANQVPPVVVELRSGASPVAVRQYPMSKEAREGIRPHIQKFLDLGVLVPCRSPWNTPLLPVKKPGTNDYRPVQDLREINKRVQDIHPTVPNPYNLLSSLPPSYTWYSVLDLKDAFFCLRLHPNSQPLFAFEWKDPEKGNTGQLTWTRLPQGFKNSPTLFDEALHRDLAPFRALNPQVVLLQYVDDLLVAAPTYEDCKKGTQKLLQELSKLGYRVSAKKAQLCQREVTYLGYLLKEGKRWLTPARKATVMKIPVPTTPRQVREFLGTAGFCRLWIPGFASLAAPLYPLTKESIPFIWTEEHQQAFDHIKKALLSAPALALPDLTKPFTLYIDERAGVARGVLTQTLGPWRRPVAYLSKKLDPVASGWPTCLKAVAAVALLLKDADKLTLGQNVTVIASHSLESIVRQPPDRWMTNARMTHYQSLLLNERVSFAPPAVLNPATLLPVESEATPVHRCSEILAEETGTRRDLEDQPLPGVPTWYTDGSSFITEGKRRAGAPIVDGKRTVWASSLPEGTSAQKAELVALTQALRLAEGKNINIYTDSRYAFATAHIHGAIYKQRGLLTSAGKDIKNKEEILALLEAIHLPRRVAIIHCPGHQRGSNPVATGNRRADEAAKQAALSTRVLAGTTKP

SEQ ID NO: 8028 - protein, 669 aa, synthetic construct
VLNLEEEYRLHEKPVPSSIDPSWLQLFPTVWAERAGMGLANQVPPVVVELRSGASPVAVRQYPMSKEAREGIRPHIQKFLDLGVLVPCRSPWNTPLLPVKKPGTNDYRPVQDLREINKRVQDIHPTVPNPYNLLSSLPPSYTWYSVLDLKDAFFCLRLHPNSQPLFAFEWKDPEKGNTGQLTWTRLPQGFKNSPTLFNEALHRDLAPFRALNPQVVLLQYVDDLLVAAPTYEDCKKGTQKLLQELSKLGYRVSAKKAQLCQREVTYLGYLLKEGKRWLTPARKATVMKIPVPTTPRQVREFLGTAGFCRLWIPGFASLAAPLYPLTKPSIPFIWTEEHQQAFDHIKKALLSAPALALPDLTKPFTLYIDERAGVARGVLTQTLGPWRRPVAYLSKKLDPVASGWPTCLKAVAAVALLLKDADKLTLGQNVTVIASHSLESIVRQPPDRWMTNARMTHYQSLLLNERVSFAPPAVLNPATLLPVESEATPVHRCSEILAEETGTRRDLEDQPLPGVPTWYTDGSSFITEGKRRAGAPIVDGKRTVWASSLPEGTSAQKAELVALTQALRLAEGKNINIYTDSRYAFATAHIHGAIYKQRGWLTSAGKDIKNKEEILALLEAIHLPRRVAIIHCPGHQRGSNPVATGNRRADEAAKQAALSTRVLAGTTKP

SEQ ID NO: 8029 - protein, 669 aa, synthetic construct
VLNLEEEYRLHEKPVPSSIDPSWLQLFPTVWAERAGMGLANQVPPVVVELRSGASPVAVRQYPMSKEAREGIRPHIQKFLDLGVLVPCRSPWNTPLLPVKKPGTNDYRPVQDLREINKRVQDIHPTVPNPYNLLSSLPPSYTWYSVLDLKDAFFCLRLHPNSQPLFAFEWKDPEKGNTGQLTWTRLPQGFKNSPTLFNEALHRDLAPFRALNPQVVLLQYVDDLLVAAPTYEDCKKGTQKLLQELSKLGYRVSAKKAQLCQREVTYLGYLLKEGKRWLTPARKATVMKIPVPTTPRQVREFLGKAGFCRLFIPGFASLAAPLYPLTKPSIPFIWTEEHQQAFDHIKKALLSAPALALPDLTKPFTLYIDERAGVARGVLTQTLGPWRRPVAYLSKKLDPVASGWPTCLKAVAAVALLLKDADKLTLGQNVTVIASHSLESIVRQPPDRWMTNARMTHYQSLLLNERVSFAPPAVLNPATLLPVESEATPVHRCSEILAEETGTRRDLEDQPLPGVPTWYTDGSSFITEGKRRAGAPIVDGKRTVWASSLPEGTSAQKAELVALTQALRLAEGKNINIYTDSRYAFATAHIHGAIYKQRGWLTSAGKDIKNKEEILALLEAIHLPRRVAIIHCPGHQRGSNPVATGNRRADEAAKQAALSTRVLAGTTKP

SEQ ID NO: 8030 - protein, 588 aa, unidentified
AVLGLEHLPRPPQISQFPLNPERLQALQHLVRKALEAGHIEPYTGPGNNPVFPVKKANGTWRFIHDLRATNSLTIDLSSSSPGPPDLSSLPTTLAHLQTIDLRDAFFQIPLPKQFQPYFAFTVPQQCNYGPGTRYAWKVLPQGFKNSPTLFEMQLAHILQPIRQAFPQCTILQYMDDILLASPSHEDLLLLSEATMASLISHGLPVSENKTQQTPGTIKFLGQIISPNHLTYDAVPTVPIRSRWALPELQALLGEIQWVSKGTPTLRQPLHSLYCALQRHTDPRDQIYLNPSQVQSLVQLRQALSQNCRSRLVQTLPLLGAIMLTLTGTTTVVFQSKEQWPLVWLHAPLPHTSQCPWGQLLASAVLLLDKYTLQSYGLLCQTIHHNISTQTFNQFIQTSDHPSVPILLHHSHRFKNLGAQTGELWNTFLKTAAPLAPVKALMPVFTLSPVIINTAPCLFSDGSTSRAAYILWDKQILSQRSFPLPPPHKSAQRAELLGLLHGLSSARSWRCLNIFLDSKYLYHYLRTLALGTFQGRSSQAPFQALLPRLLSRKVVYLHHVRSHTNLPDPISRLNALTDALLITPVLQL

SEQ ID NO: 8031 - protein, 588 aa, synthetic construct
AVLGLEHLPRPPQISQFPLNPERLQALQHLVRKALEAGHIEPYTGPGNNPVFPVKKANGTWRFIHDLRATNSLTIDLSSSSPGPPDLSSLPTTLAHLQTIDLRDAFFQIPLPKQFQPYFAFTVPQQCNYGPGTRYAWKVLPQGFKNSPTLFQMQLAHILQPIRQAFPQCTILQYMDDILLASPSHEDLLLLSEATMASLISHGLPVSENKTQQTPGTIKFLGQIISPNHLTYDAVPTVPIRSRWALPELQALLGEIQWVSKGTPTLRQPLHSLYCALQPHTDPRDQIYLNPSQVQSLVQLRQALSQNCRSRLVQTLPLLGAIMLTLTGTTTVVFQSKEQWPLVWLHAPLPHTSQCPWGQLLASAVLLLDKYTLQSYGLLCQTIHHNISTQTFNQFIQTSDHPSVPILLHHSHRFKNLGAQTGELWNTFLKTAAPLAPVKALMPVFTLSPVIINTAPCLFSDGSTSRAAYILWDKQILSQRSFPLPPPHKSAQRAELLGLLHGLSSARSWRCLNIFLDSKYLYHYLRTLALGTFQGRSSQAPFQALLPRLLSRKVVYLHHVRSHTNLPDPISRLNALTDALLITPVLQL

SEQ ID NO: 8032 - protein, 588 aa, synthetic construct
AVLGLEHLPRPPQISQFPLNPERLQALQHLVRKALEAGHIEPYTGPGNNPVFPVKKANGTWRFIHDLRATNSLTIDLSSSSPGPPDLSSPPTTLAHLQTIDLRDAFFQIPLPKQFQPYFAFTVPQQCNYGPGTRYAWKVLPQGFKNSPTLFQMQLAHILQPIRQAFPQCTILQYMDDILLASPSHEDLLLLSEATMASLISHGLPVSENKTQQTPGTIKFLGQIISPNHLTYDAVPTVPIRSRWALPELQALLGEIQWVSKGTPTLRQPLHSLYCALQPHTDPRDQIYLNPSQVQSLVQLRQALSQNCRSRLVQTLPLLGAIMLTLTGTTTVVFQSKEQWPLVWLHAPLPHTSQCPWGQLLASAVLLLDKYTLQSYGLLCQTIHHNISTQTFNQFIQTSDHPSVPILLHHSHRFKNLGAQTGELWNTFLKTAAPLAPVKALMPVFTLSPVIINTAPCLFSDGSTSRAAYILWDKQILSQRSFPLPPPHKSAQRAELLGLLHGLSSARSWRCLNIFLDSKYLYHYLRTLALGTFQGRSSQAPFQALLPRLLSRKVVYLHHVRSHTNLPDPISRLNALTDALLITPVLQL

SEQ ID NO: 8033 - protein, 588 aa, unidentified
AVLGLEHLPRPPEISQFPLNPERLQALQHLVRKALEAGHIEPYTGPGNNPVFPVKKANGTWRFIHDLRATNSLTIDLSSSSPGPPDLSSLPTTLAHLQTIDLKDAFFQIPLPKQFQPYFAFTVPQQCNYGPGTRYAWRVLPQGFKNSPTLFEMQLAHILQPIRQAFPQCTILQYMDDILLASPSHADLQLLSEATMASLISHGLPVSENKTQQTPGTIKFLGQIISPNHLTYDAVPKVPIRSRWALPELQALLGEIQWVSKGTPTLRQPLHSLYCALQRHTDPRDQIYLNPSQVQSLVQLRQALSQNCRSRLVQTLPLLGAIMLTLTGTTTVVFQSKQQWPLVWLHAPLPHTSQCPWGQLLASAVLLLDKYTLQSYGLLCQTIHHNISTQTFNQFIQTSDHPSVPILLHHSHRFKNLGAQTGELWNTFLKTTAPLAPVKALMPVFTLSPVIINTAPCLFSDGSTSQAAYILWDKHILSQRSFPLPPPHKSAQRAELLGLLHGLSSARSWRCLNIFLDSKYLYHYLRTLALGTFQGRSSQAPFQALLPRLLSRKVVYLHHVRSHTNLPDPISRLNALTDALLITPVLQL

SEQ ID NO: 8034 - protein, 588 aa, synthetic construct
AVLGLEHLPRPPEISQFPLNPERLQALQHLVRKALEAGHIEPYTGPGNNPVFPVKKANGTWRFIHDLRATNSLTIDLSSSSPGPPDLSSLPTTLAHLQTIDLKDAFFQIPLPKQFQPYFAFTVPQQCNYGPGTRYAWRVLPQGFKNSPTLFQMQLAHILQPIRQAFPQCTILQYMDDILLASPSHADLQLLSEATMASLISHGLPVSENKTQQTPGTIKFLGQIISPNHLTYDAVPKVPIRSRWALPELQALLGEIQWVSKGTPTLRQPLHSLYCALQPHTDPRDQIYLNPSQVQSLVQLRQALSQNCRSRLVQTLPLLGAIMLTLTGTTTVVFQSKQQWPLVWLHAPLPHTSQCPWGQLLASAVLLLDKYTLQSYGLLCQTIHHNISTQTFNQFIQTSDHPSVPILLHHSHRFKNLGAQTGELWNTFLKTTAPLAPVKALMPVFTLSPVIINTAPCLFSDGSTSQAAYILWDKHILSQRSFPLPPPHKSAQRAELLGLLHGLSSARSWRCLNIFLDSKYLYHYLRTLALGTFQGRSSQAPFQALLPRLLSRKVVYLHHVRSHTNLPDPISRLNALTDALLITPVLQL

SEQ ID NO: 8035 - protein, 583 aa, unidentified
GLEHLPRPPEISQFPLNPERLQALQHLVRKALEAGHIEPYTGPGNNPVFPVKKANGTWRFIHDLRATNSLTVDLSSSSPGPPDLSSLPTTLAHLQTIDLKDAFFQIPLPKQFQPYFAFTVPQQCNYGPGTRYAWKVLPQGFKNSPTLFEMQLASILQPIRQAFPQCVILQYMDDILLASPSPEDLQQLSEATMASLISHGLPVSQDKTQQTPGTIKFLGQIISPNHITYDAVPTVPIRSRWALPELQALLGEIQWVSKGTPTLRQPLHSLYCALQGHTDPRDQIYLNPSQVQSLMQLQQALSQNCRSRLAQTLPLLGAIMLTLTGTTTVVFQSKQQWPLVWLHAPLPHTSQCPWGQLLASAVLLLDKYTLQSYGLLCQTIHHNISIQTFNQFIQTSDHPSVPILLHHSHRFKNLGAQTGELWNTFLKTAAPLAPVKALTPVFTLSPIIINTAPCLFSDGSTSQAAYILWDKHILSQRSFPLPPPHKSAQQAELLGLLHGLSSARSWHCLNIFLDSKYLYHYLRTLALGTFQGKSSQAPFQALLPRLLAHKVIYLHHVRSHTNLPDPISKLNALTDALLITPIL

SEQ ID NO: 8036 - protein, 583 aa, synthetic construct
GLEHLPRPPEISQFPLNPERLQALQHLVRKALEAGHIEPYTGPGNNPVFPVKKANGTWRFIHDLRATNSLTVDLSSSSPGPPDLSSLPTTLAHLQTIDLKDAFFQIPLPKQFQPYFAFTVPQQCNYGPGTRYAWKVLPQGFKNSPTLFQMQLASILQPIRQAFPQCVILQYMDDILLASPSPEDLQQLSEATMASLISHGLPVSQDKTQQTPGTIKFLGQIISPNHITYDAVPTVPIRSRWALPELQALLGEIQWVSKGTPTLRQPLHSLYCALQGHTDPRDQIYLNPSQVQSLMQLQQALSQNCRSRLAQTLPLLGAIMLTLTGTTTVVFQSKQQWPLVWLHAPLPHTSQCPWGQLLASAVLLLDKYTLQSYGLLCQTIHHNISIQTFNQFIQTSDHPSVPILLHHSHRFKNLGAQTGELWNTFLKTAAPLAPVKALTPVFTLSPIIINTAPCLFSDGSTSQAAYILWDKHILSQRSFPLPPPHKSAQQAELLGLLHGLSSARSWHCLNIFLDSKYLYHYLRTLAWGTFQGKSSQAPFQALLPRLLAHKVIYLHHVRSHTNLPDPISKLNALTDALLITPIL

SEQ ID NO: 8037 - protein, 583 aa, synthetic construct
GLEHLPRPPEISQFPLNPERLQALQHLVRKALEAGHIEPYTGPGNNPVFPVKKANGTWRFIHDLRATNSLTVDLSSSSPGPPDLSSPPTTLAHLQTIDLKDAFFQIPLPKQFQPYFAFTVPQQCNYGPGTRYAWKVLPQGFKNSPTLFQMQLASILQPIRQAFPQCVILQYMDDILLASPSPEDLQQLSEATMASLISHGLPVSQDKTQQTPGTIKFLGQIISPNHITYDAVPTVPIRSRWALPELQALLGEIQWVSKGTPTLRQPLHSLYCALQGHTDPRDQIYLNPSQVQSLMQLQQALSQNCRSRLAQTLPLLGAIMLTLTGTTTVVFQSKQQWPLVWLHAPLPHTSQCPWGQLLASAVLLLDKYTLQSYGLLCQTIHHNISIQTFNQFIQTSDHPSVPILLHHSHRFKNLGAQTGELWNTFLKTAAPLAPVKALTPVFTLSPIIINTAPCLFSDGSTSQAAYILWDKHILSQRSFPLPPPHKSAQQAELLGLLHGLSSARSWHCLNIFLDSKYLYHYLRTLAWGTFQGKSSQAPFQALLPRLLAHKVIYLHHVRSHTNLPDPISKLNALTDALLITPIL

SEQ ID NO: 8038 - protein, 584 aa, unidentified
GLEHLPPPPEVSQFPLNPERLQALTDLVSRALEAKHIEPYQGPGNNPIFPVKKPNGKWRFIHDLRATNSVTRDLASPSPGPPDLTSLPQGLPHLRTIDLTDAFFQIPLPTIFQPYFAFTLPQPNNYGPGTRYSWRVLPQGFKNSPTLFEQQLSHILTPVRKTFPNSLIIQYMDDILLASPAPGELAALTDKVTNALTKEGLPLSPEKTQATPGPIHFLGQVISQDCITYETLPSINVKSTWSLAELQSMLGELQWVSKGTPVLRSSLHQLYLALRGHRDPRDTIKLTSIQVQALRTIQKALTLNCRSRLVNQLPILALIMLRPTGTTAVLFQTKQKWPLVWLHTPHPATSLRPWGQLLANAVIILDKYSLQHYGQVCKSFHHNISNQALTYYLHTSDQSSVAILLQHSHRFHNLGAQPSGPWRSLLQMPQIFQNIDVLRPPFTISPVVINHAPCLFSDGSASKAAFIIWDRQVIHQQVLSLPSTCSAQAGELFGLLAGLQKSQPWVALNIFLDSKFLIGHLRRMALGAFPGPSTQCELHTQLLPLLQGKTVYVHHVRSHTLLQDPISRLNEATDALMLAPLLPL

SEQ ID NO: 8039 - protein, 584 aa, synthetic construct
GLEHLPPPPEVSQFPLNPERLQALTDLVSRALEAKHIEPYQGPGNNPIFPVKKPNGKWRFIHDLRATNSVTRDLASPSPGPPDLTSLPQGLPHLRTIDLTDAFFQIPLPTIFQPYFAFTLPQPNNYGPGTRYSWRVLPQGFKNSPTLFQQQLSHILTPVRKTFPNSLIIQYMDDILLASPAPGELAALTDKVTNALTKEGLPLSPEKTQATPGPIHFLGQVISQDCITYETLPSINVKSTWSLAELQSMLGELQWVSKGTPVLRSSLHQLYLALRGHRDPRDTIKLTSIQVQALRTIQKALTLNCRSRLVNQLPILALIMLRPTGTTAVLFQTKQKWPLVWLHTPHPATSLRPWGQLLANAVIILDKYSLQHYGQVCKSFHHNISNQALTYYLHTSDQSSVAILLQHSHRFHNLGAQPSGPWRSLLQMPQIFQNIDVLRPPFTISPVVINHAPCLFSDGSASKAAFIIWDRQVIHQQVLSLPSTCSAQAGELFGLLAGLQKSQPWVALNIFLDSKFLIGHLRRMAWGAFPGPSTQCELHTQLLPLLQGKTVYVHHVRSHTLLQDPISRLNEATDALMLAPLLPL

SEQ ID NO: 8040 - protein, 584 aa, synthetic construct
GLEHLPPPPEVSQFPLNPERLQALTDLVSRALEAKHIEPYQGPGNNPIFPVKKPNGKWRFIHDLRATNSVTRDLASPSPGPPDLTSPPQGLPHLRTIDLTDAFFQIPLPTIFQPYFAFTLPQPNNYGPGTRYSWRVLPQGFKNSPTLFQQQLSHILTPVRKTFPNSLIIQYMDDILLASPAPGELAALTDKVTNALTKEGLPLSPEKTQATPGPIHFLGQVISQDCITYETLPSINVKSTWSLAELQSMLGELQWVSKGTPVLRSSLHQLYLALRGHRDPRDTIKLTSIQVQALRTIQKALTLNCRSRLVNQLPILALIMLRPTGTTAVLFQTKQKWPLVWLHTPHPATSLRPWGQLLANAVIILDKYSLQHYGQVCKSFHHNISNQALTYYLHTSDQSSVAILLQHSHRFHNLGAQPSGPWRSLLQMPQIFQNIDVLRPPFTISPVVINHAPCLFSDGSASKAAFIIWDRQVIHQQVLSLPSTCSAQAGELFGLLAGLQKSQPWVALNIFLDSKFLIGHLRRMAWGAFPGPSTQCELHTQLLPLLQGKTVYVHHVRSHTLLQDPISRLNEATDALMLAPLLPL

SEQ ID NO: 8041 - protein, 584 aa, unidentified
GLEHLPPPPEVSQFPLNPERLQALTDLVSRALEAKHIEPYQGPGNNPIFPVKKPNGKWRFIHDLRATNSLTRDLASPSPGPPDLTSLPQDLPHLRTIDLTDAFFQIPLPAVFQPYFAFTLPQPNNHGPGTRYSWRVLPQGFKNSPTLFEQQLSHILAPVRKAFPNSLIIQYMDDILLASPALRELTALTDKVTNALTKEGLPMSLEKTQATPGSIHFLGQVISPDCITYETLPSIHVKSIWSLAELQSMLGELQWVSKGTPVLRSSLHQLYLALRGHRDPRDTIELTSTQVQALKTIQKALALNCRSRLVSQLPILALIILRPTGTTAVLFQTKQKWPLVWLHTPHPATSLRPWGQLLANAIITLDKYSLQHYGQICKSFHHNISNQALTYYLHTSDQSSVAILLQHSHRFHNLGAQPSGPWRSLLQVPQIFQNIDVLRPPFIISPVVIDHAPCLFSDGATSKAAFILWDKQVIHQQVLPLPSTCSAQAGELFGLLAGLQKSKPWPALNIFLDSKFLIGHLRRMALGAFLGPSTQCDLHARLFPLLQGKTVYVHHVRSHTLLQDPISRLNEATDALMLAPLLPL

SEQ ID NO: 8042 - protein, 584 aa, synthetic construct
GLEHLPPPPEVSQFPLNPERLQALTDLVSRALEAKHIEPYQGPGNNPIFPVKKPNGKWRFIHDLRATNSLTRDLASPSPGPPDLTSLPQDLPHLRTIDLTDAFFQIPLPAVFQPYFAFTLPQPNNHGPGTRYSWRVLPQGFKNSPTLFQQQLSHILAPVRKAFPNSLIIQYMDDILLASPALRELTALTDKVTNALTKEGLPMSLEKTQATPGSIHFLGQVISPDCITYETLPSIHVKSIWSLAELQSMLGELQWVSKGTPVLRSSLHQLYLALRGHRDPRDTIELTSTQVQALKTIQKALALNCRSRLVSQLPILALIILRPTGTTAVLFQTKQKWPLVWLHTPHPATSLRPWGQLLANAIITLDKYSLQHYGQICKSFHHNISNQALTYYLHTSDQSSVAILLQHSHRFHNLGAQPSGPWRSLLQVPQIFQNIDVLRPPFIISPVVIDHAPCLFSDGATSKAAFILWDKQVIHQQVLPLPSTCSAQAGELFGLLAGLQKSKPWPALNIFLDSKFLIGHLRRMAWGAFLGPSTQCDLHARLFPLLQGKTVYVHHVRSHTLLQDPISRLNEATDALMLAPLLPL

SEQ ID NO: 8043 - protein, 584 aa, synthetic construct
GLEHLPPPPEVSQFPLNPERLQALTDLVSRALEAKHIEPYQGPGNNPIFPVKKPNGKWRFIHDLRATNSLTRDLASPSPGPPDLTSPPQDLPHLRTIDLTDAFFQIPLPAVFQPYFAFTLPQPNNHGPGTRYSWRVLPQGFKNSPTLFQQQLSHILAPVRKAFPNSLIIQYMDDILLASPALRELTALTDKVTNALTKEGLPMSLEKTQATPGSIHFLGQVISPDCITYETLPSIHVKSIWSLAELQSMLGELQWVSKGTPVLRSSLHQLYLALRGHRDPRDTIELTSTQVQALKTIQKALALNCRSRLVSQLPILALIILRPTGTTAVLFQTKQKWPLVWLHTPHPATSLRPWGQLLANAIITLDKYSLQHYGQICKSFHHNISNQALTYYLHTSDQSSVAILLQHSHRFHNLGAQPSGPWRSLLQVPQIFQNIDVLRPPFIISPVVIDHAPCLFSDGATSKAAFILWDKQVIHQQVLPLPSTCSAQAGELFGLLAGLQKSKPWPALNIFLDSKFLIGHLRRMAWGAFLGPSTQCDLHARLFPLLQGKTVYVHHVRSHTLLQDPISRLNEATDALMLAPLLPL

SEQ ID NO: 8044 - protein, 584 aa, synthetic construct
HLPPPPQVDQFPLNLPERLQALNDLVSKALEAGHIEPYSGPGNNPVFPVKKPNGKWRFIHDLRATNAITTTLTSPSPGPPDLTSLPTALPHLQTIDLTDAFFQIPLPKQYQPYFAFTIPQPCNYGPGTRYAWTVLPQGFKNSPTLFQQQLAAVLNPMRKMFPTSTIVQYMDDILLASPTNEELQQLSQLTLQALTTHGLPISQEKTQQTPGQIRFLGQVISPNHITYESTPTIPIKSQWTLTELQVILGEIQWVSKGTPILRKHLQSLYSALHPYRDPRACITLTPQQLHALHAIQQALQHNCRGRLNPALPLLGLISLSTSGTTSVIFQPKQNWPLAWLHTPHPPTSLCPWGHLLACTILTLDKYTLQHYGQLCQSFHHNMSKQALCDFLRNSPHPSVGILIHHMGRFHNLGSQPSGPWKTLLHLPTLLQEPRLLRPIFTLSPVVLDTAPCLFSDGSPQKAAYVLWDQTILQQDITPLPSHETHSAQKGELLALICGLRAAKPWPSLNIFLDSKYLIKYLHSLAIGAFLGTSAHQTLQAALPPLLQGKTIYLHHVRSHTNLPDPISTFNEYTDSLILAPLVPL

SEQ ID NO: 8045 - protein, 581 aa, Jaagsiekte sheep retrovirus
PLGTSDSPVTHADPIDWKSEEPVWVDQWPLTQEKLSAAQQLVQEQLRLGHIEPSTSAWNSPIFVIKKKSGKWRLLQDLRKVNETMMHMGALQPGLPTPSAIPDKSYIIVIDLKDCFYTIPLAPQDCKRFAFSLPSVNFKEPMQRYQWRVLPQGMTNSPTLCQKFVATAIAPVRQRFPQLYLVHYMDDILLAHTDEHLLYQAFSILKQHLSLNGLVIADEKIQTHFPYNYLGFSLYPRVYNTQLVKLQTDHLKTLNDFQKLLGDINWIRPYLKLPTYTLQPLFDILKGDSDPASPRTLSLEGRTALQSIEEAIRQQQITYCDYQRSWGLYILPTPRAPTGVLYQDKPLRWIYLSATPTKHLLPYYELVAKIIAKGRHEAIQYFGMEPPFICVPYALEQQDWLFQFSDNWSIAFANYPGQITHHYPSDKLLQFASSHAFIFPKIVRRQPIPEATLIFTDGSSNGTAALIINHQTYYAQTSFSSAQVVELFAVHQALLTVPTSFNLFTDSSYVVGALQMIETVPIIGTTSPEVLNLFTLIQQVLHCRQHPCFFGHIRAHSTLPGALVQGNHTADVLTKQVFFQS

SEQ ID NO: 8046 - protein, 581 aa, synthetic construct
PLGTSDSPVTHADPIDWKSEEPVWVDQWPLTQEKLSAAQQLVQEQLRLGHIEPSTSAWNSPIFVIKKKSGKWRLLQDLRKVNETMMHMGALQPGLPTPSPIPDKSYIIVIDLKDCFYTIPLAPQDCKRFAFSLPSVNFKEPMQRYQWRVLPQGMTNSPTLCQKFVATAIAPVRQRFPQLYLVHYMDDILLAHTDEHLLYQAFSILKQHLSLNGLVIADEKIQTHFPYNYLGFSLYPRVYNTQLVKLQTDHLKTLNDFQKLLGDINWIRPYLKLPTYTLQPLFDILKGDSDPASPRTLSLEGRTALQSIEEAIRQQQITYCDYQRSWGLYILPTPRAPTGVLYQDKPLRWIYLSATPTKHLLPYYELVAKIIAKGRHEAIQYFGMEPPFICVPYALEQQDWLFQFSDNWSIAFANYPGQITHHYPSDKLLQFASSHAFIFPKIVRRQPIPEATLIFTDGSSNGTAALIINHQTYYAQTSFSSAQVVELFAVHQALLTVPTSFNLFTDSSYVVGALQMIETVPIIGTTSPEVLNLFTLIQQVLHCRQHPCFFGHIRAHSTLPGALVQGNHTADVLTKQVFFQS

SEQ ID NO: 8047 - protein, 793 aa, Koala retrovirus
TLGDQGSRGSDPLPEPRVTLTVEGIPTEFLVNTGAEHSVLTKPMGKMGSKRTVVAGATGSKVYPWTTKRLLKIGQKQVTHSFLVIPECPAPLLGRDLLTKLKAQIQFSTEGPQVTWEDRPAMCLVLNLEEEYRLHEKPVPPSIDPSWLQLFPMVWAEKAGMGLANQVPPVVVELKSDASPVAVRQYPMSKEAREGIRPHIQRFLDLGILVPCQSPWNTPLLPVKKPGTNDYRPVQDLREVNKRVQDIHPTVPNPYNLLSSLPPSHTWYSVLDLKDAFFCLKLHPNSQPLFAFEWRDPEKGNTGQLTWTRLPQGFKNSPTLFDEALHRDLASFRALNPQVVMLQYVDDLLVAAPTYRDCKEGTRRLLQELSKLGYRVSAKKAQLCREEVTYLGYLLKGGKRWLTPARKATVMKIPTPTTPRQVREFLGTAGFCRLWIPGFASLAAPLYPLTREKVPFTWTEAHQEAFGRIKEALLSAPALALPDLTKPFALYVDEKEGVARGVLTQTLGPWRRPVAYLSKKLDPVASGWPTCLKAIAAVALLLKDADKLTLGQNVLVIAPHNLESIVRQPPDRWMTNARMTHYQSLLLNERVSFAPPAILNPATLLPVESDDTPIHICSEILAEETGTRPDLRDQPLPGVPAWYTDGSSFIMDGRRQAGAAIVDNKRTVWASNLPEGTSAQKAELIALTQALRLAEGKSINIYTDSRYAFATAHVHGAIYKQRGLLTSAGKDIKNKEEILALLEAIHLPKRVAIIHCPGHQRGTDPVATGNRKADEAAKQAAQSTRILTETTKN

SEQ ID NO: 8048 - protein, 793 aa, synthetic construct
TLGDQGSRGSDPLPEPRVTLTVEGIPTEFLVNTGAEHSVLTKPMGKMGSKRTVVAGATGSKVYPWTTKRLLKIGQKQVTHSFLVIPECPAPLLGRDLLTKLKAQIQFSTEGPQVTWEDRPAMCLVLNLEEEYRLHEKPVPPSIDPSWLQLFPMVWAEKAGMGLANQVPPVVVELKSDASPVAVRQYPMSKEAREGIRPHIQRFLDLGILVPCQSPWNTPLLPVKKPGTNDYRPVQDLREVNKRVQDIHPTVPNPYNLLSSLPPSHTWYSVLDLKDAFFCLKLHPNSQPLFAFEWRDPEKGNTGQLTWTRLPQGFKNSPTLFNEALHRDLASFRALNPQVVMLQYVDDLLVAAPTYRDCKEGTRRLLQELSKLGYRVSAKKAQLCREEVTYLGYLLKGGKRWLTPARKATVMKIPTPTTPRQVREFLGTAGFCRLWIPGFASLAAPLYPLTRPKVPFTWTEAHQEAFGRIKEALLSAPALALPDLTKPFALYVDEKEGVARGVLTQTLGPWRRPVAYLSKKLDPVASGWPTCLKAIAAVALLLKDADKLTLGQNVLVIAPHNLESIVRQPPDRWMTNARMTHYQSLLLNERVSFAPPAILNPATLLPVESDDTPIHICSEILAEETGTRPDLRDQPLPGVPAWYTDGSSFIMDGRRQAGAAIVDNKRTVWASNLPEGTSAQKAELIALTQALRLAEGKSINIYTDSRYAFATAHVHGAIYKQRGWLTSAGKDIKNKEEILALLEAIHLPKRVAIIHCPGHQRGTDPVATGNRKADEAAKQAAQSTRILTETTKN

SEQ ID NO: 8049 - protein, 793 aa, synthetic construct
TLGDQGSRGSDPLPEPRVTLTVEGIPTEFLVNTGAEHSVLTKPMGKMGSKRTVVAGATGSKVYPWTTKRLLKIGQKQVTHSFLVIPECPAPLLGRDLLTKLKAQIQFSTEGPQVTWEDRPAMCLVLNLEEEYRLHEKPVPPSIDPSWLQLFPMVWAEKAGMGLANQVPPVVVELKSDASPVAVRQYPMSKEAREGIRPHIQRFLDLGILVPCQSPWNTPLLPVKKPGTNDYRPVQDLREVNKRVQDIHPTVPNPYNLLSSLPPSHTWYSVLDLKDAFFCLKLHPNSQPLFAFEWRDPEKGNTGQLTWTRLPQGFKNSPTLFNEALHRDLASFRALNPQVVMLQYVDDLLVAAPTYRDCKEGTRRLLQELSKLGYRVSAKKAQLCREEVTYLGYLLKGGKRWLTPARKATVMKIPTPTTPRQVREFLGKAGFCRLFIPGFASLAAPLYPLTRPKVPFTWTEAHQEAFGRIKEALLSAPALALPDLTKPFALYVDEKEGVARGVLTQTLGPWRRPVAYLSKKLDPVASGWPTCLKAIAAVALLLKDADKLTLGQNVLVIAPHNLESIVRQPPDRWMTNARMTHYQSLLLNERVSFAPPAILNPATLLPVESDDTPIHICSEILAEETGTRPDLRDQPLPGVPAWYTDGSSFIMDGRRQAGAAIVDNKRTVWASNLPEGTSAQKAELIALTQALRLAEGKSINIYTDSRYAFATAHVHGAIYKQRGWLTSAGKDIKNKEEILALLEAIHLPKRVAIIHCPGHQRGTDPVATGNRKADEAAKQAAQSTRILTETTKN

SEQ ID NO: 8050 - protein, 702 aa, Koala retrovirus
LLGRDLLTKLKAQIQFSTEGPQVTWEDRPAMCLVLNLEEEYRLHEKPVPPSIDPSWLQLFPMVWAEKAGMGLANQVPPVVVELKSDASPVAVRQYPMSKEAREGIRPHIQRFLDLGILVPCQSPWNTPLLPVKKPGTNDYRPVQDLREVNKRVQDIHPTVPNPYNLLSSLPPSHTWYSVLDLKDAFFCLKLHPNSQPLFAFEWRDPEKGNTGQLTWTRLPQGFKNSPTLFDEALHRDLASFRALNPQVVMLQYVDDLLVAAPTYRDCKEGTRRLLQELSKLGYRVSAKKAQLCREEVTYLGYLLKGGKRWLTPARKATVMKIPTPTTPRQVREFLGTAGFCRLWIPGFASLAAPLYPLTREKVPFTWTEAHQEAFGRIKEALLSAPALALPDLTKPFALYVDEKEGVARGVLTQTLGPWRRPVAYLSKKLDPVASGWPTCLKAIAAVALLLKDADKLTLGQNVLVIAPHNLESIVRQPPDRWMTNARMTHYQSLLLNERVSFAPPAILNPATLLPVESDDTPIHICSEILAEETGTRPDLRDQPLPGVPAWYTDGSSFIMDGRRQAGAAIVDNKRTVWASNLPEGTSAQKAELIALTQALRLAEGKSINIYTDSRYAFATAHVHGAIYKQRGLLTSAGKDIKNKEEILALLEAIHLPKRVAIIHCPGHQRGTDPVATGNRKADEAAKQAAQSTRILTETTKN

SEQ ID NO: 8051 - protein, 702 aa, synthetic construct
LLGRDLLTKLKAQIQFSTEGPQVTWEDRPAMCLVLNLEEEYRLHEKPVPPSIDPSWLQLFPMVWAEKAGMGLANQVPPVVVELKSDASPVAVRQYPMSKEAREGIRPHIQRFLDLGILVPCQSPWNTPLLPVKKPGTNDYRPVQDLREVNKRVQDIHPTVPNPYNLLSSLPPSHTWYSVLDLKDAFFCLKLHPNSQPLFAFEWRDPEKGNTGQLTWTRLPQGFKNSPTLFNEALHRDLASFRALNPQVVMLQYVDDLLVAAPTYRDCKEGTRRLLQELSKLGYRVSAKKAQLCREEVTYLGYLLKGGKRWLTPARKATVMKIPTPTTPRQVREFLGTAGFCRLWIPGFASLAAPLYPLTRPKVPFTWTEAHQEAFGRIKEALLSAPALALPDLTKPFALYVDEKEGVARGVLTQTLGPWRRPVAYLSKKLDPVASGWPTCLKAIAAVALLLKDADKLTLGQNVLVIAPHNLESIVRQPPDRWMTNARMTHYQSLLLNERVSFAPPAILNPATLLPVESDDTPIHICSEILAEETGTRPDLRDQPLPGVPAWYTDGSSFIMDGRRQAGAAIVDNKRTVWASNLPEGTSAQKAELIALTQALRLAEGKSINIYTDSRYAFATAHVHGAIYKQRGWLTSAGKDIKNKEEILALLEAIHLPKRVAIIHCPGHQRGTDPVATGNRKADEAAKQAAQSTRILTETTKN

SEQ ID NO: 8052 - protein, 702 aa, synthetic construct
LLGRDLLTKLKAQIQFSTEGPQVTWEDRPAMCLVLNLEEEYRLHEKPVPPSIDPSWLQLFPMVWAEKAGMGLANQVPPVVVELKSDASPVAVRQYPMSKEAREGIRPHIQRFLDLGILVPCQSPWNTPLLPVKKPGTNDYRPVQDLREVNKRVQDIHPTVPNPYNLLSSLPPSHTWYSVLDLKDAFFCLKLHPNSQPLFAFEWRDPEKGNTGQLTWTRLPQGFKNSPTLFNEALHRDLASFRALNPQVVMLQYVDDLLVAAPTYRDCKEGTRRLLQELSKLGYRVSAKKAQLCREEVTYLGYLLKGGKRWLTPARKATVMKIPTPTTPRQVREFLGKAGFCRLFIPGFASLAAPLYPLTRPKVPFTWTEAHQEAFGRIKEALLSAPALALPDLTKPFALYVDEKEGVARGVLTQTLGPWRRPVAYLSKKLDPVASGWPTCLKAIAAVALLLKDADKLTLGQNVLVIAPHNLESIVRQPPDRWMTNARMTHYQSLLLNERVSFAPPAILNPATLLPVESDDTPIHICSEILAEETGTRPDLRDQPLPGVPAWYTDGSSFIMDGRRQAGAAIVDNKRTVWASNLPEGTSAQKAELIALTQALRLAEGKSINIYTDSRYAFATAHVHGAIYKQRGWLTSAGKDIKNKEEILALLEAIHLPKRVAIIHCPGHQRGTDPVATGNRKADEAAKQAAQSTRILTETTKN

SEQ ID NO: 8053 - protein, 671 aa, unidentified
TLNLEDEYRLYETSAEPEVSPGSTWLSDFPQAWAETGGMGLAVRQAPLIIPLKATSTPVSIKQYPMSQEAKLGIKPHIQRLLDQGILVPCQSPWNTPLLPVKKPGTNDYRPVQDLREVNKRVEDIHPTVPNPYNLLSGLPPSHRWYTVLDLKDAFFCLRLHPTSQPLFAFEWRDPGMGISGQLTWTRLPQGFKNSPTLFDEALHRDLADFRIQHPDLILLQYVDDILLAATSELDCQQGTRALLLTLGNLGYRASAKKAQLCQKQVKYLGYLLKEGQRWLTEARKETVMGQPTPKTPRQLREFLGTAGFCRLWIPGFAEMAAPLYPLTKTGTLFNWGPDQQKAYQEIKQALLTAPALGLPDLTKPFELFVDEKQGYAKGVLTQKLGPWRRPVAYLSKKLDPVAAGWPPCLRMVAAIAVLRKDAGKLTMGQPLVILAPHAVEALVKQPPDRWLSNARMTHYQAMLLDTDRVQFGPVVALNPATLLPLPEEGAPHDCLEILAETHGTRPDLTDQPIPDADHTWYTDGSSFLQEGQRKAGAAVTTETEVIWARALPAGTSAQRAELIALTQALKMAEGKRLNVYTDSRYAFATAHIHGEIYRRRGLLTSEGREIKNKSEILALLKALFLPKRLSIIHCLGHQKGDSAEARGNRLADQAAREAAIKTPPDTSTLL

SEQ ID NO: 8054 - protein, 671 aa, synthetic construct
TLNLEDEYRLYETSAEPEVSPGSTWLSDFPQAWAETGGMGLAVRQAPLIIPLKATSTPVSIKQYPMSQEAKLGIKPHIQRLLDQGILVPCQSPWNTPLLPVKKPGTNDYRPVQDLREVNKRVEDIHPTVPNPYNLLSGLPPSHRWYTVLDLKDAFFCLRLHPTSQPLFAFEWRDPGMGISGQLTWTRLPQGFKNSPTLFNEALHRDLADFRIQHPDLILLQYVDDILLAATSELDCQQGTRALLLTLGNLGYRASAKKAQLCQKQVKYLGYLLKEGQRWLTEARKETVMGQPTPKTPRQLREFLGTAGFCRLWIPGFAEMAAPLYPLTKPGTLFNWGPDQQKAYQEIKQALLTAPALGLPDLTKPFELFVDEKQGYAKGVLTQKLGPWRRPVAYLSKKLDPVAAGWPPCLRMVAAIAVLRKDAGKLTMGQPLVILAPHAVEALVKQPPDRWLSNARMTHYQAMLLDTDRVQFGPVVALNPATLLPLPEEGAPHDCLEILAETHGTRPDLTDQPIPDADHTWYTDGSSFLQEGQRKAGAAVTTETEVIWARALPAGTSAQRAELIALTQALKMAEGKRLNVYTDSRYAFATAHIHGEIYRRRGWLTSEGREIKNKSEILALLKALFLPKRLSIIHCLGHQKGDSAEARGNRLADQAAREAAIKTPPDTSTLL

SEQ ID NO: 8055 - protein, 671 aa, synthetic construct
TLNLEDEYRLYETSAEPEVSPGSTWLSDFPQAWAETGGMGLAVRQAPLIIPLKATSTPVSIKQYPMSQEAKLGIKPHIQRLLDQGILVPCQSPWNTPLLPVKKPGTNDYRPVQDLREVNKRVEDIHPTVPNPYNLLSGLPPSHRWYTVLDLKDAFFCLRLHPTSQPLFAFEWRDPGMGISGQLTWTRLPQGFKNSPTLFNEALHRDLADFRIQHPDLILLQYVDDILLAATSELDCQQGTRALLLTLGNLGYRASAKKAQLCQKQVKYLGYLLKEGQRWLTEARKETVMGQPTPKTPRQLREFLGKAGFCRLFIPGFAEMAAPLYPLTKPGTLFNWGPDQQKAYQEIKQALLTAPALGLPDLTKPFELFVDEKQGYAKGVLTQKLGPWRRPVAYLSKKLDPVAAGWPPCLRMVAAIAVLRKDAGKLTMGQPLVILAPHAVEALVKQPPDRWLSNARMTHYQAMLLDTDRVQFGPVVALNPATLLPLPEEGAPHDCLEILAETHGTRPDLTDQPIPDADHTWYTDGSSFLQEGQRKAGAAVTTETEVIWARALPAGTSAQRAELIALTQALKMAEGKRLNVYTDSRYAFATAHIHGEIYRRRGWLTSEGREIKNKSEILALLKALFLPKRLSIIHCLGHQKGDSAEARGNRLADQAAREAAIKTPPDTSTLL

SEQ ID NO: 8056 - protein, 671 aa, Murine leukemia virus
TLGIEDEYRLHETSTEPDVSLGSTWLSDFPQAWAETGGMGLAVRQAPLIIPLKATSTPVSIQQYPMSHEARLGIKPHIQRLLDQGILVPCQSPWNTPLLPVKKPGTNDYRPVQDLREVNKRVEDIHPTVPNPYNLLSGLPPSHQWYTVLDLKDAFFCLRLHPTSQPLFAFEWRDPGMGISGQLTWTRLPQGFKNSPTLFDEALHRDLADFRIQHPDLILLQYVDDILLAATSELDCQQGTRALLQTLGDLGYRASAKKAQICQKQVKYLGYLLREGQRWLTEARKETVMGQPVPKTPRQLREFLGTAGFCRLWIPGFAEMAAPLYPLTKTGTLFSWGPDQQKAYQEIKQALLTAPALGLPDLTKPFELFVDEKQGYAKGVLTQKLGPWRRPVAYLSKKLDPVAAGWPPCLRMVAAIAVLTKDAGKLTMGQPLVILAPHAVEALVKQPPDRWLSNARMTHYQAMLLDTDRVQFGPVVALNPATLLPLPEEGAPHDCLEILAETHGTRPDLTDQPIPDADHTWYTDGSSFLQEGQRKAGAAVTTETEVIWAGALPAGTSAQRAELIALTQALKMAEGKRLNVYTDSRYAFATAHIHGEIYRRRGLLTSEGREIKNKSEILALLKALFLPKRLSIIHCLGHQKGDSAEARGNRLADQAAREAAIKTPPDTSTLL

SEQ ID NO: 8057 - protein, 671 aa, Murine leukemia virus; identical to SEQ ID NO: 8056

SEQ ID NO: 8058 - protein, 671 aa, synthetic construct
TLGIEDEYRLHETSTEPDVSLGSTWLSDFPQAWAETGGMGLAVRQAPLIIPLKATSTPVSIQQYPMSHEARLGIKPHIQRLLDQGILVPCQSPWNTPLLPVKKPGTNDYRPVQDLREVNKRVEDIHPTVPNPYNLLSGLPPSHQWYTVLDLKDAFFCLRLHPTSQPLFAFEWRDPGMGISGQLTWTRLPQGFKNSPTLFNEALHRDLADFRIQHPDLILLQYVDDILLAATSELDCQQGTRALLQTLGDLGYRASAKKAQICQKQVKYLGYLLREGQRWLTEARKETVMGQPVPKTPRQLREFLGTAGFCRLWIPGFAEMAAPLYPLTKPGTLFSWGPDQQKAYQEIKQALLTAPALGLPDLTKPFELFVDEKQGYAKGVLTQKLGPWRRPVAYLSKKLDPVAAGWPPCLRMVAAIAVLTKDAGKLTMGQPLVILAPHAVEALVKQPPDRWLSNARMTHYQAMLLDTDRVQFGPVVALNPATLLPLPEEGAPHDCLEILAETHGTRPDLTDQPIPDADHTWYTDGSSFLQEGQRKAGAAVTTETEVIWAGALPAGTSAQRAELIALTQALKMAEGKRLNVYTDSRYAFATAHIHGEIYRRRGWLTSEGREIKNKSEILALLKALFLPKRLSIIHCLGHQKGDSAEARGNRLADQAAREAAIKTPPDTSTLL

SEQ ID NO: 8059 - protein, 671 aa, synthetic construct; identical to SEQ ID NO: 8058

SEQ ID NO: 8060 - protein, 671 aa, synthetic construct
LGIEDEYRLHETSTEPDVSLGSTWLSDFPQAWAETGGMGLAVRQAPLIIPLKATSTPVSIQQYPMSHEARLGIKPHIQRLLDQGILVPCQSPWNTPLLPVKKPGTNDYRPVQDLREVNKRVEDIHPTVPNPYNLLSGLPPSHQWYTVLDLKDAFFCLRLHPTSQPLFAFEWRDPGMGISGQLTWTRLPQGFKNSPTLFNEALHRDLADFRIQHPDLILLQYVDDILLAATSELDCQQGTRALLQTLGDLGYRASAKKAQICQKQVKYLGYLLREGQRWLTEARKETVMGQPVPKTPRQLREFLGKAGFCRLFIPGFAEMAAPLYPLTKPGTLFSWGPDQQKAYQEIKQALLTAPALGLPDLTKPFELFVDEKQGYAKGVLTQKLGPWRRPVAYLSKKLDPVAAGWPPCLRMVAAIAVLTKDAGKLTMGQPLVILAPHAVEALVKQPPDRWLSNARMTHYQAMLLDTDRVQFGPVVALNPATLLPLPEEGAPHDCLEILAETHGTRPDLTDQPIPDADHTWYTDGSSFLQEGQRKAGAAVTTETEVIWAGALPAGTSAQRAELIALTQALKMAEGKRLNVYTDSRYAFATAHIHGEIYRRRGWLTSEGREIKNKSEILALLKALFLPKRLSIIHCLGHQKGDSAEARGNRLADQAAREAAIKTPPDTSTLLI

SEQ ID NO: 8061 - protein, 671 aa, synthetic construct; identical to SEQ ID NO: 8060

SEQ ID NO: 8062 - protein, 671 aa, unidentified
TLNIEDEYRLHETSKEPDVSLGSTWLSDFPQAWAETGGMGLAVRQAPLIIPLKATSTPVSIKQYPMSQEARLGIKPHIQRLLDQGILVPCQSPWNTPLLPVKKPGTNDYRPVQDLREVNKRVEDIHPTVPNPYNLLSGLPPSHQWYTVLDLKDAFFCLRLHPTSQPLFAFEWRDPEMGISGQLTWTRLPQGFKNSPTLFDEALHRDLAGFRIQHPDLILLQYVDDLLLAATSELDCQQGTRALLQTLGDLGYRASAKKAQICQKQVKYLGYLLKEGQRWLTEARKETVMGQPIPKTPRQLREFLGTAGFCRLWIPGFAEMAAPLYPLTKTGTLFNWGPDQQKAFQEIKQALLTAPALGLPDLTKPFELFVDEKQGYAKGVLTQKLGPWRRPVAYLSKKLDPVAAGWPPCLRMVAAIAVLTKDAGKLTMGQPLVILAPHAVEALVKQPPDRWLSNARMTHYQALLLDTDRVQFGPVVALNPATLLPLPEEGLQHDCLDILAEAHGTRSDLMDQPLPDADHTWYTDGSSFLQEGQRKAGAAVTTETEVIWARALPAGTSAQRAELIALTQALKMAEGKKLNVYTDSRYAFATAHIHGEIYRRRGLLTSEGKEIKNKDEILALLKALFLPKRLSIIHCPGHQKGNSAEARGNRMADQAAREVATRETPETSTLL

SEQ ID NO: 8063 - protein, 671 aa, synthetic construct
TLNIEDEYRLHETSKEPDVSLGSTWLSDFPQAWAETGGMGLAVRQAPLIIPLKATSTPVSIKQYPMSQEARLGIKPHIQRLLDQGILVPCQSPWNTPLLPVKKPGTNDYRPVQDLREVNKRVEDIHPTVPNPYNLLSGLPPSHQWYTVLDLKDAFFCLRLHPTSQPLFAFEWRDPEMGISGQLTWTRLPQGFKNSPTLFNEALHRDLAGFRIQHPDLILLQYVDDLLLAATSELDCQQGTRALLQTLGDLGYRASAKKAQICQKQVKYLGYLLKEGQRWLTEARKETVMGQPIPKTPRQLREFLGTAGFCRLWIPGFAEMAAPLYPLTKPGTLFNWGPDQQKAFQEIKQALLTAPALGLPDLTKPFELFVDEKQGYAKGVLTQKLGPWRRPVAYLSKKLDPVAAGWPPCLRMVAAIAVLTKDAGKLTMGQPLVILAPHAVEALVKQPPDRWLSNARMTHYQALLLDTDRVQFGPVVALNPATLLPLPEEGLQHDCLDILAEAHGTRSDLMDQPLPDADHTWYTDGSSFLQEGQRKAGAAVTTETEVIWARALPAGTSAQRAELIALTQALKMAEGKKLNVYTDSRYAFATAHIHGEIYRRRGWLTSEGKEIKNKDEILALLKALFLPKRLSIIHCPGHQKGNSAEARGNRMADQAAREVATRETPETSTLL

SEQ ID NO: 8064 - protein, 671 aa, synthetic construct
TLNIEDEYRLHETSKEPDVSLGSTWLSDFPQAWAETGGMGLAVRQAPLIIPLKATSTPVSIKQYPMSQEARLGIKPHIQRLLDQGILVPCQSPWNTPLLPVKKPGTNDYRPVQDLREVNKRVEDIHPTVPNPYNLLSGLPPSHQWYTVLDLKDAFFCLRLHPTSQPLFAFEWRDPEMGISGQLTWTRLPQGFKNSPTLFNEALHRDLAGFRIQHPDLILLQYVDDLLLAATSELDCQQGTRALLQTLGDLGYRASAKKAQICQKQVKYLGYLLKEGQRWLTEARKETVMGQPIPKTPRQLREFLGKAGFCRLFIPGFAEMAAPLYPLTKPGTLFNWGPDQQKAFQEIKQALLTAPALGLPDLTKPFELFVDEKQGYAKGVLTQKLGPWRRPVAYLSKKLDPVAAGWPPCLRMVAAIAVLTKDAGKLTMGQPLVILAPHAVEALVKQPPDRWLSNARMTHYQALLLDTDRVQFGPVVALNPATLLPLPEEGLQHDCLDILAEAHGTRSDLMDQPLPDADHTWYTDGSSFLQEGQRKAGAAVTTETEVIWARALPAGTSAQRAELIALTQALKMAEGKKLNVYTDSRYAFATAHIHGEIYRRRGWLTSEGKEIKNKDEILALLKALFLPKRLSIIHCPGHQKGNSAEARGNRMADQAAREVATRETPETSTLL

SEQ ID NO: 8065 - protein, 671 aa, unidentified
TLNIEDEYRLHETSKGPDVPLGSTWLSDFPQAWAETGGMGLAFRQAPLIISLKATSTPVSIKQYPMSQEARLGIKPHIQRLLDQGILVPCQSPWNTPLLPVKKPGTNDYRPVQDLREVNKRVEDIHPTVPNPYNLLSGLPPSHQWYTVLDLKDAFFCLRLHPTSQSLFAFEWKDPEMGISGQLTWTRLPQGFKNSPTLFDEALHRDLADFRIQHPDLILLQYVDDLLLAATSELDCQQGTRALLQTLGDLGYRASAKKAQICQKQVKYLGYLLKEGQRWLTEARKETVMGQPTPKTPRQLREFLGTAGLCRLWIPGFAEMAAPLYPLTKTGTLFKWGPDQQKAYQEIKQALLTAPALGLPDLTKPFELFVDEKQGYAKGVLTQKLGPWRRPVAYLSKKLDPVAAGWPPCLRMVAAIAVLTKDVGKLTMGQPLVILAPHAVEALVKQPPDRWLSNARMTHYQALLLDTDRVQFGPIVALNPATLLPLPEEGLQHDCLDILAEAHGTRPDLTDQPLPDADHTWYTDGSSFLQEGQRRAGAAVTTETEVIWAKALPAGTSAQRAELIALTQALKMAAGKKLNVYTDSRYAFATAHIHGEIYRRRGLLTSEGKEIKNKDEILALLKALFLPKRLSIIHCPGHQKGNHAEARGNRMADQAAREVATRETPETSTLL

SEQ ID NO: 8066 - protein, 671 aa, synthetic construct
TLNIEDEYRLHETSKGPDVPLGSTWLSDFPQAWAETGGMGLAFRQAPLIISLKATSTPVSIKQYPMSQEARLGIKPHIQRLLDQGILVPCQSPWNTPLLPVKKPGTNDYRPVQDLREVNKRVEDIHPTVPNPYNLLSGLPPSHQWYTVLDLKDAFFCLRLHPTSQSLFAFEWKDPEMGISGQLTWTRLPQGFKNSPTLFNEALHRDLADFRIQHPDLILLQYVDDLLLAATSELDCQQGTRALLQTLGDLGYRASAKKAQICQKQVKYLGYLLKEGQRWLTEARKETVMGQPTPKTPRQLREFLGTAGLCRLWIPGFAEMAAPLYPLTKPGTLFKWGPDQQKAYQEIKQALLTAPALGLPDLTKPFELFVDEKQGYAKGVLTQKLGPWRRPVAYLSKKLDPVAAGWPPCLRMVAAIAVLTKDVGKLTMGQPLVILAPHAVEALVKQPPDRWLSNARMTHYQALLLDTDRVQFGPIVALNPATLLPLPEEGLQHDCLDILAEAHGTRPDLTDQPLPDADHTWYTDGSSFLQEGQRRAGAAVTTETEVIWAKALPAGTSAQRAELIALTQALKMAAGKKLNVYTDSRYAFATAHIHGEIYRRRGWLTSEGKEIKNKDEILALLKALFLPKRLSIIHCPGHQKGNHAEARGNRMADQAAREVATRETPETSTLL

SEQ ID NO: 8067 - protein, 671 aa, synthetic construct
TLNIEDEYRLHETSKGPDVPLGSTWLSDFPQAWAETGGMGLAFRQAPLIISLKATSTPVSIKQYPMSQEARLGIKPHIQRLLDQGILVPCQSPWNTPLLPVKKPGTNDYRPVQDLREVNKRVEDIHPTVPNPYNLLSGLPPSHQWYTVLDLKDAFFCLRLHPTSQSLFAFEWKDPEMGISGQLTWTRLPQGFKNSPTLFNEALHRDLADFRIQHPDLILLQYVDDLLLAATSELDCQQGTRALLQTLGDLGYRASAKKAQICQKQVKYLGYLLKEGQRWLTEARKETVMGQPTPKTPRQLREFLGKAGLCRLFIPGFAEMAAPLYPLTKPGTLFKWGPDQQKAYQEIKQALLTAPALGLPDLTKPFELFVDEKQGYAKGVLTQKLGPWRRPVAYLSKKLDPVAAGWPPCLRMVAAIAVLTKDVGKLTMGQPLVILAPHAVEALVKQPPDRWLSNARMTHYQALLLDTDRVQFGPIVALNPATLLPLPEEGLQHDCLDILAEAHGTRPDLTDQPLPDADHTWYTDGSSFLQEGQRRAGAAVTTETEVIWAKALPAGTSAQRAELIALTQALKMAAGKKLNVYTDSRYAFATAHIHGEIYRRRGWLTSEGKEIKNKDEILALLKALFLPKRLSIIHCPGHQKGNHAEARGNRMADQAAREVATRETPETSTLL

SEQ ID NO: 8068 - protein, 671 aa, synthetic construct
TLNIEDEYRLHETSKGPDVPLGSTWLSDFPQAWAETGGMGLAVRQAPLIIPLKATSTPVSIKQYPMSQEARLGIKPHIQRLLDQGILVPCQSPWNTPLLPVKKPGTNDYRPVQDLREVNKRVEDIHPTVPNPYNLLSGLPPSHQWYTVLDLKDAFFCLRLHPTSQSLFAFEWRDPEMGISGQLTWTRLPQGFKNSPTLFNEALHRDLADFRIQHPDLILLQYVDDLLLAATSELDCQQGTRALLQTLGDLGYRASAKKAQICQKQVKYLGYLLKEGQRWLTEARKETVMGQPTPKTPRQLREFLGTAGFCRLWIPGFAEMAAPLYPLTKPGTLFEWGPDQQKAYQEIKQALLTAPALGLPDLTKPFELFVDEKQGYAKGVLTQKLGPWRRPVAYLSKKLDPVAAGWPPCLRMVAAIAVLTKDAGKLTMGQPLVILAPHAVEALVKQPPDRWLSNARMTHYQALLLDTDRVQFGPIVALNPATLLPLPEEGLQHDCLDILAEAHGTRPDLTDQPLPDADHTWYTDGSSFLQEGQRKAGAAVTTETEVVWAKALPAGTSAQRAELIALTQALKMAEGKKLNVYTDSRYAFATAHIHGEIYRRRGWLTSEGKEIKNKDEILALLKALFLPKRLSIIHCPGHQKGNRAEARGNRMADQAAREVATRETPETSTLL

SEQ ID NO: 8069 - protein, 671 aa, synthetic construct
TLNIEDEYRLHETSKGPDVPLGSTWLSDFPQAWAETGGMGLAVRQAPLIIPLKATSTPVSIKQYPMSQEARLGIKPHIQRLLDQGILVPCQSPWNTPLLPVKKPGTNDYRPVQDLREVNKRVEDIHPTVPNPYNLLSGLPPSHQWYTVLDLKDAFFCLRLHPTSQSLFAFEWRDPEMGISGQLTWTRLPQGFKNSPTLFNEALHRDLADFRIQHPDLILLQYVDDLLLAATSELDCQQGTRALLQTLGDLGYRASAKKAQICQKQVKYLGYLLKEGQRWLTEARKETVMGQPTPKTPRQLREFLGKAGFCRLFIPGFAEMAAPLYPLTKPGTLFEWGPDQQKAYQEIKQALLTAPALGLPDLTKPFELFVDEKQGYAKGVLTQKLGPWRRPVAYLSKKLDPVAAGWPPCLRMVAAIAVLTKDAGKLTMGQPLVILAPHAVEALVKQPPDRWLSNARMTHYQALLLDTDRVQFGPIVALNPATLLPLPEEGLQHDCLDILAEAHGTRPDLTDQPLPDADHTWYTDGSSFLQEGQRKAGAAVTTETEVVWAKALPAGTSAQRAELIALTQALKMAEGKKLNVYTDSRYAFATAHIHGEIYRRRGWLTSEGKEIKNKDEILALLKALFLPKRLSIIHCPGHQKGNRAEARGNRMADQAAREVATRETPETSTLL

SEQ ID NO: 8070 - protein, 671 aa, Murine leukemia virus
TLNIEDEHRLHETSKEPDVSLGSTWLSDFPQAWAETGGMGLAVRQAPLIIPLKATSTPVSIKQYPMSQEARLGIKPHIQRLLDQGILVPCQSPWNTPLLPVKKPGTNDYRPVQDLREVNKRVEDIHPTVPNPYNLLSGLPPSHQWYTVLDLKDAFFCLRLHPTSQPLFAFEWRDPEMGISGQLTWTRLPQGFKNSPTLFDEALHRDLADFRIQHPDLILLQYVDDLLLAATSELDCQQGTRALLQTLGNLGYRASAKKAQICQKQVKYLGYLLKEGQRWLTEARKETVMGQPTPKTPRQLREFLGTAGFCRLWIPGFAEMAAPLYPLTKTGTLFNWGPDQQKAYQEIKQALLTAPALGLPDLTKPFELFVDEKQGYAKGVLTQKLGPWRRPVAYLSKKLDPVAAGWPPCLRMVAAIAVLTKDAGKLTMGQPLVILAPHAVEALVKQPPDRWLSNARMTHYQALLLDTDRVQFGPVVALNPATLLPLPEEGLQHNCLDILAEAHGTRPDLTDQPLPDADHTWYTDGSSLLQEGQRKAGAAVTTETEVIWAKALPAGTSAQRAELIALTQALKMAEGKKLNVYTDSRYAFATAHIHGEIYRRRGLLTSEGKEIKNKDEILALLKALFLPKRLSIIHCPGHQKGHSAEARGNRMADQAARKAAITETPDTSTLL

SEQ ID NO: 8071 - protein, 671 aa, Murine leukemia virus; identical to SEQ ID NO: 8070

SEQ ID NO: 8072 - protein, 671 aa, synthetic construct
TLNIEDEHRLHETSKEPDVSLGSTWLSDFPQAWAETGGMGLAVRQAPLIIPLKATSTPVSIKQYPMSQEARLGIKPHIQRLLDQGILVPCQSPWNTPLLPVKKPGTNDYRPVQDLREVNKRVEDIHPTVPNPYNLLSGLPPSHQWYTVLDLKDAFFCLRLHPTSQPLFAFEWRDPEMGISGQLTWTRLPQGFKNSPTLFNEALHRDLADFRIQHPDLILLQYVDDLLLAATSELDCQQGTRALLQTLGNLGYRASAKKAQICQKQVKYLGYLLKEGQRWLTEARKETVMGQPTPKTPRQLREFLGTAGFCRLWIPGFAEMAAPLYPLTKPGTLFNWGPDQQKAYQEIKQALLTAPALGLPDLTKPFELFVDEKQGYAKGVLTQKLGPWRRPVAYLSKKLDPVAAGWPPCLRMVAAIAVLTKDAGKLTMGQPLVILAPHAVEALVKQPPDRWLSNARMTHYQALLLDTDRVQFGPVVALNPATLLPLPEEGLQHNCLDILAEAHGTRPDLTDQPLPDADHTWYTDGSSLLQEGQRKAGAAVTTETEVIWAKALPAGTSAQRAELIALTQALKMAEGKKLNVYTDSRYAFATAHIHGEIYRRRGWLTSEGKEIKNKDEILALLKALFLPKRLSIIHCPGHQKGHSAEARGNRMADQAARKAAITETPDTSTLL

SEQ ID NO: 8073 - protein, 671 aa, synthetic construct; identical to SEQ ID NO: 8072

SEQ ID NO: 8074 - protein, 671 aa, synthetic construct
TLNIEDEHRLHETSKEPDVSLGSTWLSDFPQAWAETGGMGLAVRQAPLIIPLKATSTPVSIKQYPMSQEARLGIKPHIQRLLDQGILVPCQSPWNTPLLPVKKPGTNDYRPVQDLREVNKRVEDIHPTVPNPYNLLSGLPPSHQWYTVLDLKDAFFCLRLHPTSQPLFAFEWRDPEMGISGQLTWTRLPQGFKNSPTLFNEALHRDLADFRIQHPDLILLQYVDDLLLAATSELDCQQGTRALLQTLGNLGYRASAKKAQICQKQVKYLGYLLKEGQRWLTEARKETVMGQPTPKTPRQLREFLGKAGFCRLFIPGFAEMAAPLYPLTKPGTLFNWGPDQQKAYQEIKQALLTAPALGLPDLTKPFELFVDEKQGYAKGVLTQKLGPWRRPVAYLSKKLDPVAAGWPPCLRMVAAIAVLTKDAGKLTMGQPLVILAPHAVEALVKQPPDRWLSNARMTHYQALLLDTDRVQFGPVVALNPATLLPLPEEGLQHNCLDILAEAHGTRPDLTDQPLPDADHTWYTDGSSLLQEGQRKAGAAVTTETEVIWAKALPAGTSAQRAELIALTQALKMAEGKKLNVYTDSRYAFATAHIHGEIYRRRGWLTSEGKEIKNKDEILALLKALFLPKRLSIIHCPGHQKGHSAEARGNRMADQAARKAAITETPDTSTLL

SEQ ID NO: 8075 - protein, 671 aa, synthetic construct; identical to SEQ ID NO: 8074

SEQ ID NO: 8076 - protein, 691 aa, synthetic construct
TLNIEDEYRLHETSKEPDVSLGSTWLSDFPQAWAETGGMGLAVRQAPLIIPLKATSTPVSIKQYPMSQEARLGIKPHIQRLLDQGILVPCQSPWNTPLLPVKKPGTNDYRPVQDLREVNKRVEDIHPTVPNPYNLLSGLPPSHQWYTVLDLKDAFFCLRLHPTSQPLFAFEWRDPEMGISGQLTWTRLPQGFKNSPTLFNEALHRDLADFRIQHPDLILLQYVDDLLLAATSELDCQQGTRALLQTLGNLGYRASAKKAQICQKQVKYLGYLLKEGQRWLTEARKETVMGQPTPKTPRQLREFLGKAGFCRLFIPGFAEMAAPLYPLTKPGTLFNWGPDQQKAYQEIKQALLTAPALGLPDLTKPFELFVDEKQGYAKGVLTQKLGPWRRPVAYLSKKLDPVAAGWPPCLRMVAAIAVLTKDAGKLTMGQPLVILAPHAVEALVKQPPDRWLSNARMTHYQALLLDTDRVQFGPVVALNPATLLPLPEEGLQHNCLDILAEAHGTRPDLTDQPLPDADHTWYTDGSSLLQEGQRKAGAAVTTETEVIWAKALPAGTSAQRAELIALTQALKMAEGKKLNVYTDSRYAFATAHIHGEIYRRRGWLTSEGKEIKNKDEILALLKALFLPKRLSIIHCPGHQKGHSAEARGNRMADQAARKAAITETPDTSTLLIENSSPSGGSKRTADGSEFE

SEQ ID NO: 8077 - protein, 691 aa, synthetic construct; identical to SEQ ID NO: 8076

SEQ ID NO: 8078 - protein, 671 aa, unidentified
TLNIEDEYRLHEISTEPDVSPGSTWLSDFPQAWAETGGMGLAVRQAPLIIPLKATSTPVSIKQYPMSQEAKLGIKPHIQRLLDQGILVPCQSPWNTPLLPVKKPGTNDYRPVQGLREVNKRVEDIHPTVPNPYNLLSGLPTSHRWYTVLDLKDAFFCLRLHPTSQPLFASEWRDPGMGISGQLTWTRLPQGFKNSPTLFDEALHRGLADFRIQHPDLILLQYVDDLLLAATSELDCQQGTRALLKTLGNLGYRASAKKAQICQKQVKYLGYLLREGQRWLTEARKETVMGQPTPKTPRQLREFLGTAGFCRLWIPRFAEMAAPLYPLTKTGTLFNWGPDQQKAYHEIKQALLTAPALGLPDLTKPFELFVDEKQGYAKGVLTQKLGPWRRPVAYLSKKLDPVAAGWPPCLRMVAAIAVLTKDAGKLTMGQPLVILAPHAVEALVKQPPDRWLSNARMTHYQAMLLDTDRVQFGPVVALNPATLLPLPEEGAPHDCLEILAETHGTEPDLTDQPIPDADHTWYTDGSSFLQEGQRKAGAAVTTETEVIWARALPAGTSAQRAELIALTQALKMAEGKRLNVYTDSRYAFATAHIHGEIYKRRGLLTSEGREIKNKSEILALLKALFLPKRLSIIHCLGHQKGDSAEARGNRLADQAAREAAIKTPPDTSTLL

SEQ ID NO: 8079 - protein, 671 aa, synthetic construct
TLNIEDEYRLHEISTEPDVSPGSTWLSDFPQAWAETGGMGLAVRQAPLIIPLKATSTPVSIKQYPMSQEAKLGIKPHIQRLLDQGILVPCQSPWNTPLLPVKKPGTNDYRPVQGLREVNKRVEDIHPTVPNPYNLLSGLPTSHRWYTVLDLKDAFFCLRLHPTSQPLFASEWRDPGMGISGQLTWTRLPQGFKNSPTLFNEALHRGLADFRIQHPDLILLQYVDDLLLAATSELDCQQGTRALLKTLGNLGYRASAKKAQICQKQVKYLGYLLREGQRWLTEARKETVMGQPTPKTPRQLREFLGTAGFCRLWIPRFAEMAAPLYPLTKPGTLFNWGPDQQKAYHEIKQALLTAPALGLPDLTKPFELFVDEKQGYAKGVLTQKLGPWRRPVAYLSKKLDPVAAGWPPCLRMVAAIAVLTKDAGKLTMGQPLVILAPHAVEALVKQPPDRWLSNARMTHYQAMLLDTDRVQFGPVVALNPATLLPLPEEGAPHDCLEILAETHGTEPDLTDQPIPDADHTWYTDGSSFLQEGQRKAGAAVTTETEVIWARALPAGTSAQRAELIALTQALKMAEGKRLNVYTDSRYAFATAHIHGEIYKRRGWLTSEGREIKNKSEILALLKALFLPKRLSIIHCLGHQKGDSAEARGNRLADQAAREAAIKTPPDTSTLL

SEQ ID NO: 8080 - protein, 691 aa, Mouse mammary tumor virus
WVQEISDSRPMLHIYLNGRRFLGLLNTGADKTCIAGRDWPANWPIHQTESSLQGLGMACGVARSSQPLRWQHEDKSGIIHPFVIPTLPFTLWGRDIMKDIKVRLMTDSPDDSQDLMIGAIESNLFADQISWKSDQPVWLNQWPLKQEKLQALQQLVTEQLQLGHLEESNSPWNTPVFVIKKKSGKWRLLQDLRAVNATMHDMGALQPGLPSPVAVPKGWEIIIIDLQDCFFNIKLHPEDCKRFAFSVPSPNFKRPYQRFQWKVLPQGMKNSPTLCQKFVDKAILTVRDKYQDSYIVHYMDDILLAHPSRSIVDEILTSMIQALNKHGLVVSTEKIQKYDNLKYLGTHIQGDSVSYQKLQIRTDKLRTLNDFQKLLGNINWIRPFLKLTTGELKPLFEILNGDSNPISTRKLTPEACKALQLMNERLSTARVKRLDLSQPWSLCILKTEYTPTACLWQDGVVEWIHLPHISPKVITPYDIFCTQLIIKGRHRSKELFSKDPDYIVVPYTKVQFDLLLQEKEDWPISLLGFLGEVHFHLPKDPLLTFTLQTAIIFPHMTSTTPLEKGIVIFTDGSANGRSVTYIQGREPIIKENTQNTAQQAEIVAVITAFEEVSQPFNLYTDSKYVTGLFPEIETATLSPRTKIYTELKHLQRLIHKRQEKFYIGHIRGHTGLPGPLAQGNAYADSLTRILT

SEQ ID NO: 8081 - protein, 691 aa, Mouse mammary tumor virus; identical to SEQ ID NO: 8080

SEQ ID NO: 8082 - protein, 691 aa, synthetic construct
WVQEISDSRPMLHIYLNGRRFLGLLNTGADKTCIAGRDWPANWPIHQTESSLQGLGMACGVARSSQPLRWQHEDKSGIIHPFVIPTLPFTLWGRDIMKDIKVRLMTDSPDDSQDLMIGAIESNLFADQISWKSDQPVWLNQWPLKQEKLQALQQLVTEQLQLGHLEESNSPWNTPVFVIKKKSGKWRLLQDLRAVNATMHDMGALQPGLPSPVAVPKGWEIIIIDLQDCFFNIKLHPEDCKRFAFSVPSPNFKRPYQRFQWKVLPQGMKNSPTLCQKFVDKAILTVRDKYQDSYIVHYMDDILLAHPSRSIVDEILTSMIQALNKHGLVVSTEKIQKYDNLKYLGTHIQGDSVSYQKLQIRTDKLRTLNDFQKLLGNINWIRPFLKLTTGELKPLFEILNPDSNPISTRKLTPEACKALQLMNERLSTARVKRLDLSQPWSLCILKTEYTPTACLWQDGVVEWIHLPHISPKVITPYDIFCTQLIIKGRHRSKELFSKDPDYIVVPYTKVQFDLLLQEKEDWPISLLGFLGEVHFHLPKDPLLTFTLQTAIIFPHMTSTTPLEKGIVIFTDGSANGRSVTYIQGREPIIKENTQNTAQQAEIVAVITAFEEVSQPFNLYTDSKYVTGLFPEIETATLSPRTKIYTELKHLQRLIHKRQEKFYIGHIRGHTGLPGPLAQGNAYADSLTRILT

SEQ ID NO: 8083 - protein, 691 aa, synthetic construct
VQEISDSRPMLHIYLNGRRFLGLLDTGADKTCIAGRDWPANWPIHQTESSLQGLGMACGVARSSQPLRWQHEDKSGIIHPFVIPTLPFTLWGRDIMKDIKVRLMTDSPDDSQDLMIGAIESNLFADQISWKSDQPVWLNQWPLKQEKLQALQQLVTEQLQLGHLEESNSPWNTPVFVIKKKSGKWRLLQDLRAVNATMHDMGALQPGLPSPVAVPKGWEIIIIDLQDCFFNIKLHPEDCKRFAFSVPSPNFKRPYQRFQWKVLPQGMKNSPTLCQKFVDKAILTVRDKYQDSYIVHYMDDILLAHPSRSIVDEILTSMIQALNKHGLVVSTEKIQKYDNLKYLGTHIQGDSVSYQKLQIRTDKLRTLNDFQKLLGNINWIRPFLKLTTGELKPLFEILNPDSNPISTRKLTPEACKALQLMNERLSTARVKRLDLSQPWSLCILKTEYTPTACLWQDGVVEWIHLPHISPKVITPYDIFCTQLIIKGRHRSKELFSKDPDYIVVPYTKVQFDLLLQEKEDWPISLLGFLGEVHFHLPKDPLLTFTLQTAIIFPHMTSTTPLEKGIVIFTDGSANGRSVTYIQGREPIIKENTQNTAQQAEIVAVITAFEEVSQPFNLYTDSKYVTGLFPEIETATLSPRTKIYTELKHLQRLIHKRQEKFYIGHIRGHTGLPGPLAQGNAYADSLTRILTA

SEQ ID NO: 8084 - protein, 691 aa, synthetic construct; identical to SEQ ID NO: 8083

SEQ ID NO: 8085 - protein, 691 aa, synthetic construct
WVQEISDSRPMLHIYLNGRRFLGLLNTGADKTCIAGRDWPANWPIHQTESSLQGLGMACGVARSSQPLRWQHEDKSGIIHPFVIPTLPFTLWGRDIMKDIKVRLMTDSPDDSQDLMIGAIESNLFADQISWKSDQPVWLNQWPLKQEKLQALQQLVTEQLQLGHLEESNSPWNTPVFVIKKKSGKWRLLQDLRAVNATMHDMGALQPGLPSPVAPPKGWEIIIIDLQDCFFNIKLHPEDCKRFAFSVPSPNFKRPYQRFQWKVLPQGMKNSPTLCQKFVDKAILTVRDKYQDSYIVHYMDDILLAHPSRSIVDEILTSMIQALNKHGLVVSTEKIQKYDNLKYLGTHIQGDSVSYQKLQIRTDKLRTLNDFQKLLGNINWIRPFLKLTTGELKPLFEILNPDSNPISTRKLTPEACKALQLMNERLSTARVKRLDLSQPWSLCILKTEYTPTACLWQDGVVEWIHLPHISPKVITPYDIFCTQLIIKGRHRSKELFSKDPDYIVVPYTKVQFDLLLQEKEDWPISLLGFLGEVHFHLPKDPLLTFTLQTAIIFPHMTSTTPLEKGIVIFTDGSANGRSVTYIQGREPIIKENTQNTAQQAEIVAVITAFEEVSQPFNLYTDSKYVTGLFPEIETATLSPRTKIYTELKHLQRLIHKRQEKFYIGHIRGHTGLPGPLAQGNAYADSLTRILT

SEQ ID NO: 8086 - protein, 691 aa, synthetic construct; identical to SEQ ID NO: 8085

SEQ ID NO: 8087 - protein, 691 aa, synthetic construct
VQEISDSRPMLHIYLNGRRFLGLLDTGADKTCIAGRDWPANWPIHQTESSLQGLGMACGVARSSQPLRWQHEDKSGIIHPFVIPTLPFTLWGRDIMKDIKVRLMTDSPDDSQDLMIGAIESNLFADQISWKSDQPVWLNQWPLKQEKLQALQQLVTEQLQLGHLEESNSPWNTPVFVIKKKSGKWRLLQDLRAVNATMHDMGALQPGLPSPPAVPKGWEIIIIDLQDCFFNIKLHPEDCKRFAFSVPSPNFKRPYQRFQWKVLPQGMKNSPTLCQKFVDKAILTVRDKYQDSYIVHYMDDILLAHPSRSIVDEILTSMIQALNKHGLVVSTEKIQKYDNLKYLGTHIQGDSVSYQKLQIRTDKLRTLNDFQKLLGNINWIRPFLKLTTGELKPLFEILNPDSNPISTRKLTPEACKALQLMNERLSTARVKRLDLSQPWSLCILKTEYTPTACLWQDGVVEWIHLPHISPKVITPYDIFCTQLIIKGRHRSKELFSKDPDYIVVPYTKVQFDLLLQEKEDWPISLLGFLGEVHFHLPKDPLLTFTLQTAIIFPHMTSTTPLEKGIVIFTDGSANGRSVTYIQGREPIIKENTQNTAQQAEIVAVITAFEEVSQPFNLYTDSKYVTGLFPEIETATLSPRTKIYTELKHLQRLIHKRQEKFYIGHIRGHTGLPGPLAQGNAYADSLTRILTA

SEQ ID NO: 8088 - protein, 691 aa, synthetic construct; identical to SEQ ID NO: 8087

SEQ ID NO: 8089 - protein, 691 aa, Mouse mammary tumor virus
VQEISDSRPMLHIYLNGRRFLGLLDTGADKTCIAGRDWPANWPIHQTESSLQGLGMACGVARSSQPLRWQHEDKSGIIHPFVIPTLPFTLWGRDIMKDIKVRLMTDSPDDSQDLMIGAIESNLFADQISWKSDQPVWLNQWPLKQEKLQALQQLVTEQLQLGHLEESNSPWNTPVFVIKKKSGKWRLLQDLRAVNATMHDMGALQPGLPSPVAVPKGWEIIIIDLQDCFFNIKLHPEDCKRFAFSVPSPNFKRPYQRFQWKVLPQGMKNSPTLCQKFVDKAILTVRDKYQDSYIVHYMDDILLAHPSRSIVDEILTSMIQALNKHGLVVSTEKIQKYDNLKYLGTHIQGDSVSYQKLQIRTDKLRTLNDFQKLLGNINWIRPFLKLTTGELKPLFEILNGDSNPISTRKLTPEACKALQLMNERLSTARVKRLDLSQPWSLCILKTEYTPTACLWQDGVVEWIHLPHISPKVITPYDIFCTQLIIKGRHRSKELFSKDPDYIVVPYTKVQFDLLLQEKEDWPISLLGFLGEVHFHLPKDPLLTFTLQTAIIFPHMTSTTPLEKGIVIFTDGSANGRSVTYIQGREPIIKENTQNTAQQAEIVAVITAFEEVSQPFNLYTDSKYVTGLFPEIETATLSPRTKIYTELKHLQRLIHKRQEKFYIGHIRGHTGLPGPLAQGNAYADSLTRILTA

SEQ ID NO: 8090 - protein, 691 aa, Mouse mammary tumor virus; identical to SEQ ID NO: 8089

SEQ ID NO: 8091 - protein, 599 aa, Mouse mammary tumor virus
GRDIMKDIKVRLMTDSPDDSQDLMIGAIESNLFADQISWKSDQPVWLNQWPLKQEKLQALQQLVTEQLQLGHLEESNSPWNTPVFVIKKKSGKWRLLQDLRAVNATMHDMGALQPGLPSPVAVPKGWEIIIIDLQDCFFNIKLHPEDCKRFAFSVPSPNFKRPYQRFQWKVLPQGMKNSPTLCQKFVDKAILTVRDKYQDSYIVHYMDDILLAHPSRSIVDEILTSMIQALNKHGLVVSTEKIQKYDNLKYLGTHIQGDSVSYQKLQIRTDKLRTLNDFQKLLGNINWIRPFLKLTTGELKPLFEILNGDSNPISTRKLTPEACKALQLMNERLSTARVKRLDLSQPWSLCILKTEYTPTACLWQDGVVEWIHLPHISPKVITPYDIFCTQLIIKGRHRSKELFSKDPDYIVVPYTKVQFDLLLQEKEDWPISLLGFLGEVHFHLPKDPLLTFTLQTAIIFPHMTSTTPLEKGIVIFTDGSANGRSVTYIQGREPIIKENTQNTAQQAEIVAVITAFEEVSQPFNLYTDSKYVTGLFPEIETATLSPRTKIYTELKHLQRLIHKRQEKFYIGHIRGHTGLPGPLAQGNAYADSLTRILT

SEQ ID NO: 8092 - protein, 599 aa, Mouse mammary tumor virus; identical to SEQ ID NO: 8091

SEQ ID NO: 8093 - protein, 599 aa, synthetic construct
GRDIMKDIKVRLMTDSPDDSQDLMIGAIESNLFADQISWKSDQPVWLNQWPLKQEKLQALQQLVTEQLQLGHLEESNSPWNTPVFVIKKKSGKWRLLQDLRAVNATMHDMGALQPGLPSPVAVPKGWEIIIIDLQDCFFNIKLHPEDCKRFAFSVPSPNFKRPYQRFQWKVLPQGMKNSPTLCQKFVDKAILTVRDKYQDSYIVHYMDDILLAHPSRSIVDEILTSMIQALNKHGLVVSTEKIQKYDNLKYLGTHIQGDSVSYQKLQIRTDKLRTLNDFQKLLGNINWIRPFLKLTTGELKPLFEILNPDSNPISTRKLTPEACKALQLMNERLSTARVKRLDLSQPWSLCILKTEYTPTACLWQDGVVEWIHLPHISPKVITPYDIFCTQLIIKGRHRSKELFSKDPDYIVVPYTKVQFDLLLQEKEDWPISLLGFLGEVHFHLPKDPLLTFTLQTAIIFPHMTSTTPLEKGIVIFTDGSANGRSVTYIQGREPIIKENTQNTAQQAEIVAVITAFEEVSQPFNLYTDSKYVTGLFPEIETATLSPRTKIYTELKHLQRLIHKRQEKFYIGHIRGHTGLPGPLAQGNAYADSLTRILT

SEQ ID NO: 8094 - protein, 599 aa, synthetic construct; identical to SEQ ID NO: 8093

SEQ ID NO: 8095 - protein, 599 aa, synthetic construct
GRDIMKDIKVRLMTDSPDDSQDLMIGAIESNLFADQISWKSDQPVWLNQWPLKQEKLQALQQLVTEQLQLGHLEESNSPWNTPVFVIKKKSGKWRLLQDLRAVNATMHDMGALQPGLPSPVAPPKGWEIIIIDLQDCFFNIKLHPEDCKRFAFSVPSPNFKRPYQRFQWKVLPQGMKNSPTLCQKFVDKAILTVRDKYQDSYIVHYMDDILLAHPSRSIVDEILTSMIQALNKHGLVVSTEKIQKYDNLKYLGTHIQGDSVSYQKLQIRTDKLRTLNDFQKLLGNINWIRPFLKLTTGELKPLFEILNPDSNPISTRKLTPEACKALQLMNERLSTARVKRLDLSQPWSLCILKTEYTPTACLWQDGVVEWIHLPHISPKVITPYDIFCTQLIIKGRHRSKELFSKDPDYIVVPYTKVQFDLLLQEKEDWPISLLGFLGEVHFHLPKDPLLTFTLQTAIIFPHMTSTTPLEKGIVIFTDGSANGRSVTYIQGREPIIKENTQNTAQQAEIVAVITAFEEVSQPFNLYTDSKYVTGLFPEIETATLSPRTKIYTELKHLQRLIHKRQEKFYIGHIRGHTGLPGPLAQGNAYADSLTRILT

SEQ ID NO: 8096 - protein, 599 aa, synthetic construct; identical to SEQ ID NO: 8095

SEQ ID NO: 8097 - protein, 585 aa, Mason-Pfizer monkey virus
LTAAIDILAPQQCAEPITWKSDEPVWVDQWPLTNDKLAAAQQLVQEQLEAGHITESSSPWNTPIFVIKKKSGKWRLLQDLRAVNATMVLMGALQPGLPSPVAIPQGYLKIIIDLKDCFFSIPLHPSDQKRFAFSLPSTNFKEPMQRFQWKVLPQGMANSPTLCQKYVATAIHKVRHAWKQMYIIHYMDDILIAGKDGQQVLQCFDQLKQELTAAGLHIAPEKVQLQDPYTYLGFELNGPKITNQKAVIRKDKLQTLNDFQKLLGDINWLRPYLKLTTGDLKPLFDTLKGDSDPNSHRSLSKEALASLEKVETAIAEQFVTHINYSLPLIFLIFNTALTPTGLFWQDNPIMWIHLPASPKKVLLPYYDAIADLIILGRDHSKKYFGIEPSTIIQPYSKSQIDWLMQNTEMWPIACASFVGILDNHYPPNKLIQFCKLHTFVFPQIISKTPLNNALLVFTDGSSTGMAAYTLTDTTIKFQTNLNSAQLVELQALIAVLSAFPNQPLNIYTDSAYLAHSIPLLETVAQIKHISETAKLFLQCQQLIYNRSIPFYIGHVRAHSGLPGPIAQGNQRADLATKIVASNINT

SEQ ID NO: 8098 - protein, 585 aa, synthetic construct
LTAAIDILAPQQCAEPITWKSDEPVWVDQWPLTNDKLAAAQQLVQEQLEAGHITESSSPWNTPIFVIKKKSGKWRLLQDLRAVNATMVLMGALQPGLPSPVAPPQGYLKIIIDLKDCFFSIPLHPSDQKRFAFSLPSTNFKEPMQRFQWKVLPQGMANSPTLCQKYVATAIHKVRHAWKQMYIIHYMDDILIAGKDGQQVLQCFDQLKQELTAAGLHIAPEKVQLQDPYTYLGFELNGPKITNQKAVIRKDKLQTLNDFQKLLGDINWLRPYLKLTTGDLKPLFDTLKPDSDPNSHRSLSKEALASLEKVETAIAEQFVTHINYSLPLIFLIFNTALTPTGLFWQDNPIMWIHLPASPKKVLLPYYDAIADLIILGRDHSKKYFGIEPSTIIQPYSKSQIDWLMQNTEMWPIACASFVGILDNHYPPNKLIQFCKLHTFVFPQIISKTPLNNALLVFTDGSSTGMAAYTLTDTTIKFQTNLNSAQLVELQALIAVLSAFPNQPLNIYTDSAYLAHSIPLLETVAQIKHISETAKLFLQCQQLIYNRSIPFYIGHVRAHSGLPGPIAQGNQRADLATKIVASNINT

SEQ ID NO: 8099 - protein, 665 aa, unidentified
TLQLDDEYRLYSPLVKPDQNIQFWLEQFPQAWAETAGMGLAKQVPPQVIQLKASATPVSVRQYPLSKEAQEGIRPHVQRLIQQGILVPVQSPWNTPLLPVRKPGTNDYRPVQDLREVNKRVQDIHPTVPNPYNLLCALPPQRSWYTVLDLKDAFFCLRLHPTSQPLFAFEWRDPGTGRTGQLTWTRLPQGFKNSPTIFDEALHRDLANFRIQHPQVTLLQYVDDLLLAGATKQDCLEGTKALLLELSDLGYRASAKKAQICRREVTYLGYSLRDGQRWLTEARKKTVVQIPAPTTAKQVREFLGTAGFCRLWIPGFATLAAPLYPLTKEKGEFSWAPEHQKAFDAIKKALLSAPALALPDVTKPFTLYVDERKGVARGVLTQTLGPWRRPVAYLSKKLDPVASGWPVCLKAIAAVAILVKDADKLTLGQNITVIAPHALENIVRQPPDRWMTNARMTHYQSLLLTERVTFAPPAALNPATLLPEETDEPVTHDCHQLLIEETGVRKDLTDIPLTGEVLTWFTDGSSYVVEGKRMAGAAVVDGTRTIWASSLPEGTSAQKAELMALTQALRLAEGKSINIYTDSRYAFATAHVHGAIYKQRGLLTSAGREIKNKEEILSLLEALHLPKRLAIIHCPGHQKAKDPISRGNQMADRVAKQAAQGVNLL

SEQ ID NO: 8100 - protein, 665 aa, unidentified; identical to SEQ ID NO: 8099

SEQ ID NO: 8101 - protein, 665 aa, synthetic construct
TLQLDDEYRLYSPLVKPDQNIQFWLEQFPQAWAETAGMGLAKQVPPQVIQLKASATPVSVRQYPLSKEAQEGIRPHVQRLIQQGILVPVQSPWNTPLLPVRKPGTNDYRPVQDLREVNKRVQDIHPTVPNPYNLLCALPPQRSWYTVLDLKDAFFCLRLHPTSQPLFAFEWRDPGTGRTGQLTWTRLPQGFKNSPTIFNEALHRDLANFRIQHPQVTLLQYVDDLLLAGATKQDCLEGTKALLLELSDLGYRASAKKAQICRREVTYLGYSLRDGQRWLTEARKKTVVQIPAPTTAKQVREFLGTAGFCRLWIPGFATLAAPLYPLTKPKGEFSWAPEHQKAFDAIKKALLSAPALALPDVTKPFTLYVDERKGVARGVLTQTLGPWRRPVAYLSKKLDPVASGWPVCLKAIAAVAILVKDADKLTLGQNITVIAPHALENIVRQPPDRWMTNARMTHYQSLLLTERVTFAPPAALNPATLLPEETDEPVTHDCHQLLIEETGVRKDLTDIPLTGEVLTWFTDGSSYVVEGKRMAGAAVVDGTRTIWASSLPEGTSAQKAELMALTQALRLAEGKSINIYTDSRYAFATAHVHGAIYKQRGWLTSAGREIKNKEEILSLLEALHLPKRLAIIHCPGHQKAKDPISRGNQMADRVAKQAAQGVNLL

SEQ ID NO: 8102 - protein, 665 aa, synthetic construct; identical to SEQ ID NO: 8101

SEQ ID NO: 8103 - protein, 663 aa, synthetic construct
LDDEYRLYSPLVKPDQNIQFWLEQFPQAWAETAGMGLAKQVPPQVIQLKASATPVSVRQYPLSKEAQEGIRPHVQRLIQQGILVPVQSPWNTPLLPVRKPGTNDYRPVQDLREVNKRVQDIHPTVPNPYNLLCALPPQRSWYTVLDLKDAFFCLRLHPTSQPLFAFEWRDPGTGRTGQLTWTRLPQGFKNSPTIFNEALHRDLANFRIQHPQVTLLQYVDDLLLAGATKQDCLEGTKALLLELSDLGYRASAKKAQICRREVTYLGYSLRDGQRWLTEARKKTVVQIPAPTTAKQVREFLGKAGFCRLFIPGFATLAAPLYPLTKPKGEFSWAPEHQKAFDAIKKALLSAPALALPDVTKPFTLYVDERKGVARGVLTQTLGPWRRPVAYLSKKLDPVASGWPVCLKAIAAVAILVKDADKLTLGQNITVIAPHALENIVRQPPDRWMTNARMTHYQSLLLTERVTFAPPAALNPATLLPEETDEPVTHDCHQLLIEETGVRKDLTDIPLTGEVLTWFTDGSSYVVEGKRMAGAAVVDGTRTIWASSLPEGTSAQKAELMALTQALRLAEGKSINIYTDSRYAFATAHVHGAIYKQRGWLTSAGREIKNKEEILSLLEALHLPKRLAIIHCPGHQKAKDPISRGNQMADRVAKQAAQGVNLLP

SEQ ID NO: 8104 - protein, 663 aa, synthetic construct; identical to SEQ ID NO: 8103

SEQ ID NO: 8105 - protein, 751 aa, Macaque simian foamy virus
MDPLQLLQPLEAEIKGTKLKAHWNSGATITCVPEAFLEDERPIQTMLIKTIHGEKQQDVYYLTFKVQGRKVEAEVLASPYDYILLNPSDVPWLMKKPLQLTVLVPLHEYQERLLQQTALPKEQKELLQKLFLKYDALWQHWENQVGHRRIKPHNIATGTLAPRPQKQYPINPKAKPSIQIVIDDLLKQGVLIQQNSTMNTPVYPVPKPDGKWRMVLDYREVNKTIPLIAAQNQHSAGILSSIYRGKYKTTLDLTNGFWAHPITPESYWLTAFTWQGKQYCWTRLPQGFLNSPALFTADVVDLLKEIPNVQAYVDDIYISHDDPQEHLEQLEKIFSILLNAGYVVSLKKSEIAQREVEFLGFNITKEGRGLTDTFKQKLLNITPPKDLKQLQSILGLLNFARNFIPNYSELVKPLYTIVANANGKFISWTEDNSNQLQHIISVLNQADNLEERNPETRLIIKVNSSPSAGYIRYYNEGSKRPIMYVNYIFSKAEAKFTQTEKLLTTMHKGLIKAMDLAMGQEILVYSPIVSMTKIQRTPLPERKALPVRWITWMTYLEDPRIQFHYDKSLPELQQIPNVTEDVIAKTKHPSEFAMVFYTDGSAIKHPDVNKSHSAGMGIAQVQFIPEYKIVHQWSIPLGDHTAQLAEIAAVEFACKKALKISGPVLIVTDSFYVAESANKELPYWKSNGFLNNKKKPLRHVSKWKSIAECLQLKPDIIIMHEKGHQQPMTTLHTEGNNLADKLATQGSYVVH

SEQ ID NO: 8106 - protein, 751 aa, synthetic construct
MDPLQLLQPLEAEIKGTKLKAHWNSGATITCVPEAFLEDERPIQTMLIKTIHGEKQQDVYYLTFKVQGRKVEAEVLASPYDYILLNPSDVPWLMKKPLQLTVLVPLHEYQERLLQQTALPKEQKELLQKLFLKYDALWQHWENQVGHRRIKPHNIATGTLAPRPQKQYPINPKAKPSIQIVIDDLLKQGVLIQQNSTMNTPVYPVPKPDGKWRMVLDYREVNKTIPLIAAQNQHSAGILSSIYRGKYKTTLDLTNGFWAHPITPESYWLTAFTWQGKQYCWTRLPQGFLNSPALFNADVVDLLKEIPNVQAYVDDIYISHDDPQEHLEQLEKIFSILLNAGYVVSLKKSEIAQREVEFLGFNITKEGRGLTDTFKQKLLNITPPKDLKQLQSILGLLNFARNFIPNYSELVKPLYTIVAPANGKFISWTEDNSNQLQHIISVLNQADNLEERNPETRLIIKVNSSPSAGYIRYYNEGSKRPIMYVNYIFSKAEAKFTQTEKLLTTMHKGLIKAMDLAMGQEILVYSPIVSMTKIQRTPLPERKALPVRWITWMTYLEDPRIQFHYDKSLPELQQIPNVTEDVIAKTKHPSEFAMVFYTDGSAIKHPDVNKSHSAGMGIAQVQFIPEYKIVHQWSIPLGDHTAQLAEIAAVEFACKKALKISGPVLIVTDSFYVAESANKELPYWKSNGFLNNKKKPLRHVSKWKSIAECLQLKPDIIIMHEKGHQQPMTTLHTEGNNLADKLATQGSYVVH

SEQ ID NO: 8107 - protein, 751 aa, synthetic construct
MDPLQLLQPLEAEIKGTKLKAHWNSGATITCVPEAFLEDERPIQTMLIKTIHGEKQQDVYYLTFKVQGRKVEAEVLASPYDYILLNPSDVPWLMKKPLQLTVLVPLHEYQERLLQQTALPKEQKELLQKLFLKYDALWQHWENQVGHRRIKPHNIATGTLAPRPQKQYPINPKAKPSIQIVIDDLLKQGVLIQQNSTMNTPVYPVPKPDGKWRMVLDYREVNKTIPLIAAQNQHSAGILSSIYRGKYKTTLDLTNGFWAHPITPESYWLTAFTWQGKQYCWTRLPQGFLNSPALFNADVVDLLKEIPNVQAYVDDIYISHDDPQEHLEQLEKIFSILLNAGYVVSLKKSEIAQREVEFLGFNITKEGRGLTDTFKQKLLNITPPKDLKQLQSILGKLNFARNFIPNYSELVKPLYTIVAPANGKFISWTEDNSNQLQHIISVLNQADNLEERNPETRLIIKVNSSPSAGYIRYYNEGSKRPIMYVNYIFSKAEAKFTQTEKLLTTMHKGLIKAMDLAMGQEILVYSPIVSMTKIQRTPLPERKALPVRWITWMTYLEDPRIQFHYDKSLPELQQIPNVTEDVIAKTKHPSEFAMVFYTDGSAIKHPDVNKSHSAGMGIAQVQFIPEYKIVHQWSIPLGDHTAQLAEIAAVEFACKKALKISGPVLIVTDSFYVAESANKELPYWKSNGFLNNKKKPLRHVSKWKSIAECLQLKPDIIIMHEKGHQQPMTTLHTEGNNLADKLATQGSYVVH

SEQ ID NO: 8108 - protein, 662 aa, Macaque simian foamy virus
VPWLMKKPLQLTVLVPLHEYQERLLQQTALPKEQKELLQKLFLKYDALWQHWENQVGHRRIKPHNIATGTLAPRPQKQYPINPKAKPSIQIVIDDLLKQGVLIQQNSTMNTPVYPVPKPDGKWRMVLDYREVNKTIPLIAAQNQHSAGILSSIYRGKYKTTLDLTNGFWAHPITPESYWLTAFTWQGKQYCWTRLPQGFLNSPALFTADVVDLLKEIPNVQAYVDDIYISHDDPQEHLEQLEKIFSILLNAGYVVSLKKSEIAQREVEFLGFNITKEGRGLTDTFKQKLLNITPPKDLKQLQSILGLLNFARNFIPNYSELVKPLYTIVANANGKFISWTEDNSNQLQHIISVLNQADNLEERNPETRLIIKVNSSPSAGYIRYYNEGSKRPIMYVNYIFSKAEAKFTQTEKLLTTMHKGLIKAMDLAMGQEILVYSPIVSMTKIQRTPLPERKALPVRWITWMTYLEDPRIQFHYDKSLPELQQIPNVTEDVIAKTKHPSEFAMVFYTDGSAIKHPDVNKSHSAGMGIAQVQFIPEYKIVHQWSIPLGDHTAQLAEIAAVEFACKKALKISGPVLIVTDSFYVAESANKELPYWKSNGFLNNKKKPLRHVSKWKSIAECLQLKPDIIIMHEKGHQQPMTTLHTEGNNLADKLATQGSYVVH

SEQ ID NO: 8109 - protein, 662 aa, synthetic construct
VPWLMKKPLQLTVLVPLHEYQERLLQQTALPKEQKELLQKLFLKYDALWQHWENQVGHRRIKPHNIATGTLAPRPQKQYPINPKAKPSIQIVIDDLLKQGVLIQQNSTMNTPVYPVPKPDGKWRMVLDYREVNKTIPLIAAQNQHSAGILSSIYRGKYKTTLDLTNGFWAHPITPESYWLTAFTWQGKQYCWTRLPQGFLNSPALFNADVVDLLKEIPNVQAYVDDIYISHDDPQEHLEQLEKIFSILLNAGYVVSLKKSEIAQREVEFLGFNITKEGRGLTDTFKQKLLNITPPKDLKQLQSILGLLNFARNFIPNYSELVKPLYTIVAPANGKFISWTEDNSNQLQHIISVLNQADNLEERNPETRLIIKVNSSPSAGYIRYYNEGSKRPIMYVNYIFSKAEAKFTQTEKLLTTMHKGLIKAMDLAMGQEILVYSPIVSMTKIQRTPLPERKALPVRWITWMTYLEDPRIQFHYDKSLPELQQIPNVTEDVIAKTKHPSEFAMVFYTDGSAIKHPDVNKSHSAGMGIAQVQFIPEYKIVHQWSIPLGDHTAQLAEIAAVEFACKKALKISGPVLIVTDSFYVAESANKELPYWKSNGFLNNKKKPLRHVSKWKSIAECLQLKPDIIIMHEKGHQQPMTTLHTEGNNLADKLATQGSYVVH

SEQ ID NO: 8110 - protein, 662 aa, synthetic construct
VPWLMKKPLQLTVLVPLHEYQERLLQQTALPKEQKELLQKLFLKYDALWQHWENQVGHRRIKPHNIATGTLAPRPQKQYPINPKAKPSIQIVIDDLLKQGVLIQQNSTMNTPVYPVPKPDGKWRMVLDYREVNKTIPLIAAQNQHSAGILSSIYRGKYKTTLDLTNGFWAHPITPESYWLTAFTWQGKQYCWTRLPQGFLNSPALFNADVVDLLKEIPNVQAYVDDIYISHDDPQEHLEQLEKIFSILLNAGYVVSLKKSEIAQREVEFLGFNITKEGRGLTDTFKQKLLNITPPKDLKQLQSILGKLNFARNFIPNYSELVKPLYTIVAPANGKFISWTEDNSNQLQHIISVLNQADNLEERNPETRLIIKVNSSPSAGYIRYYNEGSKRPIMYVNYIFSKAEAKFTQTEKLLTTMHKGLIKAMDLAMGQEILVYSPIVSMTKIQRTPLPERKALPVRWITWMTYLEDPRIQFHYDKSLPELQQIPNVTEDVIAKTKHPSEFAMVFYTDGSAIKHPDVNKSHSAGMGIAQVQFIPEYKIVHQWSIPLGDHTAQLAEIAAVEFACKKALKISGPVLIVTDSFYVAESANKELPYWKSNGFLNNKKKPLRHVSKWKSIAECLQLKPDIIIMHEKGHQQPMTTLHTEGNNLADKLATQGSYVVH

SEQ ID NO: 8111 - protein, 751 aa, unidentified
MDPLQLLQPLEAEIKGTKLKAHWNSGATITCVPQAFLEEEVPIKNIWIKTIHGEKEQPVYYLTFKIQGRKVEAEVISSPYDYILVSPSDIPWLMKKPLQLTTLVPLQEYEERLLKQTMLTGSYKEKLQSLFLKYDALWQHWENQVGHRRIKPHHIATGTVNPRPQKQYPINPKAKASIQTVINDLLKQGVLIQQNSIMNTPVYPVPKPDGKWRMVLDYREVNKTIPLIAAQNQHSAGILSSIFRGKYKTTLDLSNGFWAHSITPESYWLTAFTWLGQQYCWTRLPQGFLNSPALFTADVVDLLKEVPNVQVYVDDIYISHDDPREHLEQLEKVFSLLLNAGYVVSLKKSEIAQHEVEFLGFNITKEGRGLTETFKQKLLNITPPRDLKQLQSILGLLNFARNFIPNFSELVKPLYNIIATANGKYITWTTDNSQQLQNIISMLNSAENLEERNPEVRLIMKVNTSPSAGYIRFYNEFAKRPIMYLNYVYTKAEVKFTNTEKLLTTIHKGLIKALDLGMGQEILVYSPIVSMTKIQKTPLPERKALPIRWITWMSYLEDPRIQFHYDKTLPELQQVPTVTDDIIAKIKHPSEFSMVFYTDGSAIKHPNVNKSHNAGMGIAQVQFKPEFTVINTWSIPLGDHTAQLAEVAAVEFACKKALKIDGPVLIVTDSFYVAESVNKELPYWQSNGFFNNKKKPLKHVSKWKSIADCIQLKPDIIIIHEKGHQPTASTFHTEGNNLADKLATQGSYVVN

SEQ ID NO: 8112 - protein, 751 aa, synthetic construct
MDPLQLLQPLEAEIKGTKLKAHWNSGATITCVPQAFLEEEVPIKNIWIKTIHGEKEQPVYYLTFKIQGRKVEAEVISSPYDYILVSPSDIPWLMKKPLQLTTLVPLQEYEERLLKQTMLTGSYKEKLQSLFLKYDALWQHWENQVGHRRIKPHHIATGTVNPRPQKQYPINPKAKASIQTVINDLLKQGVLIQQNSIMNTPVYPVPKPDGKWRMVLDYREVNKTIPLIAAQNQHSAGILSSIFRGKYKTTLDLSNGFWAHSITPESYWLTAFTWLGQQYCWTRLPQGFLNSPALFNADVVDLLKEVPNVQVYVDDIYISHDDPREHLEQLEKVFSLLLNAGYVVSLKKSEIAQHEVEFLGFNITKEGRGLTETFKQKLLNITPPRDLKQLQSILGLLNFARNFIPNFSELVKPLYNIIATAPGKYITWTTDNSQQLQNIISMLNSAENLEERNPEVRLIMKVNTSPSAGYIRFYNEFAKRPIMYLNYVYTKAEVKFTNTEKLLTTIHKGLIKALDLGMGQEILVYSPIVSMTKIQKTPLPERKALPIRWITWMSYLEDPRIQFHYDKTLPELQQVPTVTDDIIAKIKHPSEFSMVFYTDGSAIKHPNVNKSHNAGMGIAQVQFKPEFTVINTWSIPLGDHTAQLAEVAAVEFACKKALKIDGPVLIVTDSFYVAESVNKELPYWQSNGFFNNKKKPLKHVSKWKSIADCIQLKPDIIIIHEKGHQPTASTFHTEGNNLADKLATQGSYVVN

SEQ ID NO: 8113 - protein, 751 aa, synthetic construct
MDPLQLLQPLEAEIKGTKLKAHWNSGATITCVPQAFLEEEVPIKNIWIKTIHGEKEQPVYYLTFKIQGRKVEAEVISSPYDYILVSPSDIPWLMKKPLQLTTLVPLQEYEERLLKQTMLTGSYKEKLQSLFLKYDALWQHWENQVGHRRIKPHHIATGTVNPRPQKQYPINPKAKASIQTVINDLLKQGVLIQQNSIMNTPVYPVPKPDGKWRMVLDYREVNKTIPLIAAQNQHSAGILSSIFRGKYKTTLDLSNGFWAHSITPESYWLTAFTWLGQQYCWTRLPQGFLNSPALFNADVVDLLKEVPNVQVYVDDIYISHDDPREHLEQLEKVFSLLLNAGYVVSLKKSEIAQHEVEFLGFNITKEGRGLTETFKQKLLNITPPRDLKQLQSILGKLNFARNFIPNFSELVKPLYNIIATAPGKYITWTTDNSQQLQNIISMLNSAENLEERNPEVRLIMKVNTSPSAGYIRFYNEFAKRPIMYLNYVYTKAEVKFTNTEKLLTTIHKGLIKALDLGMGQEILVYSPIVSMTKIQKTPLPERKALPIRWITWMSYLEDPRIQFHYDKTLPELQQVPTVTDDIIAKIKHPSEFSMVFYTDGSAIKHPNVNKSHNAGMGIAQVQFKPEFTVINTWSIPLGDHTAQLAEVAAVEFACKKALKIDGPVLIVTDSFYVAESVNKELPYWQSNGFFNNKKKPLKHVSKWKSIADCIQLKPDIIIIHEKGHQPTASTFHTEGNNLADKLATQGSYVVN

SEQ ID NO: 8114 - protein, 662 aa, unidentified
IPWLMKKPLQLTTLVPLQEYEERLLKQTMLTGSYKEKLQSLFLKYDALWQHWENQVGHRRIKPHHIATGTVNPRPQKQYPINPKAKASIQTVINDLLKQGVLIQQNSIMNTPVYPVPKPDGKWRMVLDYREVNKTIPLIAAQNQHSAGILSSIFRGKYKTTLDLSNGFWAHSITPESYWLTAFTWLGQQYCWTRLPQGFLNSPALFTADVVDLLKEVPNVQVYVDDIYISHDDPREHLEQLEKVFSLLLNAGYVVSLKKSEIAQHEVEFLGFNITKEGRGLTETFKQKLLNITPPRDLKQLQSILGLLNFARNFIPNFSELVKPLYNIIATANGKYITWTTDNSQQLQNIISMLNSAENLEERNPEVRLIMKVNTSPSAGYIRFYNEFAKRPIMYLNYVYTKAEVKFTNTEKLLTTIHKGLIKALDLGMGQEILVYSPIVSMTKIQKTPLPERKALPIRWITWMSYLEDPRIQFHYDKTLPELQQVPTVTDDIIAKIKHPSEFSMVFYTDGSAIKHPNVNKSHNAGMGIAQVQFKPEFTVINTWSIPLGDHTAQLAEVAAVEFACKKALKIDGPVLIVTDSFYVAESVNKELPYWQSNGFFNNKKKPLKHVSKWKSIADCIQLKPDIIIIHEKGHQPTASTFHTEGNNLADKLATQGSYVVN

SEQ ID NO: 8115 - protein, 662 aa, synthetic construct
IPWLMKKPLQLTTLVPLQEYEERLLKQTMLTGSYKEKLQSLFLKYDALWQHWENQVGHRRIKPHHIATGTVNPRPQKQYPINPKAKASIQTVINDLLKQGVLIQQNSIMNTPVYPVPKPDGKWRMVLDYREVNKTIPLIAAQNQHSAGILSSIFRGKYKTTLDLSNGFWAHSITPESYWLTAFTWLGQQYCWTRLPQGFLNSPALFNADVVDLLKEVPNVQVYVDDIYISHDDPREHLEQLEKVFSLLLNAGYVVSLKKSEIAQHEVEFLGFNITKEGRGLTETFKQKLLNITPPRDLKQLQSILGLLNFARNFIPNFSELVKPLYNIIATAPGKYITWTTDNSQQLQNIISMLNSAENLEERNPEVRLIMKVNTSPSAGYIRFYNEFAKRPIMYLNYVYTKAEVKFTNTEKLLTTIHKGLIKALDLGMGQEILVYSPIVSMTKIQKTPLPERKALPIRWITWMSYLEDPRIQFHYDKTLPELQQVPTVTDDIIAKIKHPSEFSMVFYTDGSAIKHPNVNKSHNAGMGIAQVQFKPEFTVINTWSIPLGDHTAQLAEVAAVEFACKKALKIDGPVLIVTDSFYVAESVNKELPYWQSNGFFNNKKKPLKHVSKWKSIADCIQLKPDIIIIHEKGHQPTASTFHTEGNNLADKLATQGSYVVN

SEQ ID NO: 8116 - protein, 662 aa, synthetic construct
IPWLMKKPLQLTTLVPLQEYEERLLKQTMLTGSYKEKLQSLFLKYDALWQHWENQVGHRRIKPHHIATGTVNPRPQKQYPINPKAKASIQTVINDLLKQGVLIQQNSIMNTPVYPVPKPDGKWRMVLDYREVNKTIPLIAAQNQHSAGILSSIFRGKYKTTLDLSNGFWAHSITPESYWLTAFTWLGQQYCWTRLPQGFLNSPALFNADVVDLLKEVPNVQVYVDDIYISHDDPREHLEQLEKVFSLLLNAGYVVSLKKSEIAQHEVEFLGFNITKEGRGLTETFKQKLLNITPPRDLKQLQSILGKLNFARNFIPNFSELVKPLYNIIATAPGKYITWTTDNSQQLQNIISMLNSAENLEERNPEVRLIMKVNTSPSAGYIRFYNEFAKRPIMYLNYVYTKAEVKFTNTEKLLTTIHKGLIKALDLGMGQEILVYSPIVSMTKIQKTPLPERKALPIRWITWMSYLEDPRIQFHYDKTLPELQQVPTVTDDIIAKIKHPSEFSMVFYTDGSAIKHPNVNKSHNAGMGIAQVQFKPEFTVINTWSIPLGDHTAQLAEVAAVEFACKKALKIDGPVLIVTDSFYVAESVNKELPYWQSNGFFNNKKKPLKHVSKWKSIADCIQLKPDIIIIHEKGHQPTASTFHTEGNNLADKLATQGSYVVN

SEQ ID NO: 8117 - protein, 751 aa, Simian foamy virus
MNPLQLLQPLPAEVKGTKLLAHWNSGATITCIPESFLEDEQPIKQTLIKTIHGEKQQNVYYLTFKVKGRKVEAEVIASPYEYILLSPTDVPWLTQQPLQLTILVPLQEYQDRILNKTALPEEQKQQLKALFTKYDNLWQHWENQVGHRKIRPHNIATGDYPPRPQKQYPINPKAKPSIQIVIDDLLKQGVLTPQNSTMNTPVYPVPKPDGRWRMVLDYREVNKTIPLTAAQNQHSAGILATIVRQKYKTTLDLANGFWAHPITPDSYWLTAFTWQGKQYCWTRLPQGFLNSPALFTADAVDLLKEVPNVQVYVDDIYLSHDNPHEHIQQLEKVFQILLQAGYVVSLKKSEIGQRTVEFLGFNITKEGRGLTDTFKTKLLNVTPPKDLKQLQSILGLLNFARNFIPNFAELVQTLYNLIASSKGKYIEWTEDNTKQLNKVIEALNTASNLEERLPDQRLVIKVNTSPSAGYVRYYNESGKKPIMYLNYVFSKAELKFSMLEKLLTTMHKALIKAMDLAMGQEILVYSPIVSMTKIQKTPLPERKALPIRWITWMTYLEDPRIQFHYDKTLPELKHIPDVYTSSIPPLKHPSQYEGVFCTDGSAIKSPDPTKSNNAGMGIVHAIYNPEYKILNQWSIPLGHHTAQMAEIAAVEFACKKALKVPGPVLVITDSFYVAESANKELPYWKSNGFVNNKKEPLKHISKWKSIAECLSIKPDITIQHEKGHQPINTSIHTEGNALADKLATQGSYVVN

SEQ ID NO: 8118 - protein, 751 aa, synthetic construct
MNPLQLLQPLPAEVKGTKLLAHWNSGATITCIPESFLEDEQPIKQTLIKTIHGEKQQNVYYLTFKVKGRKVEAEVIASPYEYILLSPTDVPWLTQQPLQLTILVPLQEYQDRILNKTALPEEQKQQLKALFTKYDNLWQHWENQVGHRKIRPHNIATGDYPPRPQKQYPINPKAKPSIQIVIDDLLKQGVLTPQNSTMNTPVYPVPKPDGRWRMVLDYREVNKTIPLTAAQNQHSAGILATIVRQKYKTTLDLANGFWAHPITPDSYWLTAFTWQGKQYCWTRLPQGFLNSPALFNADAVDLLKEVPNVQVYVDDIYLSHDNPHEHIQQLEKVFQILLQAGYVVSLKKSEIGQRTVEFLGFNITKEGRGLTDTFKTKLLNVTPPKDLKQLQSILGLLNFARNFIPNFAELVQTLYNLIASSPGKYIEWTEDNTKQLNKVIEALNTASNLEERLPDQRLVIKVNTSPSAGYVRYYNESGKKPIMYLNYVFSKAELKFSMLEKLLTTMHKALIKAMDLAMGQEILVYSPIVSMTKIQKTPLPERKALPIRWITWMTYLEDPRIQFHYDKTLPELKHIPDVYTSSIPPLKHPSQYEGVFCTDGSAIKSPDPTKSNNAGMGIVHAIYNPEYKILNQWSIPLGHHTAQMAEIAAVEFACKKALKVPGPVLVITDSFYVAESANKELPYWKSNGFVNNKKEPLKHISKWKSIAECLSIKPDITIQHEKGHQPINTSIHTEGNALADKLATQGSYVVN

SEQ ID NO: 8119 - protein, 751 aa, synthetic construct
MNPLQLLQPLPAEVKGTKLLAHWNSGATITCIPESFLEDEQPIKQTLIKTIHGEKQQNVYYLTFKVKGRKVEAEVIASPYEYILLSPTDVPWLTQQPLQLTILVPLQEYQDRILNKTALPEEQKQQLKALFTKYDNLWQHWENQVGHRKIRPHNIATGDYPPRPQKQYPINPKAKPSIQIVIDDLLKQGVLTPQNSTMNTPVYPVPKPDGRWRMVLDYREVNKTIPLTAAQNQHSAGILATIVRQKYKTTLDLANGFWAHPITPDSYWLTAFTWQGKQYCWTRLPQGFLNSPALFNADAVDLLKEVPNVQVYVDDIYLSHDNPHEHIQQLEKVFQILLQAGYVVSLKKSEIGQRTVEFLGFNITKEGRGLTDTFKTKLLNVTPPKDLKQLQSILGKLNFARNFIPNFAELVQTLYNLIASSPGKYIEWTEDNTKQLNKVIEALNTASNLEERLPDQRLVIKVNTSPSAGYVRYYNESGKKPIMYLNYVFSKAELKFSMLEKLLTTMHKALIKAMDLAMGQEILVYSPIVSMTKIQKTPLPERKALPIRWITWMTYLEDPRIQFHYDKTLPELKHIPDVYTSSIPPLKHPSQYEGVFCTDGSAIKSPDPTKSNNAGMGIVHAIYNPEYKILNQWSIPLGHHTAQMAEIAAVEFACKKALKVPGPVLVITDSFYVAESANKELPYWKSNGFVNNKKEPLKHISKWKSIAECLSIKPDITIQHEKGHQPINTSIHTEGNALADKLATQGSYVVN

SEQ ID NO: 8120 - protein, 662 aa, Simian foamy virus
VPWLTQQPLQLTILVPLQEYQDRILNKTALPEEQKQQLKALFTKYDNLWQHWENQVGHRKIRPHNIATGDYPPRPQKQYPINPKAKPSIQIVIDDLLKQGVLTPQNSTMNTPVYPVPKPDGRWRMVLDYREVNKTIPLTAAQNQHSAGILATIVRQKYKTTLDLANGFWAHPITPDSYWLTAFTWQGKQYCWTRLPQGFLNSPALFTADAVDLLKEVPNVQVYVDDIYLSHDNPHEHIQQLEKVFQILLQAGYVVSLKKSEIGQRTVEFLGFNITKEGRGLTDTFKTKLLNVTPPKDLKQLQSILGLLNFARNFIPNFAELVQTLYNLIASSKGKYIEWTEDNTKQLNKVIEALNTASNLEERLPDQRLVIKVNTSPSAGYVRYYNESGKKPIMYLNYVFSKAELKFSMLEKLLTTMHKALIKAMDLAMGQEILVYSPIVSMTKIQKTPLPERKALPIRWITWMTYLEDPRIQFHYDKTLPELKHIPDVYTSSIPPLKHPSQYEGVFCTDGSAIKSPDPTKSNNAGMGIVHAIYNPEYKILNQWSIPLGHHTAQMAEIAAVEFACKKALKVPGPVLVITDSFYVAESANKELPYWKSNGFVNNKKEPLKHISKWKSIAECLSIKPDITIQHEKGHQPINTSIHTEGNALADKLATQGSYVVN

SEQ ID NO: 8121 - protein, 662 aa, synthetic construct
VPWLTQQPLQLTILVPLQEYQDRILNKTALPEEQKQQLKALFTKYDNLWQHWENQVGHRKIRPHNIATGDYPPRPQKQYPINPKAKPSIQIVIDDLLKQGVLTPQNSTMNTPVYPVPKPDGRWRMVLDYREVNKTIPLTAAQNQHSAGILATIVRQKYKTTLDLANGFWAHPITPDSYWLTAFTWQGKQYCWTRLPQGFLNSPALFNADAVDLLKEVPNVQVYVDDIYLSHDNPHEHIQQLEKVFQILLQAGYVVSLKKSEIGQRTVEFLGFNITKEGRGLTDTFKTKLLNVTPPKDLKQLQSILGLLNFARNFIPNFAELVQTLYNLIASSPGKYIEWTEDNTKQLNKVIEALNTASNLEERLPDQRLVIKVNTSPSAGYVRYYNESGKKPIMYLNYVFSKAELKFSMLEKLLTTMHKALIKAMDLAMGQEILVYSPIVSMTKIQKTPLPERKALPIRWITWMTYLEDPRIQFHYDKTLPELKHIPDVYTSSIPPLKHPSQYEGVFCTDGSAIKSPDPTKSNNAGMGIVHAIYNPEYKILNQWSIPLGHHTAQMAEIAAVEFACKKALKVPGPVLVITDSFYVAESANKELPYWKSNGFVNNKKEPLKHISKWKSIAECLSIKPDITIQHEKGHQPINTSIHTEGNALADKLATQGSYVVN

SEQ ID NO: 8122 - protein, 662 aa, synthetic construct
VPWLTQQPLQLTILVPLQEYQDRILNKTALPEEQKQQLKALFTKYDNLWQHWENQVGHRKIRPHNIATGDYPPRPQKQYPINPKAKPSIQIVIDDLLKQGVLTPQNSTMNTPVYPVPKPDGRWRMVLDYREVNKTIPLTAAQNQHSAGILATIVRQKYKTTLDLANGFWAHPITPDSYWLTAFTWQGKQYCWTRLPQGFLNSPALFNADAVDLLKEVPNVQVYVDDIYLSHDNPHEHIQQLEKVFQILLQAGYVVSLKKSEIGQRTVEFLGFNITKEGRGLTDTFKTKLLNVTPPKDLKQLQSILGKLNFARNFIPNFAELVQTLYNLIASSPGKYIEWTEDNTKQLNKVIEALNTASNLEERLPDQRLVIKVNTSPSAGYVRYYNESGKKPIMYLNYVFSKAELKFSMLEKLLTTMHKALIKAMDLAMGQEILVYSPIVSMTKIQKTPLPERKALPIRWITWMTYLEDPRIQFHYDKTLPELKHIPDVYTSSIPPLKHPSQYEGVFCTDGSAIKSPDPTKSNNAGMGIVHAIYNPEYKILNQWSIPLGHHTAQMAEIAAVEFACKKALKVPGPVLVITDSFYVAESANKELPYWKSNGFVNNKKEPLKHISKWKSIAECLSIKPDITIQHEKGHQPINTSIHTEGNALADKLATQGSYVVN

SEQ ID NO: 8123 - protein, 592 aa, Squirrel monkey retrovirus
PRSRAIDIPVPHADKISWKITDPVWVDQWPLTYEKTLAAIALVQEQLAAGHIEPTNSPWNTPIFIIKKKSGSWRLLQDLRAVNKVMVPMGALQPGLPSPVAIPLNYHKIVIDLKDCFFTIPLHPEDRPYFAFSVPQINFQSPMPRYQWKVLPQGMANSPTLCQKFVAAAIAPVRSQWPEAYILHYMDDILLACDSAEAAKACYAHIISCLTSYGLKIAPDKVQVSEPFSYLGFELHHQQVFTPRVCLKTDHLKTLNDFQKLLGDIQWLRPYLKLPTSALVPLNNILKGDPNPLSVRALTPEAKQSLALINKAIQNQSVQQISYNLPLVLLLLPTPHTPTAVFWQPNGTDPTKNGSPLLWLHLPASPSKVLLTYPSLLAMLIIKGRYTGRQLFGRDPHSIIIPYTQDQLTWLLQTSDEWAIALSSFTGDIDNHYPSDPVIQFAKLHQFIFPKITKCAPIPQATLVFTDGSSNGIAAYVIDNQPISIKSPYLSAQLVELYAILQVFTVLAHQPFNLYTDSAYIAQSVPLLETVPFIKSSTNATPLFSKLQQLILNRQHPFFIGHLRAHLNLPGPLAEGNALADAATQIFPIISD

SEQ ID NO: 8124 - protein, 592 aa, synthetic construct
PRSRAIDIPVPHADKISWKITDPVWVDQWPLTYEKTLAAIALVQEQLAAGHIEPTNSPWNTPIFIIKKKSGSWRLLQDLRAVNKVMVPMGALQPGLPSPVAIPLNYHKIVIDLKDCFFTIPLHPEDRPYFAFSVPQINFQSPMPRYQWKVLPQGMANSPTLCQKFVAAAIAPVRSQWPEAYILHYMDDILLACDSAEAAKACYAHIISCLTSYGLKIAPDKVQVSEPFSYLGFELHHQQVFTPRVCLKTDHLKTLNDFQKLLGDIQWLRPYLKLPTSALVPLNNILKPDPNPLSVRALTPEAKQSLALINKAIQNQSVQQISYNLPLVLLLLPTPHTPTAVFWQPNGTDPTKNGSPLLWLHLPASPSKVLLTYPSLLAMLIIKGRYTGRQLFGRDPHSIIIPYTQDQLTWLLQTSDEWAIALSSFTGDIDNHYPSDPVIQFAKLHQFIFPKITKCAPIPQATLVFTDGSSNGIAAYVIDNQPISIKSPYLSAQLVELYAILQVFTVLAHQPFNLYTDSAYIAQSVPLLETVPFIKSSTNATPLFSKLQQLILNRQHPFFIGHLRAHLNLPGPLAEGNALADAATQIFPIISD

SEQ ID NO: 8125 - protein, 592 aa, synthetic construct
PRSRAIDIPVPHADKISWKITDPVWVDQWPLTYEKTLAAIALVQEQLAAGHIEPTNSPWNTPIFIIKKKSGSWRLLQDLRAVNKVMVPMGALQPGLPSPVAPPLNYHKIVIDLKDCFFTIPLHPEDRPYFAFSVPQINFQSPMPRYQWKVLPQGMANSPTLCQKFVAAAIAPVRSQWPEAYILHYMDDILLACDSAEAAKACYAHIISCLTSYGLKIAPDKVQVSEPFSYLGFELHHQQVFTPRVCLKTDHLKTLNDFQKLLGDIQWLRPYLKLPTSALVPLNNILKPDPNPLSVRALTPEAKQSLALINKAIQNQSVQQISYNLPLVLLLLPTPHTPTAVFWQPNGTDPTKNGSPLLWLHLPASPSKVLLTYPSLLAMLIIKGRYTGRQLFGRDPHSIIIPYTQDQLTWLLQTSDEWAIALSSFTGDIDNHYPSDPVIQFAKLHQFIFPKITKCAPIPQATLVFTDGSSNGIAAYVIDNQPISIKSPYLSAQLVELYAILQVFTVLAHQPFNLYTDSAYIAQSVPLLETVPFIKSSTNATPLFSKLQQLILNRQHPFFIGHLRAHLNLPGPLAEGNALADAATQIFPIISD

SEQ ID NO: 8126 - protein, 585 aa, unidentified
LATAVDILAPQRYADPITWKSDEPVWVDQWPLTQEKLAAAQQLVQEQLQAGHIIESNSPWNTPIFVIKKKSGKWRLLQDLRAVNATMVLMGALQPGLPSPVAIPQGYFKIVIDLKDCFFTIPLQPVDQKRFAFSLPSTNFKQPMKRYQWKVLPQGMANSPTLCQKYVAAAIEPVRKSWAQMYIIHYMDDILIAGKLGEQVLQCFAQLKQALTTTGLQIAPEKVQLQDPYTYLGFQINGPKITNQKAVIRRDKLQTLNDFQKLLGDINWLRPYLHLTTGDLKPLFDILKGDSNPNSPRSLSEAALASLQKVETAIAEQFVTQIDYTQPLTFLIFNTTLTPTGLFWQNNPVMWVHLPASPKKVLLPYYDAIADLIILGRDNSKKYFGLEPSTIIQPYSKSQIHWLMQNTETWPIACASYAGNIDNHYPPNKLIQFCKLHAVVFPRIISKTPLDNALLVFTDGSSTGIAAYTFEKTTVRFKTSHTSAQLVELQALIAVLSAFPHRALNVYTDSAYLAHSIPLLETVSHIKHISDTAKFFLQCQQLIYNRSIPFYLGHIRAHSGLPGPLSQGNHITDLATKVVATTLTT

SEQ ID NO: 8127 - protein, 585 aa, synthetic construct
LATAVDILAPQRYADPITWKSDEPVWVDQWPLTQEKLAAAQQLVQEQLQAGHIIESNSPWNTPIFVIKKKSGKWRLLQDLRAVNATMVLMGALQPGLPSPVAPPQGYFKIVIDLKDCFFTIPLQPVDQKRFAFSLPSTNFKQPMKRYQWKVLPQGMANSPTLCQKYVAAAIEPVRKSWAQMYIIHYMDDILIAGKLGEQVLQCFAQLKQALTTTGLQIAPEKVQLQDPYTYLGFQINGPKITNQKAVIRRDKLQTLNDFQKLLGDINWLRPYLHLTTGDLKPLFDILKGDSNPNSPRSLSEAALASLQKVETAIAEQFVTQIDYTQPLTFLIFNTTLTPTGLFWQNNPVMWVHLPASPKKVLLPYYDAIADLIILGRDNSKKYFGLEPSTIIQPYSKSQIHWLMQNTETWPIACASYAGNIDNHYPPNKLIQFCKLHAVVFPRIISKTPLDNALLVFTDGSSTGIAAYTFEKTTVRFKTSHTSAQLVELQALIAVLSAFPHRALNVYTDSAYLAHSIPLLETVSHIKHISDTAKFFLQCQQLIYNRSIPFYLGHIRAHSGLPGPLSQGNHITDLATKVVATTLTT

SEQ ID NO: 8128 - protein, 650 aa, Walleye dermal sarcoma virus
SCQTKNTLNIDEYLLQFPDQLWASLPTDIGRMLVPPITIKIKDNASLPSIRQYPLPKDKTEGLRPLISSLENQGILIKCHSPCNTPIFPIKKAGRDEYRMIHDLRAINNIVAPLTAVVASPTTVLSNLAPSLHWFTVIDLSNAFFSVPIHKDSQYLFAFTFEGHQYTWTVLPQGFIHSPTLFSQALYQSLHKIKFKISSEICIYMDDVLIASKDRDTNLKDTAVMLQHLASEGHKVSKKKLQLCQQEVVYLGQLLTPEGRKILPDRKVTVSQFQQPTTIRQIRAFLGLVGYCRHWIPEFSIHSKFLEKQLKKDTAEPFQLDDQQVEAFNKLKHAITTAPVLVVPDPAKPFQLYTSHSEHASIAVLTQKHAGRTRPIAFLSSKFDAIESGLPPCLKACASIHRSLTQADSFILGAPLIIYTTHAICTLLQRDRSQLVTASRFSKWEADLLRPELTFVACSAVSPAHLYMQSCENNIPPHDCVLLTHTISRPRPDLSDLPIPDPDMTLFSDGSYTTGRGGAAVVMHRPVTDDFIIIHQQPGGASAQTAELLALAAACHLATDKTVNIYTDSRYAYGVVHDFGHLWMHRGFVTSAGTPIKNHKEIEYLLKQIMKPKQVSVIKIEAHTKGVSMEVRGNAAADEAAKNAVFLVQR

SEQ ID NO: 8129 - protein, 650 aa, synthetic construct
SCQTKNTLNIDEYLLQFPDQLWASLPTDIGRMLVPPITIKIKDNASLPSIRQYPLPKDKTEGLRPLISSLENQGILIKCHSPCNTPIFPIKKAGRDEYRMIHDLRAINNIVAPLTAVVASPTTVLSNLAPSLHWFTVIDLSNAFFSVPIHKDSQYLFAFTFEGHQYTWTVLPQGFIHSPTLFNQALYQSLHKIKFKISSEICIYMDDVLIASKDRDTNLKDTAVMLQHLASEGHKVSKKKLQLCQQEVVYLGQLLTPEGRKILPDRKVTVSQFQQPTTIRQIRAFLGLVGYCRHWIPEFSIHSKFLEKQLKPDTAEPFQLDDQQVEAFNKLKHAITTAPVLVVPDPAKPFQLYTSHSEHASIAVLTQKHAGRTRPIAFLSSKFDAIESGLPPCLKACASIHRSLTQADSFILGAPLIIYTTHAICTLLQRDRSQLVTASRFSKWEADLLRPELTFVACSAVSPAHLYMQSCENNIPPHDCVLLTHTISRPRPDLSDLPIPDPDMTLFSDGSYTTGRGGAAVVMHRPVTDDFIIIHQQPGGASAQTAELLALAAACHLATDKTVNIYTDSRYAYGVVHDFGHLWMHRGFVTSAGTPIKNHKEIEYLLKQIMKPKQVSVIKIEAHTKGVSMEVRGNAAADEAAKNAVFLVQR

SEQ ID NO: 8130 - protein, 650 aa, synthetic construct
SCQTKNTLNIDEYLLQFPDQLWASLPTDIGRMLVPPITIKIKDNASLPSIRQYPLPKDKTEGLRPLISSLENQGILIKCHSPCNTPIFPIKKAGRDEYRMIHDLRAINNIVAPLTAVVASPTTVLSNLAPSLHWFTVIDLSNAFFSVPIHKDSQYLFAFTFEGHQYTWTVLPQGFIHSPTLFNQALYQSLHKIKFKISSEICIYMDDVLIASKDRDTNLKDTAVMLQHLASEGHKVSKKKLQLCQQEVVYLGQLLTPEGRKILPDRKVTVSQFQQPTTIRQIRAFLGKVGYCRHFIPEFSIHSKFLEKQLKPDTAEPFQLDDQQVEAFNKLKHAITTAPVLVVPDPAKPFQLYTSHSEHASIAVLTQKHAGRTRPIAFLSSKFDAIESGLPPCLKACASIHRSLTQADSFILGAPLIIYTTHAICTLLQRDRSQLVTASRFSKWEADLLRPELTFVACSAVSPAHLYMQSCENNIPPHDCVLLTHTISRPRPDLSDLPIPDPDMTLFSDGSYTTGRGGAAVVMHRPVTDDFIIIHQQPGGASAQTAELLALAAACHLATDKTVNIYTDSRYAYGVVHDFGHLWMHRGFVTSAGTPIKNHKEIEYLLKQIMKPKQVSVIKIEAHTKGVSMEVRGNAAADEAAKNAVFLVQR

SEQ ID NO: 8131 - protein, 669 aa, Woolly monkey sarcoma virus
VLNLEEEYRLHEKPVPSSIDPSWLQLFPTVWAERAGMGLANQVPPVVVELRSGASPVAVRQYPMSKEAREGIRPHIQRFLDLGVLVPCQSPWNTPLLPVKKPGTNDYRPVQDLREINKRVQDIHPTVPNPYNLLSSLPPSHTWYSVLDLKDAFFCLKLHPNSQPLFAFEWRDPEKGNTGQLTWTRLPQGFKNSPTLFDEALHRDLAPFRALNPQVVLLQYVDDLLVAAPTYRDCKEGTQKLLQELSKLGYRVSAKKAQLCQKEVTYLGYLLKEGKRWLTPARKATVMKIPPPTTPRQVREFLGTAGFCRLWIPGFASLAAPLYPLTKESIPFIWTEEHQKAFDRIKEALLSAPALALPDLTKPFTLYVDERAGVARGVLTQTLGPWRRPVAYLSKKLDPVASGWPTCLKAVAAVALLLKDADKLTLGQNVTVIASHSLESIVRQPPDRWMTNARMTHYQSLLLNERVSFAPPAVLNPATLLPVESEATPVHRCSEILAEETGTRRDLKDQPLPGVPAWYTDGSSFIAEGKRRAGAAIVDGKRTVWASSLPEGTSAQKAELVALTQALRLAEGKDINIYTDSRYAFATAHIHGAIYKQRGLLTSAGKDIKNKEEILALLEAIHLPKRVAIIHCPGHQKGNDPVATGNRRADEAAKQAALSTRVLAETTKP

SEQ ID NO: 8132 - protein, 669 aa, synthetic construct
VLNLEEEYRLHEKPVPSSIDPSWLQLFPTVWAERAGMGLANQVPPVVVELRSGASPVAVRQYPMSKEAREGIRPHIQRFLDLGVLVPCQSPWNTPLLPVKKPGTNDYRPVQDLREINKRVQDIHPTVPNPYNLLSSLPPSHTWYSVLDLKDAFFCLKLHPNSQPLFAFEWRDPEKGNTGQLTWTRLPQGFKNSPTLFNEALHRDLAPFRALNPQVVLLQYVDDLLVAAPTYRDCKEGTQKLLQELSKLGYRVSAKKAQLCQKEVTYLGYLLKEGKRWLTPARKATVMKIPPPTTPRQVREFLGTAGFCRLWIPGFASLAAPLYPLTKPSIPFIWTEEHQKAFDRIKEALLSAPALALPDLTKPFTLYVDERAGVARGVLTQTLGPWRRPVAYLSKKLDPVASGWPTCLKAVAAVALLLKDADKLTLGQNVTVIASHSLESIVRQPPDRWMTNARMTHYQSLLLNERVSFAPPAVLNPATLLPVESEATPVHRCSEILAEETGTRRDLKDQPLPGVPAWYTDGSSFIAEGKRRAGAAIVDGKRTVWASSLPEGTSAQKAELVALTQALRLAEGKDINIYTDSRYAFATAHIHGAIYKQRGWLTSAGKDIKNKEEILALLEAIHLPKRVAIIHCPGHQKGNDPVATGNRRADEAAKQAALSTRVLAETTKP

SEQ ID NO: 8133 - protein, 669 aa, synthetic construct
VLNLEEEYRLHEKPVPSSIDPSWLQLFPTVWAERAGMGLANQVPPVVVELRSGASPVAVRQYPMSKEAREGIRPHIQRFLDLGVLVPCQSPWNTPLLPVKKPGTNDYRPVQDLREINKRVQDIHPTVPNPYNLLSSLPPSHTWYSVLDLKDAFFCLKLHPNSQPLFAFEWRDPEKGNTGQLTWTRLPQGFKNSPTLFNEALHRDLAPFRALNPQVVLLQYVDDLLVAAPTYRDCKEGTQKLLQELSKLGYRVSAKKAQLCQKEVTYLGYLLKEGKRWLTPARKATVMKIPPPTTPRQVREFLGKAGFCRLFIPGFASLAAPLYPLTKPSIPFIWTEEHQKAFDRIKEALLSAPALALPDLTKPFTLYVDERAGVARGVLTQTLGPWRRPVAYLSKKLDPVASGWPTCLKAVAAVALLLKDADKLTLGQNVTVIASHSLESIVRQPPDRWMTNARMTHYQSLLLNERVSFAPPAVLNPATLLPVESEATPVHRCSEILAEETGTRRDLKDQPLPGVPAWYTDGSSFIAEGKRRAGAAIVDGKRTVWASSLPEGTSAQKAELVALTQALRLAEGKDINIYTDSRYAFATAHIHGAIYKQRGWLTSAGKDIKNKEEILALLEAIHLPKRVAIIHCPGHQKGNDPVATGNRRADEAAKQAALSTRVLAETTKP

SEQ ID NO: 8134 - protein, 671 aa, unidentified
TLNIEDEYRLHETSKEPDVPLGSTWLSDFPQAWAETGGMGLAVRQAPLIIPLKATSTPVSIKQYPMSQEARLGIKPHIQRLLDQGILVPCQSPWNTPLLPVKKPGTNDYRPVQDLREVNKRVEDIHPTVPNPYNLLSGLPPSHQWYTVLDLKDAFFCLRLHPTSQPLFAFEWRDPEMGISGQLTWTRLPQGFKNSPTLFDEALHRDLADFRIQHPDLILLQYVDDLLLAATSEQDCQRGTRALLQTLGNLGYRASAKKAQICQKQVKYLGYLLKEGQRWLTEARKETVMGQPTPKTPRQLREFLGTAGFCRLWIPGFAEMAAPLYPLTKTGTLFNWGPDQQKAYQEIKQALLTAPALGLPDLTKPFELFVDEKQGYAKGVLTQKLGPWRRPVAYLSKKLDPVAAGWPPCLRMVAAIAVLTKDAGKLTMGQPLVILAPHAVEALVKQPPDRWLSNARMTHYQAMLLDTDRVQFGPVVALNPATLLPLPEKEAPHDCLEILAETHGTRPDLTDQPIPDADYTWYTDGSSFLQEGQRRAGAAVTTETEVIWARALPAGTSAQRAELIALTQALKMAEGKKLNVYTDSRYAFATAHVHGEIYRRRGLLTSEGREIKNKNEILALLKALFLPKRLSIIHCPGHQKGNSAEARGNRMADQAAREAAMKAVLETSTLL

SEQ ID NO: 8135 - protein, 671 aa, synthetic construct
TLNIEDEYRLHETSKEPDVPLGSTWLSDFPQAWAETGGMGLAVRQAPLIIPLKATSTPVSIKQYPMSQEARLGIKPHIQRLLDQGILVPCQSPWNTPLLPVKKPGTNDYRPVQDLREVNKRVEDIHPTVPNPYNLLSGLPPSHQWYTVLDLKDAFFCLRLHPTSQPLFAFEWRDPEMGISGQLTWTRLPQGFKNSPTLFNEALHRDLADFRIQHPDLILLQYVDDLLLAATSEQDCQRGTRALLQTLGNLGYRASAKKAQICQKQVKYLGYLLKEGQRWLTEARKETVMGQPTPKTPRQLREFLGTAGFCRLWIPGFAEMAAPLYPLTKPGTLFNWGPDQQKAYQEIKQALLTAPALGLPDLTKPFELFVDEKQGYAKGVLTQKLGPWRRPVAYLSKKLDPVAAGWPPCLRMVAAIAVLTKDAGKLTMGQPLVILAPHAVEALVKQPPDRWLSNARMTHYQAMLLDTDRVQFGPVVALNPATLLPLPEKEAPHDCLEILAETHGTRPDLTDQPIPDADYTWYTDGSSFLQEGQRRAGAAVTTETEVIWARALPAGTSAQRAELIALTQALKMAEGKKLNVYTDSRYAFATAHVHGEIYRRRGWLTSEGREIKNKNEILALLKALFLPKRLSIIHCPGHQKGNSAEARGNRMADQAAREAAMKAVLETSTLL

SEQ ID NO: 8136 - protein, 671 aa, synthetic construct
TLNIEDEYRLHETSKEPDVPLGSTWLSDFPQAWAETGGMGLAVRQAPLIIPLKATSTPVSIKQYPMSQEARLGIKPHIQRLLDQGILVPCQSPWNTPLLPVKKPGTNDYRPVQDLREVNKRVEDIHPTVPNPYNLLSGLPPSHQWYTVLDLKDAFFCLRLHPTSQPLFAFEWRDPEMGISGQLTWTRLPQGFKNSPTLFNEALHRDLADFRIQHPDLILLQYVDDLLLAATSEQDCQRGTRALLQTLGNLGYRASAKKAQICQKQVKYLGYLLKEGQRWLTEARKETVMGQPTPKTPRQLREFLGKAGFCRLFIPGFAEMAAPLYPLTKPGTLFNWGPDQQKAYQEIKQALLTAPALGLPDLTKPFELFVDEKQGYAKGVLTQKLGPWRRPVAYLSKKLDPVAAGWPPCLRMVAAIAVLTKDAGKLTMGQPLVILAPHAVEALVKQPPDRWLSNARMTHYQAMLLDTDRVQFGPVVALNPATLLPLPEKEAPHDCLEILAETHGTRPDLTDQPIPDADYTWYTDGSSFLQEGQRRAGAAVTTETEVIWARALPAGTSAQRAELIALTQALKMAEGKKLNVYTDSRYAFATAHVHGEIYRRRGWLTSEGREIKNKNEILALLKALFLPKRLSIIHCPGHQKGNSAEARGNRMADQAAREAAMKAVLETSTLL

SEQ ID NO: 8137 - protein, 677 aa, unidentified
TLNIEDEYRLHETSKEPDVSLGSTWLSDFPQAWAETGGMGLAVRQAPLIIPLKATSTPVSIKQYPMSQEARLGIKPHIQRLLDQGILVPCQSPWNTPLLPVKKPGTNDYRPVQDLREVNKRVEDIHPTVPNPYNLLSGLPPSHQWYTVLDLKDAFFCLRLHPTSQPLFAFEWRDPEMGISGQLTWTRLPQGFKNSPTLFNEALHRDLADFRIQHPDLILLQYVDDLLLAATSELDCQQGTRALLQTLGNLGYRASAKKAQICQKQVKYLGYLLKEGQRWLTEARKETVMGQPTPKTPRQLREFLGKAGFCRLFIPGFAEMAAPLYPLTKPGTLFNWGPDQQKAYQEIKQALLTAPALGLPDLTKPFELFVDEKQGYAKGVLTQKLGPWRRPVAYLSKKLDPVAAGWPPCLRMVAAIAVLTKDAGKLTMGQPLVILAPHAVEALVKQPPDRWLSNARMTHYQALLLDTDRVQFGPVVALNPATLLPLPEEGLQHNCLDILAEAHGTRPDLTDQPLPDADHTWYTDGSSLLQEGQRKAGAAVTTETEVIWAKALPAGTSAQRAELIALTQALKMAEGKKLNVYTDSRYAFATAHIHGEIYRRRGWLTSEGKEIKNKDEILALLKALFLPKRLSIIHCPGHQKGHSAEARGNRMADQAARKAAITETPDTSTLLIENSSP

SEQ ID NO: 8138-10050 - skipped (1913 entries)

SEQ ID NO: 10051 - DNA, 24 bp, synthetic construct
  source 1..24: mol_type = other DNA
gttgtagctccctttctcatttcg

SEQ ID NO: 10052 - DNA, 25 bp, synthetic construct
  source 1..25: mol_type = other DNA
gttgtagctccctttttcatttcgc

SEQ ID NO: 10053 - DNA, 14 bp, synthetic construct
  source 1..14: mol_type = other DNA
gttttagtactctg

SEQ ID NO: 10054 - DNA, 14 bp, synthetic construct
  source 1..14: mol_type = other DNA
gttttagtactctg

SEQ ID NO: 10055 - DNA, 14 bp, synthetic construct
  source 1..14: mol_type = other DNA
gttttagtactctg

SEQ ID NO: 10056 - DNA, 14 bp, synthetic construct
  source 1..14: mol_type = other DNA
gttttagtactctg

SEQ ID NO: 10057 - DNA, 12 bp, synthetic construct
  source 1..12: mol_type = other DNA
gttttagagcta

SEQ ID NO: 10058 - DNA, 12 bp, synthetic construct
  source 1..12: mol_type = other DNA
gttttagagcta

SEQ ID NO: 10059 - DNA, 12 bp, synthetic construct
  source 1..12: mol_type = other DNA
gttttagagcta

SEQ ID NO: 10060 - DNA, 12 bp, synthetic construct
  source 1..12: mol_type = other DNA
gttttagagcta

SEQ ID NO: 10061 - DNA, 14 bp, synthetic construct
  source 1..14: mol_type = other DNA
gtctttgtactctg

SEQ ID NO: 10062 - DNA, 16 bp, synthetic construct
  source 1..16: mol_type = other DNA
gctatagttccttact

SEQ ID NO: 10063 - DNA, 14 bp, synthetic construct
  source 1..14: mol_type = other DNA
gtcttagtactctg

SEQ ID NO: 10064 - DNA, 14 bp, synthetic construct
  source 1..14: mol_type = other DNA
gtcttagtactctg

SEQ ID NO: 10065 - DNA, 14 bp, synthetic construct
  source 1..14: mol_type = other DNA
gtcttagtactctg

SEQ ID NO: 10066 - DNA, 14 bp, synthetic construct
  source 1..14: mol_type = other DNA
gtcttagtactctg

SEQ ID NO: 10067 - DNA, 12 bp, synthetic construct
  source 1..12: mol_type = other DNA
actggggttcag

SEQ ID NO: 10068 - DNA, 12 bp, synthetic construct
  source 1..12: mol_type = other DNA
gttttagtccct

SEQ ID NO: 10069 - DNA, 16 bp, synthetic construct
  source 1..16: mol_type = other DNA
gtcatagttcccctga

SEQ ID NO: 10070 - DNA, 12 bp, synthetic construct
  source 1..12: mol_type = other DNA
gttttagagcta

SEQ ID NO: 10071 - DNA, 24 bp, synthetic construct
  source 1..24: mol_type = other DNA
gttgtagctccctttctcatttcg

SEQ ID NO: 10072 - DNA, 12 bp, synthetic construct
  source 1..12: mol_type = other DNA
gttttagagcta

SEQ ID NO: 10073 - DNA, 12 bp, synthetic construct
  source 1..12: mol_type = other DNA
gttttagagcta

SEQ ID NO: 10074 - DNA, 17 bp, synthetic construct
  source 1..17: mol_type = other DNA
gtttaagagctatgctg

SEQ ID NO: 10075 - DNA, 17 bp, synthetic construct
  source 1..17: mol_type = other DNA
gtttaagagctatgctg

SEQ ID NO: 10076 - DNA, 17 bp, synthetic construct
  source 1..17: mol_type = other DNA
gtttaagagctatgctg

SEQ ID NO: 10077 - DNA, 12 bp, synthetic construct
  source 1..12: mol_type = other DNA
gttttagagcta

SEQ ID NO: 10078 - DNA, 12 bp, synthetic construct
  source 1..12: mol_type = other DNA
gttttagagcta

SEQ ID NO: 10079 - DNA, 12 bp, synthetic construct
  source 1..12: mol_type = other DNA
gttttagagcta

SEQ ID NO: 10080 - DNA, 12 bp, synthetic construct
  source 1..12: mol_type = other DNA
gttttagagcta

SEQ ID NO: 10081 - DNA, 12 bp, synthetic construct
  source 1..12: mol_type = other DNA
gttttagagcta

SEQ ID NO: 10082 - DNA, 17 bp, synthetic construct
  source 1..17: mol_type = other DNA
gtttaagagctatgctg

SEQ ID NO: 10083 - DNA, 17 bp, synthetic construct
  source 1..17: mol_type = other DNA
gtttaagagctatgctg

SEQ ID NO: 10084 - DNA, 14 bp, synthetic construct
  source 1..14: mol_type = other DNA
gtctttgtactctg

SEQ ID NO: 10085 - DNA, 14 bp, synthetic construct
  source 1..14: mol_type = other DNA
gtctttgtactctg

SEQ ID NO: 10086 - DNA, 14 bp, synthetic construct
  source 1..14: mol_type = other DNA
gtctttgtactctg

SEQ ID NO: 10087 - DNA, 14 bp, synthetic construct
  source 1..14: mol_type = other DNA
gtctttgtactctg

SEQ ID NO: 10088 - DNA, 14 bp, synthetic construct
  source 1..14: mol_type = other DNA
gttttagtactctg

SEQ ID NO: 10089 - DNA, 14 bp, synthetic construct
  source 1..14: mol_type = other DNA
gttttagtactctg

SEQ ID NO: 10090-10150 - skipped (61 entries)

SEQ ID NO: 10151 - DNA, 93 bp, synthetic construct
  source 1..93: mol_type = other DNA
cgaaatgagaaccgttgctacaataaggccgtctgaaaagatgtgccgcaacgctctgccccttaaagcttctgctttaaggggcatcgttta

SEQ ID NO: 10152 - DNA, 82 bp, synthetic construct
  source 1..82: mol_type = other DNA
gcgaaatgaaaaacgttgttacaataagagatgaatttctcgcaaagctctgcctcttgaaatttcggtttcaagaggcatc

SEQ ID NO: 10153 - DNA, 58 bp, synthetic construct
  source 1..58: mol_type = other DNA
cagaatctactaaaacaaggcaaaatgccgtgtttatctcgtcaacttgttggcgaga

SEQ ID NO: 10154 - DNA, 58 bp, synthetic construct; identical to SEQ ID NO: 10153
  source 1..58: mol_type = other DNA

SEQ ID NO: 10155 - DNA, 58 bp, synthetic construct; identical to SEQ ID NO: 10153
  source 1..58: mol_type = other DNA

SEQ ID NO: 10156 - DNA, 58 bp, synthetic construct; identical to SEQ ID NO: 10153
  source 1..58: mol_type = other DNA

SEQ ID NO: 10157 - DNA, 60 bp, synthetic construct
  source 1..60: mol_type = other DNA
tagcaagttaaaataaggctagtccgttatcaacttgaaaaagtggcaccgagtcggtgc

SEQ ID NO: 10158 - DNA, 60 bp, synthetic construct; identical to SEQ ID NO: 10157
  source 1..60: mol_type = other DNA

SEQ ID NO: 10159 - DNA, 60 bp, synthetic construct; identical to SEQ ID NO: 10157
  source 1..60: mol_type = other DNA

SEQ ID NO: 10160 - DNA, 60 bp, synthetic construct; identical to SEQ ID NO: 10157
  source 1..60: mol_type = other DNA

SEQ ID NO: 10161 - DNA, 66 bp, synthetic construct
  source 1..66: mol_type = other DNA
cagaagctacaaagataaggcttcatgccgaaatcaacaccctgtcattttatggcagggtgtttt

SEQ ID NO: 10162 - DNA, 127 bp, synthetic construct
  source 1..127: mol_type = other DNA
ggtaagttgctatagtaagggcaacagacccgaggcgttggggatcgcctagcccgtgtttacgggctctccccatattcaaaataatgacagacgagcaccttggagcatttatctccgaggtgct

SEQ ID NO: 10163 - DNA, 58 bp, synthetic construct
  source 1..58: mol_type = other DNA
cagaatctactaagacaaggcaaaatgccgtgtttatctcgtcaacttgttggcgaga

SEQ ID NO: 10164 - DNA, 58 bp, synthetic construct; identical to SEQ ID NO: 10163
  source 1..58: mol_type = other DNA

SEQ ID NO: 10165 - DNA, 58 bp, synthetic construct; identical to SEQ ID NO: 10163
  source 1..58: mol_type = other DNA

SEQ ID NO: 10166 - DNA, 58 bp, synthetic construct; identical to SEQ ID NO: 10163
  source 1..58: mol_type = other DNA

SEQ ID NO: 10167 - DNA, 76 bp, synthetic construct
  source 1..76: mol_type = other DNA
ctgaacctcagtaagcattggctcgtttccaatgttgattgctccgccggtgctccttatttttaagggcgccggc

SEQ ID NO: 10168 - DNA, 57 bp, synthetic construct
  source 1..57: mol_type = other DNA
agggactaaaataaagagtttgcgggactctgcggggttacaatcccctaaaaccgc

SEQ ID NO: 10169 - DNA, 98 bp, synthetic construct
  source 1..98: mol_type = other DNA
tcagggttactatgataagggctttctgcctaaggcagactgacccgcggcgttggggatcgcctgtcgcccgcttttggcgggcattccccatcctt

SEQ ID NO: 10170 - DNA, 60 bp, synthetic construct; identical to SEQ ID NO: 10157
  source 1..60: mol_type = other DNA

SEQ ID NO: 10171 - DNA, 93 bp, synthetic construct; identical to SEQ ID NO: 10151
  source 1..93: mol_type = other DNA

SEQ ID NO: 10172 - DNA, 60 bp, synthetic construct; identical to SEQ ID NO: 10157
  source 1..60: mol_type = other DNA

SEQ ID NO: 10173 - DNA, 60 bp, synthetic construct; identical to SEQ ID NO: 10157
  source 1..60: mol_type = other DNA

SEQ ID NO: 10174 - DNA, 65 bp, synthetic construct
  source 1..65: mol_type = other DNA
cagcatagcaagtttaaataaggctagtccgttatcaacttgaaaaagtggcaccgagtcggtgc

SEQ ID NO: 10175 - DNA, 65 bp, synthetic construct; identical to SEQ ID NO: 10174
  source 1..65: mol_type = other DNA

SEQ ID NO: 10176 - DNA, 65 bp, synthetic construct; identical to SEQ ID NO: 10174
  source 1..65: mol_type = other DNA

SEQ ID NO: 10177 - DNA, 60 bp, synthetic construct; identical to SEQ ID NO: 10157
  source 1..60: mol_type = other DNA

SEQ ID NO: 10178 - DNA, 60 bp, synthetic construct; identical to SEQ ID NO: 10157
  source 1..60: mol_type = other DNA

SEQ ID NO: 10179 - DNA, 60 bp, synthetic construct; identical to SEQ ID NO: 10157
  source 1..60: mol_type = other DNA

SEQ ID NO: 10180 - DNA, 60 bp, synthetic construct; identical to SEQ ID NO: 10157
  source 1..60: mol_type = other DNA

SEQ ID NO: 10181 - DNA, 60 bp, synthetic construct; identical to SEQ ID NO: 10157
  source 1..60: mol_type = other DNA

SEQ ID NO: 10182 - DNA, 65 bp, synthetic construct; identical to SEQ ID NO: 10174
  source 1..65: mol_type = other DNA

SEQ ID NO: 10183 - DNA, 65 bp, synthetic construct; identical to SEQ ID NO: 10174
  source 1..65: mol_type = other DNA

SEQ ID NO: 10184 - DNA, 66 bp, synthetic construct; identical to SEQ ID NO: 10161
  source 1..66: mol_type = other DNA

SEQ ID NO: 10185 - DNA, 66 bp, synthetic construct; identical to SEQ ID NO: 10161
  source 1..66: mol_type = other DNA

SEQ ID NO: 10186 - DNA, 66 bp, synthetic construct; identical to SEQ ID NO: 10161
  source 1..66: mol_type = other DNA

SEQ ID NO: 10187 - DNA, 66 bp, synthetic construct; identical to SEQ ID NO: 10161
  source 1..66: mol_type = other DNA

SEQ ID NO: 10188 - DNA, 62 bp, synthetic construct
  source 1..62: mol_type = other DNA
cagaatctactgaaacaagacaatatgtcgtgtttatcccatcaatttattggtgggatttt

SEQ ID NO: 10189 - DNA, 62 bp, synthetic construct; identical to SEQ ID NO: 10188
  source 1..62: mol_type = other DNA

SEQ ID NO: 10190-10192 - skipped (3 entries)

SEQ ID NO: 10193 - DNA, 68 bp, synthetic construct
  source 1..68: mol_type = other DNA
tagcaagttaaaataaggctagtccgttatcaacttggacttcggtccaagtggcaccgagtcggtgc

SEQ ID NO: 10194 - DNA, 68 bp, synthetic construct
  source 1..68: mol_type = other DNA
tagcaagttaaaataaggctagtccgttatcaacttggagcttgctccaagtggcaccgagtcggtgc

SEQ ID NO: 10195 - DNA, 76 bp, synthetic construct
  source 1..76: mol_type = other DNA
gttttagagctagaaatagcaagttaaaataaggctagtccgttatcgacttgaaaaagtcgcaccgagtcggtgc

SEQ ID NO: 10196-11094 - skipped (899 entries)

SEQ ID NO: 11095 - protein, 9 aa, synthetic construct
PAAKRVKLD

SEQ ID NO: 11096 - protein, 1367 aa, synthetic construct
DKKYSIGLDIGTNSVGWAVITDEYKVPSKKFKVLGNTDRHSIKKNLIGALLFDSGETAEATRLKRTARRRYTRRKNRICYLQEIFSNEMAKVDDSFFHRLEESFLVEEDKKHERHPIFGNIVDEVAYHEKYPTIYHLRKKLVDSTDKADLRLIYLALAHMIKFRGHFLIEGDLNPDNSDVDKLFIQLVQTYNQLFEENPINASGVDAKAILSARLSKSRRLENLIAQLPGEKKNGLFGNLIALSLGLTPNFKSNFDLAEDAKLQLSKDTYDDDLDNLLAQIGDQYADLFLAAKNLSDAILLSDILRVNTEITKAPLSASMIKRYDEHHQDLTLLKALVRQQLPEKYKEIFFDQSKNGYAGYIDGGASQEEFYKFIKPILEKMDGTEELLVKLNREDLLRKQRTFDNGSIPHQIHLGELHAILRRQEDFYPFLKDNREKIEKILTFRIPYYVGPLARGNSRFAWMTRKSEETITPWNFEEVVDKGASAQSFIERMTNFDKNLPNEKVLPKHSLLYEYFTVYNELTKVKYVTEGMRKPAFLSGEQKKAIVDLLFKTNRKVTVKQLKEDYFKKIECFDSVEISGVEDRFNASLGTYHDLLKIIKDKDFLDNEENEDILEDIVLTLTLFEDREMIEERLKTYAHLFDDKVMKQLKRRRYTGWGRLSRKLINGIRDKQSGKTILDFLKSDGFANRNFMQLIHDDSLTFKEDIQKAQVSGQGDSLHEHIANLAGSPAIKKGILQTVKVVDELVKVMGRHKPENIVIEMARENQTTQKGQKNSRERMKRIEEGIKELGSQILKEHPVENTQLQNEKLYLYYLQNGRDMYVDQELDINRLSDYDVDHIVPQSFLKDDSIDNKVLTRSDKARGKSDNVPSEEVVKKMKNYWRQLLNAKLITQRKFDNLTKAERGGLSELDKAGFIKRQLVETRQITKHVAQILDSRMNTKYDENDKLIREVKVITLKSKLVSDFRKDFQFYKVREINNYHHAHDAYLNAVVGTALIKKYPKLESEFVYGDYKVYDVRKMIAKSEQEIGKATAKYFFYSNIMNFFKTEITLANGEIRKRPLIETNGETGEIVWDKGRDFATVRKVLSMPQVNIVKKTEVQTGGFSKESILPKRNSDKLIARKKDWDPKKYGGFDSPTVAYSVLVVAKVEKGKSKKLKSVKELLGITIMERSSFEKNPIDFLEAKGYKEVKKDLIIKLPKYSLFELENGRKRMLASAGELQKGNELALPSKYVNFLYLASHYEKLKGSPEDNEQKQLFVEQHKHYLDEIIEQISEFSKRVILADANLDKVLSAYNKHRDKPIREQAENIIHLFTLTNLGAPAAFKYFDTTIDRKRYTSTKEVLDATLIHQSITGLYETRIDLSQLGGD

SEQ ID NO: 11097 - protein, 10 aa, synthetic construct
KRTADGSEFE

SEQ ID NO: 11098 - protein, 19 aa, synthetic construct
KRTADGSEFESPKKKAKVE

SEQ ID NO: 11099 - protein, 29 aa, synthetic construct
KRTADGSEFEKRTADGSEFESPKKKAKVE

SEQ ID NO: 11100-15400 - skipped (4301 entries)

SEQ ID NO: 15401 - protein, 46 aa, synthetic construct
AEAAAKEAAAKEAAAKEAAAKALEAEAAAKEAAAKEAAAKEAAAKA

SEQ ID NO: 15402 - protein, 46 aa, synthetic construct; identical to SEQ ID NO: 15401

SEQ ID NO: 15403 - protein, 46 aa, synthetic construct; identical to SEQ ID NO: 15401

SEQ ID NO: 15404 - protein, 46 aa, synthetic construct; identical to SEQ ID NO: 15401

SEQ ID NO: 15405 - protein, 20 aa, synthetic construct
GGGGSGGGGSGGGGSGGGGS

SEQ ID NO: 15406 - protein, 30 aa, synthetic construct
GGGGSGGGGSGGGGSGGGGSGGGGSGGGGS

SEQ ID NO: 15407 - protein, 30 aa, synthetic construct; identical to SEQ ID NO: 15406

SEQ ID NO: 15408 - protein, 18 aa, synthetic construct
GSSGSSGSSGSSGSSGSS

SEQ ID NO: 15409 - protein, 20 aa, synthetic construct
EAAAKEAAAKEAAAKEAAAK

SEQ ID NO: 15410 - protein, 30 aa, synthetic construct
EAAAKEAAAKEAAAKEAAAKEAAAKEAAAK

SEQ ID NO: 15411 - protein, 11 aa, synthetic construct
PAPAPAPAPAP

SEQ ID NO: 15412 - protein, 13 aa, synthetic construct
PAPAPAPAPAPAP

SEQ ID NO: 15413 - protein, 13 aa, synthetic construct
PAPAPAPAPAPAP

SEQ ID NO: 15414 - protein, 13 aa, synthetic construct
PAPAPAPAPAPAP

SEQ ID NO: 15415 - protein, 13 aa, synthetic construct
PAPAPAPAPAPAP

SEQ ID NO: 15416 - protein, 13 aa, synthetic construct
PAPAPAPAPAPAP

SEQ ID NO: 15417 - protein, 8 aa, synthetic construct
EAAAKGGG

SEQ ID NO: 15418 - protein, 8 aa, synthetic construct
EAAAKGGG

SEQ ID NO: 15419 - protein, 6 aa, synthetic construct
PAPGGG

SEQ ID NO: 15420 - protein, 9 aa, synthetic construct
GGGGSSGGS

SEQ ID NO: 15421 - protein, 11 aa, synthetic construct
GGGGGSEAAAK

SEQ ID NO: 15422 - protein, 11 aa, synthetic construct
GGGEAAAKGGS

SEQ ID NO: 15423 - protein, 11 aa, synthetic construct
GGGEAAAKGGS

SEQ ID NO: 15424 - protein, 11 aa, synthetic construct
GGGEAAAKGGS

SEQ ID NO: 15425 - protein, 9 aa, synthetic construct
GGSGGGPAP

SEQ ID NO: 15426 - protein, 9 aa, synthetic construct
PAPGGSGGG

SEQ ID NO: 15427 - protein, 9 aa, synthetic construct
PAPGGSGGG

SEQ ID NO: 15428 - protein, 11 aa, synthetic construct
GGSEAAAKPAP

SEQ ID NO: 15429 - protein, 11 aa, synthetic construct
GGSPAPEAAAK

SEQ ID NO: 15430 - protein, 11 aa, synthetic construct
GGSPAPEAAAK

SEQ ID NO: 15431 - protein, 11 aa, synthetic construct
EAAAKGGSPAP

SEQ ID NO: 15432 - protein, 11 aa, synthetic construct
EAAAKGGSPAP

SEQ ID NO: 15433 - protein, 11 aa, synthetic construct
EAAAKPAPGGS

SEQ ID NO: 15434 - protein, 11 aa, synthetic construct
EAAAKPAPGGS

SEQ ID NO: 15435 - protein, 11 aa, synthetic construct
GGGGSSEAAAK

SEQ ID NO: 15436 - protein, 11 aa, synthetic construct
GGGGSSEAAAK

SEQ ID NO: 15437 - protein, 11 aa, synthetic construct
GSSGGGEAAAK

SEQ ID NO: 15438 - protein, 11 aa, synthetic construct
GSSGGGEAAAK

SEQ ID NO: 15439 - protein, 11 aa, synthetic construct
GSSEAAAKGGG

SEQ ID NO: 15440 - protein, 9 aa, synthetic construct
GSSGGGPAP

SEQ ID NO: 15441 - protein, 9 aa, synthetic construct
GSSPAPGGG

SEQ ID NO: 15442 - protein, 9 aa, synthetic construct
PAPGGGGSS

SEQ ID NO: 15443 - protein, 11 aa, synthetic construct
GGGEAAAKPAP

SEQ ID NO: 15444 - protein, 11 aa, synthetic construct
GGGEAAAKPAP

SEQ ID NO: 15445 - protein, 11 aa, synthetic construct
GGGPAPEAAAK

SEQ ID NO: 15446 - protein, 11 aa, synthetic construct
GSSEAAAKPAP

SEQ ID NO: 15447 - protein, 11 aa, synthetic construct
GSSEAAAKPAP

SEQ ID NO: 15448 - protein, 11 aa, synthetic construct
GSSPAPEAAAK

SEQ ID NO: 15449 - protein, 11 aa, synthetic construct
GSSPAPEAAAK

SEQ ID NO: 15450 - protein, 11 aa, synthetic construct
GSSPAPEAAAK

SEQ ID NO: 15451 - protein, 11 aa, synthetic construct
PAPGSSEAAAK

SEQ ID NO: 15452 - protein, 11 aa, synthetic construct
PAPGSSEAAAK

SEQ ID NO: 15453 - protein, 46 aa, synthetic construct; identical to SEQ ID NO: 15401

SEQ ID NO: 15454 - protein, 46 aa, synthetic construct; identical to SEQ ID NO: 15401

SEQ ID NO: 15455 - protein, 46 aa, synthetic construct; identical to SEQ ID NO: 15401

SEQ ID NO: 15456 - protein, 46 aa, synthetic construct; identical to SEQ ID NO: 15401

SEQ ID NO: 15457 - protein, 46 aa, synthetic construct; identical to SEQ ID NO: 15401

SEQ ID NO: 15458 - protein, 46 aa, synthetic construct; identical to SEQ ID NO: 15401

SEQ ID NO: 15459 - protein, 46 aa, synthetic construct; identical to SEQ ID NO: 15401

SEQ ID NO: 15460 - protein, 16 aa, synthetic construct
SGSETPGTSESATPES

SEQ ID NO: 15461 - protein, 672 aa, Murine leukemia virus
TLNIEDEYRLHETSKEPDVSLGSTWLSDFPQAWAETGGMGLAVRQAPLIIPLKATSTPVSIKQYPMSQEARLGIKPHIQRLLDQGILVPCQSPWNTPLLPVKKPGTNDYRPVQDLREVNKRVEDIHPTVPNPYNLLSGLPPSHQWYTVLDLKDAFFCLRLHPTSQPLFAFEWRDPEMGISGQLTWTRLPQGFKNSPTLFDEALHRDLADFRIQHPDLILLQYVDDLLLAATSELDCQQGTRALLQTLGNLGYRASAKKAQICQKQVKYLGYLLKEGQRWLTEARKETVMGQPTPKTPRQLREFLGTAGFCRLWIPGFAEMAAPLYPLTKTGTLFNWGPDQQKAYQEIKQALLTAPALGLPDLTKPFELFVDEKQGYAKGVLTQKLGPWRRPVAYLSKKLDPVAAGWPPCLRMVAAIAVLTKDAGKLTMGQPLVILAPHAVEALVKQPPDRWLSNARMTHYQALLLDTDRVQFGPVVALNPATLLPLPEEGLQHNCLDILAEAHGTRPDLTDQPLPDADHTWYTDGSSLLQEGQRKAGAAVTTETEVIWAKALPAGTSAQRAELIALTQALKMAEGKKLNVYTDSRYAFATAHIHGEIYRRRGLLTSEGKEIKNKDEILALLKALFLPKRLSIIHCPGHQKGHSAEARGNRMADQAARKAAITETPDTSTLLI

SEQ ID NO: 15462 - protein, 660 aa, Murine leukemia virus
TLNIEDEHRLHETSKEPDVSLGSTWLSDFPQAWAETGGMGLAVRQAPLIIPLKATSTPVSIKQYPMSQEARLGIKPHIQRLLDQGILVPCQSPWNTPLLPVKKPGTNDYRPVQDLREVNKRVEDIHPTVPNPYNLLSGLPPSHQWYTVLDLKDAFFCLRLHPTSQPLFAFEWRDPEMGISGQLTWTRLPQGFKNSPTLFDEALHRDLADFRIQHPDLILLQYVDDLLLAATSELDCQQGTRALLQTLGNLGYRASAKKAQICQKQVKYLGYLLKEGQRWLTEARKETVMGQPTPKTPRQLREFLGTAGFCRLWIPGFAEMAAPLYPLTKTGTLFNWGPDQQKAYQEIKQALLTAPALGLPDLTKPFELFVDEKQGYAKGVLTQKLGPWRRPVAYLSKKLDPVAAGWPPCLRMVAAIAVLTKDAGKLTMGQPLVILAPHAVEALVKQPPDRWLSNARMTHYQALLLDTDRVQFGPVVALNPATLLPLPEEGLQHNCLDILAEAHGTRPDLTDQPLPDADHTWYTDGSSLLQEGQRKAGAAVTTETEVIWAKALPAGTSAQRAELIALTQALKMAEGKKLNVYTDSRYAFATAHIHGEIYRRRGLLTSEGKEIKNKDEILALLKALFLPKRLSIIHCPGHQKGHSAEARGNRMADQAARKAA

SEQ ID NO: 15463 - protein, 672 aa, Murine leukemia virus
TLNIEDEYRLHETSKEPDVSLGSTWLSDFPQAWAETGGMGLAVRQAPLIIPLKATSTPVSIKQYPMSQEARLGIKPHIQRLLDQGILVPCQSPWNTPLLPVKKPGTNDYRPVQDLREVNKRVEDIHPTVPNPYNLLSGLPPSHQWYTVLDLKDAFFCLRLHPTSQPLFAFEWRDPEMGISGQLTWTRLPQGFKNSPTLFNEALHRDLADFRIQHPDLILLQYVDDLLLAATSELDCQQGTRALLQTLGNLGYRASAKKAQICQKQVKYLGYLLKEGQRWLTEARKETVMGQPTPKTPRQLREFLGKAGFCRLFIPGFAEMAAPLYPLTKPGTLFNWGPDQQKAYQEIKQALLTAPALGLPDLTKPFELFVDEKQGYAKGVLTQKLGPWRRPVAYLSKKLDPVAAGWPPCLRMVAAIAVLTKDAGKLTMGQPLVILAPHAVEALVKQPPDRWLSNARMTHYQALLLDTDRVQFGPVVALNPATLLPLPEEGLQHNCLDILAEAHGTRPDLTDQPLPDADHTWYTDGSSLLQEGQRKAGAAVTTETEVIWAKALPAGTSAQRAELIALTQALKMAEGKKLNVYTDSRYAFATAHIHGEIYRRRGWLTSEGKEIKNKDEILALLKALFLPKRLSIIHCPGHQKGHSAEARGNRMADQAARKAAITETPDTSTLLI

SEQ ID NO: 15464 - protein, 33 aa, synthetic construct
SGGSSGGSSGSETPGTSESATPESSGGSSGGSS

SEQ ID NO: 15465 - protein, 1369 aa, unidentified
SMDKKYSIGLAIGTNSVGWAVITDDYKVPSKKFKVLGNTDRHSIKKNLIGALLFDSGETAEATRLKRTARRRYTRRKNRICYLQEIFSNEMAKVDDSFFHRLEESFLVEEDKKHERHPIFGNIVDEVAYHEKYPTIYHLRKKLVDSTDKADLRLIYLALAHMIKFRGHFLIEGDLNPDNSDVDKLFIQLVQTYNQLFEENPINASGVDAKAILSARLSKSRRLENLIAQLPGEKKNGLFGNLIALSLGLTPNFKSNFDLAEDAKLQLSKDTYDDDLDNLLAQIGDQYADLFLAAKNLSDAILLSDILRVNTEITKAPLSASMIKRYDEHHQDLTLLKALVRQQLPEKYKEIFFDQSKNGYAGYIDGGASQEEFYKFIKPILEKMDGTEELLVKLNREDLLRKQRTFDNGSIPHQIHLGELHAILRRQEDFYPFLKDNREKIEKILTFRIPYYVGPLARGNSRFAWMTRKSEETITPWNFEEVVDKGASAQSFIERMTNFDKNLPNEKVLPKHSLLYEYFTVYNELTKVKYVTEGMRKPAFLSGEQKKAIVDLLFKTNRKVTVKQLKEDYFKKIECFDSVEISGVEDRFNASLGTYHDLLKIIKDKDFLDNEENEDILEDIVLTLTLFEDREMIEERLKTYAHLFDDKVMKQLKRRRYTGWGRLSRKLINGIRDKQSGKTILDFLKSDGFANRNFMQLIHDDSLTFKEDIQKAQVSGQGDSLHEHIANLAGSPAIKKGILQTVKVVDELVKVMGRHKPENIVIEMARENQTTQKGQKNSRERMKRIEEGIKELGSQILKEHPVENTQLQNEKLYLYYLQNGRDMYVDQELDINRLSDYDVDAIVPQSFLKDDSIDNKVLTRSDKNRGKSDNVPSEEVVKKMKNYWRQLLNAKLITQRKFDNLTKAERGGLSELDKAGFIKRQLVETRQITKHVAQILDSRMNTKYDENDKLIREVKVITLKSKLVSDFRKDFQFYKVREINNYHHAHDAYLNAVVGTALIKKYPKLESEFVYGDYKVYDVRKMIAKSEQEIGKATAKYFFYSNIMNFFKTEITLANGEIRKRPLIETNGETGEIVWDKGRDFATVRKVLSMPQVNIVKKTEVQTGGFSKESILPKRNSDKLIARKKDWDPKKYGGFDSPTVAYSVLVVAKVEKGKSKKLKSVKELLGITIMERSSFEKNPIDFLEAKGYKEVKKDLIIKLPKYSLFELENGRKRMLASAGELQKGNELALPSKYVNFLYLASHYEKLKGSPEDNEQKQLFVEQHKHYLDEIIEQISEFSKRVILADANLDKVLSAYNKHRDKPIREQAENIIHLFTLTNLGAPAAFKYFDTTIDRKRYTSTKEVLDATLIHQSITGLYETRIDLSQLGGD

SEQ ID NO: 15466 - DNA, 76 bp, synthetic construct
  source 1..76: mol_type = other DNA
gttttagagctagaaatagcaagttaaaataaggctagtccgttatcaacttgaaaaagtgggaccgagtcggtcc

SEQ ID NO: 15467 - protein, 30 aa, synthetic construct
MDSLLMNRRKFLYQFKNVRWAKGRRETYLC

SEQ ID NO: 15468 - protein, 28 aa, synthetic construct
PKKRKVEGADKRTADGSEFESPKKKRKV

SEQ ID NO: 15469 - protein, 22 aa, synthetic construct
RKSGKIAAIWKRPRKPKKKRKV

SEQ ID NO: 15470 - protein, 18 aa, synthetic construct
KRTADGSEFESPKKKRKV

SEQ ID NO: 15471 - protein, 17 aa, synthetic construct
KKTELQTTNAENKTKKL

SEQ ID NO: 15472 - protein, 19 aa, synthetic construct
KRGINDRNFWRGENGRKTR

SEQ ID NO: 15473 - protein, 16 aa, synthetic construct
KRPAATKKAGQAKKKK

SEQ ID NO: 15474 - protein, 29 aa, synthetic construct
PKKKRKVEGADKRTADGSEFESPKKKRKV

SEQ ID NO: 15475 - protein, 25 aa, synthetic construct
KRASSQALGTIPKRRSSSRFIKRKK

SEQ ID NO: 15476 - protein, 7 aa, synthetic construct
RKKRKKK

SEQ ID NO: 15477-15481 - skipped (5 entries)

SEQ ID NO: 15482 - protein, 4 aa, synthetic construct
SGGS

SEQ ID NO: 15483 - protein, 4 aa, synthetic construct
GGGS

SEQ ID NO: 15484 - protein, 5 aa, synthetic construct
GGGGS

SEQ ID NO: 15485 - protein, 5 aa, synthetic construct
EAAAK

SEQ ID NO: 15486 - DNA, 306 bp, synthetic construct
  source 1..306: mol_type = other DNA
tgcctgtcatacgaaaccgagatactgacagtagaatatggccttctgccaatcgggaagattgtggagaaacggatagaatgcacagtttactctgtcgataacaatggtaacatttatactcagccagttgcccagtggcacgaccggggagagcaggaagtattcgaatactgtctggaggatggaagtctcattagggccactaaggaccacaaatttatgacagtcgatggccagatgctgcctatagacgaaatctttgagcgagagttggacctcatgcgagttgacaaccttcctaat

SEQ ID NO: 15487 - protein, 102 aa, synthetic construct
CLSYETEILTVEYGLLPIGKIVEKRIECTVYSVDNNGNIYTQPVAQWHDRGEQEVFEYCLEDGSLIRATKDHKFMTVDGQMLPIDEIFERELDLMRVDNLPN

SEQ ID NO: 15488 - DNA, 108 bp, synthetic construct
  source 1..108: mol_type = other DNA
atgatcaagatagctacaaggaagtatcttggcaaacaaaacgtttatgatattggagtcgaaagagatcacaactttgctctgaagaacggattcatagcttctaat

SEQ ID NO: 15489 - protein, 36 aa, synthetic construct
MIKIATRKYLGKQNVYDIGVERDHNFALKNGFIASN

SEQ ID NO: 15490 - DNA, 303 bp, synthetic construct
  source 1..303: mol_type = other DNA
tgcctgtcttatgataccgagatacttaccgttgaatatggcttcttgcctattggaaagattgtcgaagagagaattgaatgcacagtatatactgtagacaagaatggtttcgtttacacacagcccattgctcaatggcacaatcgcggcgaacaagaagtatttgagtactgtctcgaggatggaagcatcatacgagcaactaaagatcataaattcatgaccactgacgggcagatgttgccaatagatgagatattcgagcggggcttggatctcaaacaagtggatggattgcca

SEQ ID NO: 15491 - protein, 6 aa, synthetic construct
GGSGGS

SEQ ID NO: 15492 - protein, 9 aa, synthetic construct
GGSGGSGGS

SEQ ID NO: 15493 - protein, 12 aa, synthetic construct
GGSGGSGGSGGS

SEQ ID NO: 15494 - protein, 15 aa, synthetic construct
GGSGGSGGSGGSGGS

SEQ ID NO: 15495 - protein, 18 aa, synthetic construct
GGSGGSGGSGGSGGSGGS

SEQ ID NO: 15496 - RNA, 100 nt, synthetic construct
  source 1..100: mol_type = other RNA
  misc_difference 1..100: note = This sequence may encompass 5, 10, 20, 30, 50, 70, or 100 nucleotides
aaaaaaaaaaaaaaaaaaaaaaaaaaaaaaaaaaaaaaaaaaaaaaaaaaaaaaaaaaaaaaaaaaaaaaaaaaaaaaaaaaaaaaaaaaaaaaaaaaaa

SEQ ID NO: 15497 - protein, 10 aa, synthetic construct
GGGGSGGGGS

SEQ ID NO: 15498 - protein, 15 aa, synthetic construct
GGGGSGGGGSGGGGS

SEQ ID NO: 15499 - protein, 25 aa, synthetic construct
GGGGSGGGGSGGGGSGGGGSGGGGS

SEQ ID NO: 15500 - protein, 4 aa, synthetic construct
GGGG

SEQ ID NO: 15501 - protein, 5 aa, synthetic construct
GGGGG

SEQ ID NO: 15502 - protein, 6 aa, synthetic construct
GGGGGG

SEQ ID NO: 15503 - protein, 7 aa, synthetic construct
GGGGGGG

SEQ ID NO: 15504 - protein, 8 aa, synthetic construct
GGGGGGGG

SEQ ID NO: 15505 - protein, 6 aa, synthetic construct
GSSGSS

SEQ ID NO: 15506 - protein, 9 aa, synthetic construct
GSSGSSGSS

SEQ ID NO: 15507 - protein, 12 aa, synthetic construct
GSSGSSGSSGSS

SEQ ID NO: 15508 - protein, 15 aa, synthetic construct
GSSGSSGSSGSSGSS

SEQ ID NO: 15509 - protein, 53 aa, synthetic construct
MKRTADGSEFESPKKKRKVKIISRKSLGTQNVYDIGVEKDHNFLLKNGLVASN

SEQ ID NO: 15510 - protein, 10 aa, synthetic construct
EAAAKEAAAK

SEQ ID NO: 15511 - protein, 15 aa, synthetic construct
EAAAKEAAAKEAAAK

SEQ ID NO: 15512 - protein, 25 aa, synthetic construct
EAAAKEAAAKEAAAKEAAAKEAAAK

SEQ ID NO: 15513 - protein, 5 aa, synthetic construct
PAPAP

SEQ ID NO: 15514 - protein, 7 aa, synthetic construct
PAPAPAP

SEQ ID NO: 15515 - protein, 9 aa, synthetic construct
PAPAPAPAP

SEQ ID NO: 15516 - protein, 6 aa, synthetic construct
GGSGGG

SEQ ID NO: 15517 - protein, 6 aa, synthetic construct
GGGGGS

SEQ ID NO: 15518 - protein, 6 aa, synthetic construct
GGSGSS

SEQ ID NO: 15519 - protein, 6 aa, synthetic construct
GSSGGS

SEQ ID NO: 15520 - protein, 8 aa, synthetic construct
GGSEAAAK

SEQ ID NO: 15521 - protein, 8 aa, synthetic construct
EAAAKGGS

SEQ ID NO: 15522 - protein, 6 aa, synthetic construct
GGSPAP

SEQ ID NO: 15523 - protein, 6 aa, synthetic construct
PAPGGS

SEQ ID NO: 15524 - protein, 6 aa, synthetic construct
GGGGSS

SEQ ID NO: 15525 - protein, 6 aa, synthetic construct
GSSGGG

SEQ ID NO: 15526 - protein, 8 aa, synthetic construct
GGGEAAAK

SEQ ID NO: 15527 - protein, 6 aa, synthetic construct
GGGPAP

SEQ ID NO: 15528 - protein, 8 aa, synthetic construct
GSSEAAAK

SEQ ID NO: 15529 - protein, 8 aa, synthetic construct
EAAAKGSS

SEQ ID NO: 15530 - protein, 6 aa, synthetic construct
GSSPAP

SEQ ID NO: 15531 - protein, 6 aa, synthetic construct
PAPGSS

SEQ ID NO: 15532 - protein, 8 aa, synthetic construct
EAAAKPAP

SEQ ID NO: 15533 - protein, 8 aa, synthetic construct
PAPEAAAK

SEQ ID NO: 15534 - protein, 9 aa, synthetic construct
GGSGGGGSS

SEQ ID NO: 15535 - protein, 9 aa, synthetic construct
GGSGSSGGG

SEQ ID NO: 15536 - protein, 9 aa, synthetic construct
GGGGGSGSS

SEQ ID NO: 15537 - protein, 9 aa, synthetic construct
GSSGGSGGG

SEQ ID NO: 15538 - protein, 9 aa, synthetic construct
GSSGGGGGS

SEQ ID NO: 15539 - protein, 11 aa, synthetic construct
GGSGGGEAAAK

SEQ ID NO: 15540 - protein, 11 aa, synthetic construct
GGSEAAAKGGG

SEQ ID NO: 15541 - protein, 11 aa, synthetic construct
EAAAKGGSGGG

SEQ ID NO: 15542 - protein, 11 aa, synthetic construct
EAAAKGGGGGS

SEQ ID NO: 15543 - protein, 9 aa, synthetic construct
GGSPAPGGG

SEQ ID NO: 15544 - protein, 9 aa, synthetic construct
GGGGGSPAP

SEQ ID NO: 15545 - protein, 9 aa, synthetic construct
GGGPAPGGS

SEQ ID NO: 15546 - protein, 9 aa, synthetic construct
PAPGGGGGS

SEQ ID NO: 15547 - protein, 11 aa, synthetic construct
GGSGSSEAAAK

SEQ ID NO: 15548 - protein, 11 aa, synthetic construct
GGSEAAAKGSS

SEQ ID NO: 15549 - protein, 11 aa, synthetic construct
GSSGGSEAAAK

SEQ ID NO: 15550 - protein, 11 aa, synthetic construct
GSSEAAAKGGS

SEQ ID NO: 15551 - protein, 11 aa, synthetic construct
EAAAKGGSGSS

SEQ ID NO: 15552 - protein, 11 aa, synthetic construct
EAAAKGSSGGS

SEQ ID NO: 15553 - protein, 9 aa, synthetic construct
GGSGSSPAP

SEQ ID NO: 15554 - protein, 9 aa, synthetic construct
GGSPAPGSS

SEQ ID NO: 15555 - protein, 9 aa, synthetic construct
GSSGGSPAP

SEQ ID NO: 15556 - protein, 9 aa, synthetic construct
GSSPAPGGS

SEQ ID NO: 15557 - protein, 9 aa, synthetic construct
PAPGGSGSS

SEQ ID NO: 15558 - protein, 9 aa, synthetic construct
PAPGSSGGS

SEQ ID NO: 15559 - protein, 11 aa, synthetic construct
PAPGGSEAAAK

SEQ ID NO: 15560 - protein, 11 aa, synthetic construct
PAPEAAAKGGS

SEQ ID NO: 15561 - protein, 11 aa, synthetic construct
GGGEAAAKGSS

SEQ ID NO: 15562 - protein, 11 aa, synthetic construct
EAAAKGGGGSS

SEQ ID NO: 15563 - protein, 11 aa, synthetic construct
EAAAKGSSGGG

SEQ ID NO: 15564 - protein, 9 aa, synthetic construct
GGGGSSPAP

SEQ ID NO: 15565 - protein, 9 aa, synthetic construct
GGGPAPGSS

SEQ ID NO: 15566 - protein, 9 aa, synthetic construct
PAPGSSGGG

SEQ ID NO: 15567 - protein, 11 aa, synthetic construct
EAAAKGGGPAP

SEQ ID NO: 15568 - protein, 11 aa, synthetic construct
EAAAKPAPGGG

SEQ ID NO: 15569 - protein, 11 aa, synthetic construct
PAPGGGEAAAK

SEQ ID NO: 15570 - protein, 11 aa, synthetic construct
PAPEAAAKGGG

SEQ ID NO: 15571 - protein, 11 aa, synthetic construct
EAAAKGSSPAP

SEQ ID NO: 15572 - protein, 11 aa, synthetic construct
EAAAKPAPGSS

SEQ ID NO: 15573 - protein, 11 aa, synthetic construct
PAPEAAAKGSS

SEQ ID NO: 15574 - protein, 15 aa, synthetic construct
GGGGSEAAAKGGGGS

SEQ ID NO: 15575 - protein, 15 aa, synthetic construct
EAAAKGGGGSEAAAK

SEQ ID NO: 15576 - protein, 12 aa, synthetic construct
GSAGSAAGSGEF

SEQ ID NO: 15577 - protein, 7 aa, synthetic construct
CTKRPRW

SEQ ID NO: 15578 - protein, 16 aa, synthetic construct
DKAKRVSRNKSEKKRR

SEQ ID NO: 15579 - protein, 24 aa, synthetic construct
EVLKVIRTGKRKKKAWKRMVTKVC

SEQ ID NO: 15580 - protein, 15 aa, synthetic construct
HHHHHHHHHHHHQPH

SEQ ID NO: 15581 - protein, 6 aa, synthetic construct
HKRTKK

SEQ ID NO: 15582 - protein, 29 aa, synthetic construct
IINGRKLKLKKSRRRSSQTSNNSFTSRRS

SEQ ID NO: 15583 - protein, 18 aa, synthetic construct
KEKRKRREELFIEQKKRK

SEQ ID NO: 15584 - protein, 14 aa, synthetic construct
KKGKDEWFSRGKKP

SEQ ID NO: 15585 - protein, 12 aa, synthetic construct
KKGPSVQKRKKT

SEQ ID NO: 15586 - protein, 17 aa, synthetic construct
KKNGGKGKNKPSAKIKK

SEQ ID NO: 15587 - protein, 13 aa, synthetic construct
KKPKWDDFKKKKK

SEQ ID NO: 15588 - protein, 6 aa, synthetic construct
KKRKKD

SEQ ID NO: 15589 - protein, 9 aa, synthetic construct
KKRRKRRRK

SEQ ID NO: 15590 - protein, 9 aa, synthetic construct
KKRRRRARK

SEQ ID NO: 15591 - protein, 7 aa, synthetic construct
KKSKRGR

SEQ ID NO: 15592 - protein, 8 aa, synthetic construct
KKSRKRGS

SEQ ID NO: 15593 - protein, 17 aa, synthetic construct
KKSTALSRELGKIMRRR

SEQ ID NO: 15594 - protein, 17 aa, synthetic construct
KKSYQDPEIIAHSRPRK

SEQ ID NO: 15595 - protein, 17 aa, synthetic construct
KKTGKNRKLKSKRVKTR

SEQ ID NO: 15596 - protein, 17 aa, synthetic construct
KKVSIAGQSGKLWRWKR

SEQ ID NO: 15597 - protein, 20 aa, synthetic construct
KKYENVVIKRSPRKRGRPRK

SEQ ID NO: 15598 - protein, 6 aa, synthetic construct
KPKKKR

SEQ ID NO: 15599 - protein, 19 aa, synthetic construct
KRAMKDDSHGNSTSPKRRK

SEQ ID NO: 15600 - protein, 17 aa, synthetic construct
KRANSNLVAAYEKAKKK

SEQ ID NO: 15601 - protein, 22 aa, synthetic construct
KRASEDTTSGSPPKKSSAGPKR

SEQ ID NO: 15602 - protein, 16 aa, synthetic construct
KRFKRRWMVRKMKTKK

SEQ ID NO: 15603 - protein, 20 aa, synthetic construct
KRGNSSIGPNDLSKRKQRKK

SEQ ID NO: 15604 - protein, 23 aa, synthetic construct
KRIHSVSLSQSQIDPSKKVKRAK

SEQ ID NO: 15605 - protein, 15 aa, synthetic construct
KRKGKLKNKGSKRKK

SEQ ID NO: 15606 - protein, 13 aa, synthetic construct
KRRRRRRREKRKR

SEQ ID NO: 15607 - protein, 18 aa, synthetic construct
KRSNDRTYSPEEEKQRRA

SEQ ID NO: 15608 - protein, 21 aa, synthetic construct
KRTVATNGDASGAHRAKKMSK

SEQ ID NO: 15609 - protein, 20 aa, synthetic construct
KRVYNKGEDEQEHLPKGKKR

SEQ ID NO: 15610 - protein, 18 aa, synthetic construct
KSGKAPRRRAVSMDNSNK

SEQ ID NO: 15611 - protein, 19 aa, synthetic construct
KVNFLDMSLDDIIIYKELE

SEQ ID NO: 15612 - protein, 8 aa, synthetic construct
LSPSLSPL

SEQ ID NO: 15613 - protein, 52 aa, synthetic construct
MPQNEYIELHRKRYGYRLDYHEKKRKKESREAHERSKKAKKMIGLKAKLYHK

SEQ ID NO: 15614 - protein, 10 aa, synthetic construct
MVQLRPRASR

SEQ ID NO: 15615 - protein, 24 aa, synthetic construct
NNKLLAKRRKGGASPKDDPMDDIK

SEQ ID NO: 15616 - protein, 20 aa, synthetic construct
NYKRPMDGTYGPPAKRHEGE

SEQ ID NO: 15617 - protein, 19 aa, synthetic construct
PDTKRAKLDSSETTMVKKK

SEQ ID NO: 15618 - protein, 7 aa, synthetic construct
PEKRTKI

SEQ ID NO: 15619 - protein, 8 aa, synthetic construct
PGGRGKKK

SEQ ID NO: 15620 - protein, 7 aa, synthetic construct
PKKNKPE

SEQ ID NO: 15621 - protein, 7 aa, synthetic construct
PKKRAKV

SEQ ID NO: 15622 - protein, 9 aa, synthetic construct
PKPKKLKVE

SEQ ID NO: 15623 - protein, 7 aa, synthetic construct
PKRGRGR

SEQ ID NO: 15624 - protein, 9 aa, synthetic construct
PKRRLVDDA

SEQ ID NO: 15625 - protein, 7 aa, synthetic construct
PKRRRTY

SEQ ID NO: 15626 - protein, 6 aa, synthetic construct
PLFKRR

SEQ ID NO: 15627 - protein, 7 aa, synthetic construct
PLRKAKR

SEQ ID NO: 15628 - protein, 9 aa, synthetic construct
PPAKRKCIF

SEQ ID NO: 15629 - protein, 8 aa, synthetic construct
PPARRRRL

SEQ ID NO: 15630 - protein, 8 aa, synthetic construct
PPKKKRKV

SEQ ID NO: 15631 - protein, 10 aa, synthetic construct
PPNKRMKVKH

SEQ ID NO: 15632 - protein, 13 aa, synthetic construct
PPRIYPQLPSAPT

SEQ ID NO: 15633 - protein, 13 aa, synthetic construct
PQRSPFPKSSVKR

SEQ ID NO: 15634 - protein, 8 aa, synthetic construct
PRPRKVPR

SEQ ID NO: 15635 - protein, 9 aa, synthetic construct
PRRRVQRKR

SEQ ID NO: 15636 - protein, 7 aa, synthetic construct
PRRVRLK

SEQ ID NO: 15637 - protein, 9 aa, synthetic construct
QRPGPYDRP

SEQ ID NO: 15638 - protein, 20 aa, synthetic construct
RKLVKPKNTKMKTKLRTNPY

SEQ ID NO: 15639 - protein, 7 aa, synthetic construct
RKRLKSK

SEQ ID NO: 15640 - protein, 22 aa, synthetic construct
RKRTPRVDGQTGENDMNKRRRK

SEQ ID NO: 15641 - protein, 6 aa, synthetic construct
RRKKRR

SEQ ID NO: 15642 - protein, 6 aa, synthetic construct
RRKRSR

SEQ ID NO: 15643 - protein, 14 aa, synthetic construct
RRPKGKTLQKRKPK

SEQ ID NO: 15644 - protein, 18 aa, synthetic construct
RRRGFERFGPDNMGRKRK

SEQ ID NO: 15645 - protein, 6 aa, synthetic construct
RRRKRR

SEQ ID NO: 15646 - protein, 14 aa, synthetic construct
RRRQKQKGGASRRR

SEQ ID NO: 15647 - protein, 13 aa, synthetic construct
RRRREGPRARRRR

SEQ ID NO: 15648 - protein, 17 aa, synthetic construct
RRVPQRKEVSRCRKCRK

SEQ ID NO: 15649 - protein, 32 aa, synthetic construct
RVGGRRQAVECIEDLLNEPGQPLDLSCKRPRP

SEQ ID NO: 15650 - protein, 9 aa, synthetic construct
RVVKLRIAP

SEQ ID NO: 15651 - protein, 6 aa, synthetic construct
RVVRRR

SEQ ID NO: 15652 - protein, 12 aa, synthetic construct
SKRKTKISRKTR

SEQ ID NO: 15653 - protein, 16 aa, synthetic construct
SYVKTVPNRTRTYIKL

SEQ ID NO: 15654 - protein, 12 aa, synthetic construct
TGKNEAKKRKIA

SEQ ID NO: 15655 - protein, 9 aa, synthetic construct
SPKKKRKVE

SEQ ID NO: 15656 - protein, 19 aa, synthetic construct
KRTADGSEFESPKKKRKVE

SEQ ID NO: 15657 - protein, 7 aa, synthetic construct
PKKKRKV

SEQ ID NO: 15658 - protein, 11 aa, synthetic construct
SPKKKRKVEAS

SEQ ID NO: 15659 - protein, 16 aa, synthetic construct
MAPKKKRKVGIHRGVP

SEQ ID NO: 15660 - protein, 1381 aa, synthetic construct
MPAAKRVKLDGGDKKYSIGLDIGTNSVGWAVITDEYKVPSKKFKVLGNTDRHSIKKNLIGALLFDSGETAEATRLKRTARRRYTRRKNRICYLQEIFSNEMAKVDDSFFHRLEESFLVEEDKKHERHPIFGNIVDEVAYHEKYPTIYHLRKKLVDSTDKADLRLIYLALAHMIKFRGHFLIEGDLNPDNSDVDKLFIQLVQTYNQLFEENPINASGVDAKAILSARLSKSRRLENLIAQLPGEKKNGLFGNLIALSLGLTPNFKSNFDLAEDAKLQLSKDTYDDDLDNLLAQIGDQYADLFLAAKNLSDAILLSDILRVNTEITKAPLSASMIKRYDEHHQDLTLLKALVRQQLPEKYKEIFFDQSKNGYAGYIDGGASQEEFYKFIKPILEKMDGTEELLVKLNREDLLRKQRTFDNGSIPHQIHLGELHAILRRQEDFYPFLKDNREKIEKILTFRIPYYVGPLARGNSRFAWMTRKSEETITPWNFEEVVDKGASAQSFIERMTNFDKNLPNEKVLPKHSLLYEYFTVYNELTKVKYVTEGMRKPAFLSGEQKKAIVDLLFKTNRKVTVKQLKEDYFKKIECFDSVEISGVEDRFNASLGTYHDLLKIIKDKDFLDNEENEDILEDIVLTLTLFEDREMIEERLKTYAHLFDDKVMKQLKRRRYTGWGRLSRKLINGIRDKQSGKTILDFLKSDGFANRNFMQLIHDDSLTFKEDIQKAQVSGQGDSLHEHIANLAGSPAIKKGILQTVKVVDELVKVMGRHKPENIVIEMARENQTTQKGQKNSRERMKRIEEGIKELGSQILKEHPVENTQLQNEKLYLYYLQNGRDMYVDQELDINRLSDYDVDHIVPQSFLKDDSIDNKVLTRSDKARGKSDNVPSEEVVKKMKNYWRQLLNAKLITQRKFDNLTKAERGGLSELDKAGFIKRQLVETRQITKHVAQILDSRMNTKYDENDKLIREVKVITLKSKLVSDFRKDFQFYKVREINNYHHAHDAYLNAVVGTALIKKYPKLESEFVYGDYKVYDVRKMIAKSEQEIGKATAKYFFYSNIMNFFKTEITLANGEIRKRPLIETNGETGEIVWDKGRDFATVRKVLSMPQVNIVKKTEVQTGGFSKESILPKRNSDKLIARKKDWDPKKYGGFDSPTVAYSVLVVAKVEKGKSKKLKSVKELLGITIMERSSFEKNPIDFLEAKGYKEVKKDLIIKLPKYSLFELENGRKRMLASAGELQKGNELALPSKYVNFLYLASHYEKLKGSPEDNEQKQLFVEQHKHYLDEIIEQISEFSKRVILADANLDKVLSAYNKHRDKPIREQAENIIHLFTLTNLGAPAAFKYFDTTIDRKRYTSTKEVLDATLIHQSITGLYETRIDLSQLGGDGG

SEQ ID NO: 15661 - protein, 31 aa, synthetic construct
AGKRTADGSEFEKRTADGSEFESPKKKAKVE

SEQ ID NO: 15662 - DNA, 16 bp, synthetic construct
  source 1..16: mol_type = other DNA
gcgcgctcgctcgctc

SEQ ID NO: 15663 - protein, 4 aa, unidentified
YADD

SEQ ID NO: 15664 - protein, 4 aa, unidentified
YMDD

SEQ ID NO: 15665 - protein, 4 aa, unidentified
YVDD

SEQ ID NO: 15666 - protein, 9 aa, unidentified
LAGLIDADG

SEQ ID NO: 15667 - protein, 1082 aa, Neisseria meningitidis
MAAFKPNPINYILGLDIGIASVGWAMVEIDEEENPIRLIDLGVRVFERAEVPKTGDSLAMARRLARSVRRLTRRRAHRLLRARRLLKREGVLQAADFDENGLIKSLPNTPWQLRAAALDRKLTPLEWSAVLLHLIKHRGYLSQRKNEGETADKELGALLKGVANNAHALQTGDFRTPAELALNKFEKESGHIRNQRGDYSHTFSRKDLQAELILLFEKQKEFGNPHVSGGLKEGIETLLMTQRPALSGDAVQKMLGHCTFEPAEPKAAKNTYTAERFIWLTKLNNLRILEQGSERPLTDTERATLMDEPYRKSKLTYAQARKLLGLEDTAFFKGLRYGKDNAEASTLMEMKAYHAISRALEKEGLKDKKSPLNLSSELQDEIGTAFSLFKTDEDITGRLKDRVQPEILEALLKHISFDKFVQISLKALRRIVPLMEQGKRYDEACAEIYGDHYGKKNTEEKIYLPPIPADEIRNPVVLRALSQARKVINGVVRRYGSPARIHIETAREVGKSFKDRKEIEKRQEENRKDREKAAAKFREYFPNFVGEPKSKDILKLRLYEQQHGKCLYSGKEINLVRLNEKGYVEIDHALPFSRTWDDSFNNKVLVLGSENQNKGNQTPYEYFNGKDNSREWQEFKARVETSRFPRSKKQRILLQKFDEDGFKECNLNDTRYVNRFLCQFVADHILLTGKGKRRVFASNGQITNLLRGFWGLRKVRAENDRHHALDAVVVACSTVAMQQKITRFVRYKEMNAFDGKTIDKETGKVLHQKTHFPQPWEFFAQEVMIRVFGKPDGKPEFEEADTPEKLRTLLAEKLSSRPEAVHEYVTPLFVSRAPNRKMSGAHKDTLRSAKRFVKHNEKISVKRVWLTEIKLADLENMVNYKNGREIELYEALKARLEAYGGNAKQAFDPKDNPFYKKGGQLVKAVRVEKTQESGVLLNKKNAYTIADNGDMVRVDVFCKVDKKGKNQYFIVPIYAWQVAENILPDIDCKGYRIDDSYTFCFSLHKYDLIAFQKDEKSKVEFAYYINCDSSNGRFYLAWHDKGSKEQQFRISTQNLVLIQKYQVNELGKEIRPCRLKKRPPVR

SEQ ID NO: 15668 - protein, 1055 aa, Pasteurella pneumotropica
MQNNPLNYILGLDLGIASIGWAVVEIDEESSPIRLIDVGVRTFERAEVAKTGESLALSRRLARSSRRLIKRRAERLKKAKRLLKAEKILHSIDEKLPINVWQLRVKGLKEKLERQEWAAVLLHLSKHRGYLSQRKNEGKSDNKELGALLSGIASNHQMLQSSEYRTPAEIAVKKFQVEEGHIRNQRGSYTHTFSRLDLLAEMELLFQRQAELGNSYTSTTLLENLTALLMWQKPALAGDAILKMLGKCTFEPSEYKAAKNSYSAERFVWLTKLNNLRILENGTERALNDNERFALLEQPYEKSKLTYAQVRAMLALSDNAIFKGVRYLGEDKKTVESKTTLIEMKFYHQIRKTLGSAELKKEWNELKGNSDLLDEIGTAFSLYKTDDDICRYLEGKLPERVLNALLENLNFDKFIQLSLKALHQILPLMLQGQRYDEAVSAIYGDHYGKKSTETTRLLPTIPADEIRNPVVLRTLTQARKVINAVVRLYGSPARIHIETAREVGKSYQDRKKLEKQQEDNRKQRESAVKKFKEMFPHFVGEPKGKDILKMRLYELQQAKCLYSGKSLELHRLLEKGYVEVDHALPFSRTWDDSFNNKVLVLANENQNKGNLTPYEWLDGKNNSERWQHFVVRVQTSGFSYAKKQRILNHKLDEKGFIERNLNDTRYVARFLCNFIADNMLLVGKGKRNVFASNGQITALLRHRWGLQKVREQNDRHHALDAVVVACSTVAMQQKITRFVRYNEGNVFSGERIDRETGEIIPLHFPSPWAFFKENVEIRIFSENPKLELENRLPDYPQYNHEWVQPLFVSRMPTRKMTGQGHMETVKSAKRLNEGLSVLKVPLTQLKLSDLERMVNRDREIALYESLKARLEQFGNDPAKAFAEPFYKKGGALVKAVRLEQTQKSGVLVRDGNGVADNASMVRVDVFTKGGKYFLVPIYTWQVAKGILPNRAATQGKDENDWDIMDEMATFQFSLCQNDLIKLVTKKKTIFGYFNGLNRATSNINIKEHDLDKSKGKLGIYLEVGVKLAISLEKYQVDELGKNIRPCRPTKRQHVR

SEQ ID NO: 15669 - protein, 1053 aa, Staphylococcus aureus
MKRNYILGLDIGITSVGYGIIDYETRDVIDAGVRLFKEANVENNEGRRSKRGARRLKRRRRHRIQRVKKLLFDYNLLTDHSELSGINPYEARVKGLSQKLSEEEFSAALLHLAKRRGVHNVNEVEEDTGNELSTKEQISRNSKALEEKYVAELQLERLKKDGEVRGSINRFKTSDYVKEAKQLLKVQKAYHQLDQSFIDTYIDLLETRRTYYEGPGEGSPFGWKDIKEWYEMLMGHCTYFPEELRSVKYAYNADLYNALNDLNNLVITRDENEKLEYYEKFQIIENVFKQKKKPTLKQIAKEILVNEEDIKGYRVTSTGKPEFTNLKVYHDIKDITARKEIIENAELLDQIAKILTIYQSSEDIQEELTNLNSELTQEEIEQISNLKGYTGTHNLSLKAINLILDELWHTNDNQIAIFNRLKLVPKKVDLSQQKEIPTTLVDDFILSPVVKRSFIQSIKVINAIIKKYGLPNDIIIELAREKNSKDAQKMINEMQKRNRQTNERIEEIIRTTGKENAKYLIEKIKLHDMQEGKCLYSLEAIPLEDLLNNPFNYEVDHIIPRSVSFDNSFNNKVLVKQEENSKKGNRTPFQYLSSSDSKISYETFKKHILNLAKGKGRISKTKKEYLLEERDINRFSVQKDFINRNLVDTRYATRGLMNLLRSYFRVNNLDVKVKSINGGFTSFLRRKWKFKKERNKGYKHHAEDALIIANADFIFKEWKKLDKAKKVMENQMFEEKQAESMPEIETEQEYKEIFITPHQIKHIKDFKDYKYSHRVDKKPNRELINDTLYSTRKDDKGNTLIVNNLNGLYDKDNDKLKKLINKSPEKLLMYHHDPQTYQKLKLIMEQYGDEKNPLYKYYEETGNYLTKYSKKDNGPVIKKIKYYGNKLNAHLDITDDYPNSRNKVVKLSLKPYRFDVYLDNGVYKFVTVKNLDVIKKENYYEVNSKCYEEAKKLKKISNQAEFIASFYNNDLIKINGELYRVIGVNNDLLNRIEVNMIDITYREYLENMNDKRPPRIIKTIASKTQSIKKYSTDILGNLYEVKSKKHPQIIKKG

SEQ ID NO: 15670 - protein, 1053 aa, Staphylococcus aureus
MKRNYILGLDIGITSVGYGIIDYETRDVIDAGVRLFKEANVENNEGRRSKRGARRLKRRRRHRIQRVKKLLFDYNLLTDHSELSGINPYEARVKGLSQKLSEEEFSAALLHLAKRRGVHNVNEVEEDTGNELSTKEQISRNSKALEEKYVAELQLERLKKDGEVRGSINRFKTSDYVKEAKQLLKVQKAYHQLDQSFIDTYIDLLETRRTYYEGPGEGSPFGWKDIKEWYEMLMGHCTYFPEELRSVKYAYNADLYNALNDLNNLVITRDENEKLEYYEKFQIIENVFKQKKKPTLKQIAKEILVNEEDIKGYRVTSTGKPEFTNLKVYHDIKDITARKEIIENAELLDQIAKILTIYQSSEDIQEELTNLNSELTQEEIEQISNLKGYTGTHNLSLKAINLILDELWHTNDNQIAIFNRLKLVPKKVDLSQQKEIPTTLVDDFILSPVVKRSFIQSIKVINAIIKKYGLPNDIIIELAREKNSKDAQKMINEMQKRNRQTNERIEEIIRTTGKENAKYLIEKIKLHDMQEGKCLYSLEAIPLEDLLNNPFNYEVDHIIPRSVSFDNSFNNKVLVKQEENSKKGNRTPFQYLSSSDSKISYETFKKHILNLAKGKGRISKTKKEYLLEERDINRFSVQKDFINRNLVDTRYATRGLMNLLRSYFRVNNLDVKVKSINGGFTSFLRRKWKFKKERNKGYKHHAEDALIIANADFIFKEWKKLDKAKKVMENQMFEEKQAESMPEIETEQEYKEIFITPHQIKHIKDFKDYKYSHRVDKKPNRKLINDTLYSTRKDDKGNTLIVNNLNGLYDKDNDKLKKLINKSPEKLLMYHHDPQTYQKLKLIMEQYGDEKNPLYKYYEETGNYLTKYSKKDNGPVIKKIKYYGNKLNAHLDITDDYPNSRNKVVKLSLKPYRFDVYLDNGVYKFVTVKNLDVIKKENYYEVNSKCYEEAKKLKKISNQAEFIASFYKNDLIKINGELYRVIGVNNDLLNRIEVNMIDITYREYLENMNDKRPPHIIKTIASKTQSIKKYSTDILGNLYEVKSKKHPQIIKKG

SEQ ID NO: 15671 - protein, 1061 aa, Staphylococcus auricularis
MQENQQKQNYILGLDIGITSVGYGLIDSKTREVIDAGVRLFPEADSENNSNRRSKRGARRLKRRRIHRLNRVKDLLADYQMIDLNNVPKSTDPYTIRVKGLREPLTKEEFAIALLHIAKRRGLHNISVSMGDEEQDNELSTKQQLQKNAQQLQDKYVCELQLERLTNINKVRGEKNRFKTEDFVKEVKQLCETQRQYHNIDDQFIQQYIDLVSTRREYFEGPGNGSPYGWDGDLLKWYEKLMGRCTYFPEELRSVKYAYSADLFNALNDLNNLVVTRDDNPKLEYYEKYHIIENVFKQKKNPTLKQIAKEIGVQDYDIRGYRITKSGKPQFTSFKLYHDLKNIFEQAKYLEDVEMLDEIAKILTIYQDEISIKKALDQLPELLTESEKSQIAQLTGYTGTHRLSLKCIHIVIDELWESPENQMEIFTRLNLKPKKVEMSEIDSIPTTLVDEFILSPVVKRAFIQSIKVINAVINRFGLPEDIIIELAREKNSKDRRKFINKLQKQNEATRKKIEQLLAKYGNTNAKYMIEKIKLHDMQEGKCLYSLEAIPLEDLLSNPTHYEVDHIIPRSVSFDNSLNNKVLVKQSENSKKGNRTPYQYLSSNESKISYNQFKQHILNLSKAKDRISKKKRDMLLEERDINKFEVQKEFINRNLVDTRYATRELSNLLKTYFSTHDYAVKVKTINGGFTNHLRKVWDFKKHRNHGYKHHAEDALVIANADFLFKTHKALRRTDKILEQPGLEVNDTTVKVDTEEKYQELFETPKQVKNIKQFRDFKYSHRVDKKPNRQLINDTLYSTREIDGETYVVQTLKDLYAKDNEKVKKLFTERPQKILMYQHDPKTFEKLMTILNQYAEAKNPLAAYYEDKGEYVTKYAKKGNGPAIHKIKYIDKKLGSYLDVSNKYPETQNKLVKLSLKSFRFDIYKCEQGYKMVSIGYLDVLKKDNYYYIPKDKYEAEKQKKKIKESDLFVGSFYYNDLIMYEDELFRVIGVNSDINNLVELNMVDITYKDFCEVNNVTGEKRIKKTIGKRVVLIEKYTTDILGNLYKTPLPKKPQLIFKRGEL

SEQ ID NO: 15672 - protein, 1061 aa, Staphylococcus auricularis
MQENQQKQNYILGLDIGITSVGYGLIDSKTREVIDAGVRLFPEADSENNSNRRSKRGARRLKRRRIHRLNRVKDLLADYQMIDLNNVPKSTDPYTIRVKGLREPLTKEEFAIALLHIAKRRGLHNISVSMGDEEQDNELSTKQQLQKNAQQLQDKYVCELQLERLTNINKVRGEKNRFKTEDFVKEVKQLCETQRQYHNIDDQFIQQYIDLVSTRREYFEGPGNGSPYGWDGDLLKWYEKLMGRCTYFPEELRSVKYAYSADLFNALNDLNNLVVTRDDNPKLEYYEKYHIIENVFKQKKNPTLKQIAKEIGVQDYDIRGYRITKSGKPQFTSFKLYHDLKNIFEQAKYLEDVEMLDEIAKILTIYQDEISIKKALDQLPELLTESEKSQIAQLTGYTGTHRLSLKCIHIVIDELWESPENQMEIFTRLNLKPKKVEMSEIDSIPTTLVDEFILSPVVKRAFIQSIKVINAVINRFGLPEDIIIELAREKNSKDRRKFINKLQKQNEATRKKIEQLLAKYGNTNAKYMIEKIKLHDMQEGKCLYSLEAIPLEDLLSNPTHYEVDHIIPRSVSFDNSLNNKVLVKQSENSKKGNRTPYQYLSSNESKISYNQFKQHILNLSKAKDRISKKKRDMLLEERDINKFEVQKEFINRNLVDTRYATRELSNLLKTYFSTHDYAVKVKTINGGFTNHLRKVWDFKKHRNHGYKHHAEDALVIANADFLFKTHKALRRTDKILEQPGLEVNDTTVKVDTEEKYQELFETPKQVKNIKQFRDFKYSHRVDKKPNRKLINDTLYSTREIDGETYVVQTLKDLYAKDNEKVKKLFTERPQKILMYQHDPKTFEKLMTILNQYAEAKNPLAAYYEDKGEYVTKYAKKGNGPAIHKIKYIDKKLGSYLDVSNKYPETQNKLVKLSLKSFRFDIYKCEQGYKMVSIGYLDVLKKDNYYYIPKDKYEAEKQKKKIKESDLFVGSFYKNDLIMYEDELFRVIGVNSDINNLVELNMVDITYKDFCEVNNVTGEKHIKKTIGKRVVLIEKYTTDILGNLYKTPLPKKPQLIFKRGEL

SEQ ID NO: 15673 - protein, 1375 aa, Streptococcus canis
MEKKYSIGLDIGTNSVGWAVITDDYKVPSKKFKVLGNTNRKSIKKNLMGALLFDSGETAEATRLKRTARRRYTRRKNRIRYLQEIFANEMAKLDDSFFQRLEESFLVEEDKKNERHPIFGNLADEVAYHRNYPTIYHLRKKLADSPEKADLRLIYLALAHIIKFRGHFLIEGKLNAENSDVAKLFYQLIQTYNQLFEESPLDEIEVDAKGILSARLSKSKRLEKLIAVFPNEKKNGLFGNIIALALGLTPNFKSNFDLTEDAKLQLSKDTYDDDLDELLGQIGDQYADLFSAAKNLSDAILLSDILRSNSEVTKAPLSASMVKRYDEHHQDLALLKTLVRQQFPEKYAEIFKDDTKNGYAGYVGADKKLRKRSGKLATEEEFYKFIKPILEKMDGAEELLAKLNRDDLLRKQRTFDNGSIPHQIHLKELHAILRRQEEFYPFLKENREKIEKILTFRIPYYVGPLARGNSRFAWLTRKSEEAITPWNFEEVVDKGASAQSFIERMTNFDEQLPNKKVLPKHSLLYEYFTVYNELTKVKYVTERMRKPEFLSGEQKKAIVDLLFKTNRKVTVKQLKEDYFKKIECFDSVEIIGVEDRFNASLGTYHDLLKIIKDKDFLDNEENEDILEDIVLTLTLFEDREMIEERLKTYAHLFDDKVMKQLKRRHYTGWGRLSRKMINGIRDKQSGKTILDFLKSDGFSNRNFMQLIHDDSLTFKEEIEKAQVSGQGDSLHEQIADLAGSPAIKKGILQTVKIVDELVKVMGHKPENIVIEMARENQTTTKGLQQSRERKKRIEEGIKELESQILKENPVENTQLQNEKLYLYYLQNGRDMYVDQELDINRLSDYDVDHIVPQSFIKDDSIDNKVLTRSVENRGKSDNVPSEEVVKKMKNYWRQLLNAKLITQRKFDNLTKAERGGLSEADKAGFIKRQLVETRQITKHVARILDSRMNTKRDKNDKPIREVKVITLKSKLVSDFRKDFQLYKVRDINNYHHAHDAYLNAVVGTALIKKYPKLESEFVYGDYKVYDVRKMIAKSEQEIGKATAKRFFYSNIMNFFKTEVKLANGEIRKRPLIETNGETGEVVWNKEKDFATVRKVLAMPQVNIVKKTEVQTGGFSKESILSKRESAKLIPRKKGWDTRKYGGFGSPTVAYSILVVAKVEKGKAKKLKSVKVLVGITIMEKGSYEKDPIGFLEAKGYKDIKKELIFKLPKYSLFELENGRRRMLASAKELQKANELVLPQHLVRLLYYTQNISATTGSNNLGYIEQHREEFKEIFEKIIDFSEKYILKNKVNSNLKSSFDEQFAVSDSILLSNSFVSLLKYTSFGASGGFTFLDLDVKQGRLRYQTVTEVLDATLIYQSITGLYETRTDLSQLGGD

SEQ ID NO: 15674 - protein, 1368 aa, Streptococcus pyogenes [sequence omitted]

SEQ ID NO: 15675 - protein, 1368 aa, Streptococcus pyogenes
MDKKYSIGLDIGTNSVGWAVITDEYKVPSKKFKVLGNTDRHSIKKNLIGALLFDSGETAEATRLKRTARRRYTRRKNRICYLQEIFSNEMAKVDDSFFHRLEESFLVEEDKKHERHPIFGNIVDEVAYHEKYPTIYHLRKKLVDSTDKADLRLIYLALAHMIKFRGHFLIEGDLNPDNSDVDKLFIQLVQTYNQLFEENPINASGVDAKAILSARLSKSRRLENLIAQLPGEKKNGLFGNLIALSLGLTPNFKSNFDLAEDAKLQLSKDTYDDDLDNLLAQIGDQYADLFLAAKNLSDAILLSDILRVNTEITKAPLSASMIKRYDEHHQDLTLLKALVRQQLPEKYKEIFFDQSKNGYAGYIDGGASQEEFYKFIKPILEKMDGTEELLVKLNREDLLRKQRTFDNGSIPHQIHLGELHAILRRQEDFYPFLKDNREKIEKILTFRIPYYVGPLARGNSRFAWMTRKSEETITPWNFEEVVDKGASAQSFIERMTNFDKNLPNEKVLPKHSLLYEYFTVYNELTKVKYVTEGMRKPAFLSGEQKKAIVDLLFKTNRKVTVKQLKEDYFKKIECFDSVEISGVEDRFNASLGTYHDLLKIIKDKDFLDNEENEDILEDIVLTLTLFEDREMIEERLKTYAHLFDDKVMKQLKRRRYTGWGRLSRKLINGIRDKQSGKTILDFLKSDGFANRNFMQLIHDDSLTFKEDIQKAQVSGQGDSLHEHIANLAGSPAIKKGILQTVKVVDELVKVMGRHKPENIVIEMARENQTTQKGQKNSRERMKRIEEGIKELGSQILKEHPVENTQLQNEKLYLYYLQNGRDMYVDQELDINRLSDYDVDHIVPQSFLKDDSIDNKVLTRSDKNRGKSDNVPSEEVVKKMKNYWRQLLNAKLITQRKFDNLTKAERGGLSELDKAGFIKRQLVETRQITKHVAQILDSRMNTKYDENDKLIREVKVITLKSKLVSDFRKDFQFYKVREINNYHHAHDAYLNAVVGTALIKKYPKLESEFVYGDYKVYDVRKMIAKSEQEIGKATAKYFFYSNIMNFFKTEITLANGEIRKRPLIETNGETGEIVWDKGRDFATVRKVLSMPQVNIVKKTEVQTGGFSKESIRPKRNSDKLIARKKDWDPKKYGGFVSPTVAYSVLVVAKVEKGKSKKLKSVKELLGITIMERSSFEKNPIDFLEAKGYKEVKKDLIIKLPKYSLFELENGRKRMLASARFLQKGNELALPSKYVNFLYLASHYEKLKGSPEDNEQKQLFVEQHKHYLDEIIEQISEFSKRVILADANLDKVLSAYNKHRDKPIREQAENIIHLFTLTNLGAPRAFKYFDTTIDRKVYRSTKEVLDATLIHQSITGLYETRIDLSQLGGD

SEQ ID NO: 15676 - protein, 1368 aa, Streptococcus pyogenes
MDKKYSIGLDIGTNSVGWAVITDEYKVPSKKFKVLGNTDRHSIKKNLIGALLFDSGETAERTRLKRTARRRYTRRKNRICYLQEIFSNEMAKVDDSFFHRLEESFLVEEDKKHERHPIFGNIVDEVAYHEKYPTIYHLRKKLVDSTDKADLRLIYLALAHMIKFRGHFLIEGDLNPDNSDVDKLFIQLVQTYNQLFEENPINASGVDAKAILSARLSKSRRLENLIAQLPGEKKNGLFGNLIALSLGLTPNFKSNFDLAEDAKLQLSKDTYDDDLDNLLAQIGDQYADLFLAAKNLSDAILLSDILRVNTEITKAPLSASMIKRYDEHHQDLTLLKALVRQQLPEKYKEIFFDQSKNGYAGYIDGGASQEEFYKFIKPILEKMDGTEELLVKLNREDLLRKQRTFDNGSIPHQIHLGELHAILRRQEDFYPFLKDNREKIEKILTFRIPYYVGPLARGNSRFAWMTRKSEETITPWNFEEVVDKGASAQSFIERMTNFDKNLPNEKVLPKHSLLYEYFTVYNELTKVKYVTEGMRKPAFLSGEQKKAIVDLLFKTNRKVTVKQLKEDYFKKIECFDSVEISGVEDRFNASLGTYHDLLKIIKDKDFLDNEENEDILEDIVLTLTLFEDREMIEERLKTYAHLFDDKVMKQLKRRRYTGWGRLSRKLINGIRDKQSGKTILDFLKSDGFANRNFMQLIHDDSLTFKEDIQKAQVSGQGDSLHEHIANLAGSPAIKKGILQTVKVVDELVKVMGRHKPENIVIEMARENQTTQKGQKNSRERMKRIEEGIKELGSQILKEHPVENTQLQNEKLYLYYLQNGRDMYVDQELDINRLSDYDVDHIVPQSFLKDDSIDNKVLTRSDKNRGKSDNVPSEEVVKKMKNYWRQLLNAKLITQRKFDNLTKAERGGLSELDKAGFIKRQLVETRQITKHVAQILDSRMNTKYDENDKLIREVKVITLKSKLVSDFRKDFQFYKVREINNYHHAHDAYLNAVVGTALIKKYPKLESEFVYGDYKVYDVRKMIAKSEQEIGKATAKYFFYSNIMNFFKTEITLANGEIRKRPLIETNGETGEIVWDKGRDFATVRKVLSMPQVNIVKKTEVQTGGFSKESIRPKRNSDKLIARKKDWDPKKYGGFLWPTVAYSVLVVAKVEKGKSKKLKSVKELLGITIMERSSFEKNPIDFLEAKGYKEVKKDLIIKLPKYSLFELENGRKRMLASAKQLQKGNELALPSKYVNFLYLASHYEKLKGSPEDNEQKQLFVEQHKHYLDEIIEQISEFSKRVILADANLDKVLSAYNKHRDKPIREQAENIIHLFTLTRLGAPRAFKYFDTTIDPKQYRSTKEVLDATLIHQSITGLYETRIDLSQLGGD

SEQ ID NO: 15677 - protein, 1121 aa, Streptococcus thermophilus
MSDLVLGLDIGIGSVGVGILNKVTGEIIHKNSRIFPAAQAENNLVRRTNRQGRRLARRKKHRRVRLNRLFEESGLITDFTKISINLNPYQLRVKGLTDELSNEELFIALKNMVKHRGISYLDDASDDGNSSVGDYAQIVKENSKQLETKTPGQIQLERYQTYGQLRGDFTVEKDGKKHRLINVFPTSAYRSEALRILQTQQEFNPQITDEFINRYLEILTGKRKYYHGPGNEKSRTDYGRYRTSGETLDNIFGILIGKCTFYPDEFRAAKASYTAQEFNLLNDLNNLTVPTETKKLSKEQKNQIINYVKNEKAMGPAKLFKYIAKLLSCDVADIKGYRIDKSGKAEIHTFEAYRKMKTLETLDIEQMDRETLDKLAYVLTLNTEREGIQEALEHEFADGSFSQKQVDELVQFRKANSSIFGKGWHNFSVKLMMELIPELYETSEEQMTILTRLGKQKTTSSSNKTKYIDEKLLTEEIYNPVVAKSVRQAIKIVNAAIKEYGDFDNIVIEMARETNEDDEKKAIQKIQKANKDEKDAAMLKAANQYNGKAELPHSVFHGHKQLATKIRLWHQQGERCLYTGKTISIHDLINNSNQFEVDHILPLSITFDDSLANKVLVYATANQEKGQRTPYQALDSMDDAWSFRELKAFVRESKTLSNKKKEYLLTEEDISKFDVRKKFIERNLVDTRYASRVVLNALQEHFRAHKIDTKVSVVRGQFTSQLRRHWGIEKTRDTYHHHAVDALIIAASSQLNLWKKQKNTLVSYSEDQLLDIETGELISDDEYKESVFKAPYQHFVDTLKSKEFEDSILFSYQVDSKFNRKISDATIYATRQAKVGKDKADETYVLGKIKDIYTQDGYDAFMKIYKKDKSKFLMYRHDPQTFEKVIEPILENYPNKQINEKGKEVPCNPFLKYKEEHGYIRKYSKKGNGPEIKSLKYYDSKLGNHIDITPKDSNNKVVLQSVSPWRADVYFNKTTGKYEILGLKYADLQFEKGTGTYKISQEKYNDIKKKEGVDSDSEFKFTLYKNDLLLVKDTETKEQQLFRFLSRTMPKQKHYVELKPYDKQKFEGGEALIKVLGNVANSGQCKKGLGKSNISIYKVRTDVLGNQHIIKNEGDKPKLDF

SEQ ID NO: 15678 - protein, 1092 aa, Brevibacillus laterosporus
MAYTMGIDVGIASCGWAIVDLERQRIIDIGVRTFEKAENPKNGEALAVPRREARSSRRRLRRKKHRIERLKHMFVRNGLAVDIQHLEQTLRSQNEIDVWQLRVDGLDRMLTQKEWLRVLIHLAQRRGFQSNRKTDGSSEDGQVLVNVTENDRLMEEKDYRTVAEMMVKDEKFSDHKRNKNGNYHGVVSRSSLLVEIHTLFETQRQHHNSLASKDFELEYVNIWSAQRPVATKDQIEKMIGTCTFLPKEKRAPKASWHFQYFMLLQTINHIRITNVQGTRSLNKEEIEQVVNMALTKSKVSYHDTRKILDLSEEYQFVGLDYGKEDEKKKVESKETIIKLDDYHKLNKIFNEVELAKGETWEADDYDTVAYALTFFKDDEDIRDYLQNKYKDSKNRLVKNLANKEYTNELIGKVSTLSFRKVGHLSLKALRKIIPFLEQGMTYDKACQAAGFDFQGISKKKRSVVLPVIDQISNPVVNRALTQTRKVINALIKKYGSPETIHIETARELSKTFDERKNITKDYKENRDKNEHAKKHLSELGIINPTGLDIVKYKLWCEQQGRCMYSNQPISFERLKESGYTEVDHIIPYSRSMNDSYNNRVLVMTRENREKGNQTPFEYMGNDTQRWYEFEQRVTTNPQIKKEKRQNLLLKGFTNRRELEMLERNLNDTRYITKYLSHFISTNLEFSPSDKKKKVVNTSGRITSHLRSRWGLEKNRGQNDLHHAMDAIVIAVTSDSFIQQVTNYYKRKERRELNGDDKFPLPWKFFREEVIARLSPNPKEQIEALPNHFYSEDELADLQPIFVSRMPKRSITGEAHQAQFRRVVGKTKEGKNITAKKTALVDISYDKNGDFNMYGRETDPATYEAIKERYLEFGGNVKKAFSTDLHKPKKDGTKGPLIKSVRIMENKTLVHPVNKGKGVVYNSSIVRTDVFQRKEKYYLLPVYVTDVTKGKLPNKVIVAKKGYHDWIEVDDSFTFLFSLYPNDLIFIRQNPKKKISLKKRIESHSISDSKEVQEIHAYYKGVDSSTAAIEFIIHDGSYYAKGVGVQNLDCFEKYQVDILGNYFKVKGEKRLELETSDSNHKGKDVNSIKSTSR

SEQ ID NO: 15679 - protein, 1053 aa, Staphylococcus aureus
MKRNYILGLDIGITSVGYGIIDYETRDVIDAGVRLFKEANVENNEGRRSKRGARRLKRRRRHRIQRVKKLLFDYNLLTDHSELSGINPYEARVKGLSQKLSEEEFSAALLHLAKRRGVHNVNEVEEDTGNELSTKEQISRNSKALEEKYVAELQLERLKKDGEVRGSINRFKTSDYVKEAKQLLKVQKAYHQLDQSFIDTYIDLLETRRTYYEGPGEGSPFGWKDIKEWYEMLMGHCTYFPEELRSVKYAYNADLYNALNDLNNLVITRDENEKLEYYEKFQIIENVFKQKKKPTLKQIAKEILVNEEDIKGYRVTSTGKPEFTNLKVYHDIKDITARKEIIENAELLDQIAKILTIYQSSEDIQEELTNLNSELTQEEIEQISNLKGYTGTHNLSLKAINLILDELWHTNDNQIAIFNRLKLVPKKVDLSQQKEIPTTLVDDFILSPVVKRSFIQSIKVINAIIKKYGLPNDIIIELAREKNSKDAQKMINEMQKRNRQTNERIEEIIRTTGKENAKYLIEKIKLHDMQEGKCLYSLEAIPLEDLLNNPFNYEVDHIIPRSVSFDNSFNNKVLVKQEENSKKGNRTPFQYLSSSDSKISYETFKKHILNLAKGKGRISKTKKEYLLEERDINRFSVQKDFINRNLVDTRYATRGLMNLLRSYFRVNNLDVKVKSINGGFTSFLRRKWKFKKERNKGYKHHAEDALIIANADFIFKEWKKLDKAKKVMENQMFEEKQAESMPEIETEQEYKEIFITPHQIKHIKDFKDYKYSHRVDKKPNRKLINDTLYSTRKDDKGNTLIVNNLNGLYDKDNDKLKKLINKSPEKLLMYHHDPQTYQKLKLIMEQYGDEKNPLYKYYEETGNYLTKYSKKDNGPVIKKIKYYGNKLNAHLDITDDYPNSRNKVVKLSLKPYRFDVYLDNGVYKFVTVKNLDVIKKENYYEVNSKCYEEAKKLKKISNQAEFIASFYKNDLIKINGELYRVIGVNSDKNNLIEVNMIDITYREYLENMNDKRPPHIIKTIASKTQSIKKYSTDILGNLYEVKSKKHPQIIKKG

SEQ ID NO: 15680 - protein, 1053 aa, Staphylococcus aureus
MKRNYILGLDIGITSVGYGIIDYETRDVIDAGVRLFKEANVENNEGRRSKRGARRLKRRRRHRIQRVKKLLFDYNLLTDHSELSGINPYEARVKGLSQKLSEEEFSAALLHLAKRRGVHNVNEVEEDTGNELSTKEQISRNSKALEEKYVAELQLERLKKDGEVRGSINRFKTSDYVKEAKQLLKVQKAYHQLDQSFIDTYIDLLETRRTYYEGPGEGSPFGWKDIKEWYEMLMGHCTYFPEELRSVKYAYNADLYNALNDLNNLVITRDENEKLEYYEKFQIIENVFKQKKKPTLKQIAKEILVNEEDIKGYRVTSTGKPEFTNLKVYHDIKDITARKEIIENAELLDQIAKILTIYQSSEDIQEELTNLNSELTQEEIEQISNLKGYTGTHNLSLKAINLILDELWHTNDNQIAIFNRLKLVPKKVDLSQQKEIPTTLVDDFILSPVVKRSFIQSIKVINAIIKKYGLPNDIIIELAREKNSKDAQKMINEMQKRNRQTNERIEEIIRTTGKENAKYLIEKIKLHDMQEGKCLYSLEAIPLEDLLNNPFNYEVDHIIPRSVSFDNSFNNKVLVKQEENSKKGNRTPFQYLSSSDSKISYETFKKHILNLAKGKGRISKTKKEYLLEERDINRFSVQKDFINRNLVDTRYATRGLMNLLRSYFRVNNLDVKVKSINGGFTSFLRRKWKFKKERNKGYKHHAEDALIIANADFIFKEWKKLDKAKKVMENQMFEEKQAESMPEIETEQEYKEIFITPHQIKHIKDFKDYKYSHRVDKKPNRKLINDTLYSTRKDDKGNTLIVNNLNGLYDKDNDKLKKLINKSPEKLLMYHHDPQTYQKLKLIMEQYGDEKNPLYKYYEETGNYLTKYSKKDNGPVIKKIKYYGNKLNAHLDITDDYPNSRNKVVKLSLKPYRFDVYLDNGVYKFVTVKNLDVIKKENYYEVNSKCYEEAKKLKKISNQAEFIASFYKNDLIKINGELYRVIGVNNSTRNIVELNMIDITYREYLENMNDKRPPHIIKTIASKTQSIKKYSTDILGNLYEVKSKKHPQIIKKG

SEQ ID NO: 15681 - protein, 1053 aa, Staphylococcus aureus
MKRNYILGLDIGITSVGYGIIDYETRDVIDAGVRLFKEANVENNEGRRSKRGARRLKRRRRHRIQRVKKLLFDYNLLTDHSELSGINPYEARVKGLSQKLSEEEFSAALLHLAKRRGVHNVNEVEEDTGNELSTKEQISRNSKALEEKYVAELQLERLKKDGEVRGSINRFKTSDYVKEAKQLLKVQKAYHQLDQSFIDTYIDLLETRRTYYEGPGEGSPFGWKDIKEWYEMLMGHCTYFPEELRSVKYAYNADLYNALNDLNNLVITRDENEKLEYYEKFQIIENVFKQKKKPTLKQIAKEILVNEEDIKGYRVTSTGKPEFTNLKVYHDIKDITARKEIIENAELLDQIAKILTIYQSSEDIQEELTNLNSELTQEEIEQISNLKGYTGTHNLSLKAINLILDELWHTNDNQIAIFNRLKLVPKKVDLSQQKEIPTTLVDDFILSPVVKRSFIQSIKVINAIIKKYGLPNDIIIELAREKNSKDAQKMINEMQKRNRQTNERIEEIIRTTGKENAKYLIEKIKLHDMQEGKCLYSLEAIPLEDLLNNPFNYEVDHIIPRSVSFDNSFNNKVLVKQEENSKKGNRTPFQYLSSSDSKISYETFKKHILNLAKGKGRISKTKKEYLLEERDINRFSVQKDFINRNLVDTRYATRGLMNLLRSYFRVNNLDVKVKSINGGFTSFLRRKWKFKKERNKGYKHHAEDALIIANADFIFKEWKKLDKAKKVMENQMFEEKQAESMPEIETEQEYKEIFITPHQIKHIKDFKDYKYSHRVDKKPNRKLINDTLYSTRKDDKGNTLIVNNLNGLYDKDNDKLKKLINKSPEKLLMYHHDPQTYQKLKLIMEQYGDEKNPLYKYYEETGNYLTKYSKKDNGPVIKKIKYYGNKLNAHLDITDDYPNSRNKVVKLSLKPYRFDVYLDNGVYKFVTVKNLDVIKKENYYEVNSKCYEEAKKLKKISNQAEFIASFYKNDLIKINGELYRVIGVNSDDRNIIELNMIDITYREYLENMNDKRPPHIIKTIASKTQSIKKYSTDILGNLYEVKSKKHPQIIKKG

SEQ ID NO: 15682 - protein, 1053 aa, Staphylococcus aureus
MKRNYILGLDIGITSVGYGIIDYETRDVIDAGVRLFKEANVENNEGRRSKRGARRLKRRRRHRIQRVKKLLFDYNLLTDHSELSGINPYEARVKGLSQKLSEEEFSAALLHLAKRRGVHNVNEVEEDTGNELSTKEQISRNSKALEEKYVAELQLERLKKDGEVRGSINRFKTSDYVKEAKQLLKVQKAYHQLDQSFIDTYIDLLETRRTYYEGPGEGSPFGWKDIKEWYEMLMGHCTYFPEELRSVKYAYNADLYNALNDLNNLVITRDENEKLEYYEKFQIIENVFKQKKKPTLKQIAKEILVNEEDIKGYRVTSTGKPEFTNLKVYHDIKDITARKEIIENAELLDQIAKILTIYQSSEDIQEELTNLNSELTQEEIEQISNLKGYTGTHNLSLKAINLILDELWHTNDNQIAIFNRLKLVPKKVDLSQQKEIPTTLVDDFILSPVVKRSFIQSIKVINAIIKKYGLPNDIIIELAREKNSKDAQKMINEMQKRNRQTNERIEEIIRTTGKENAKYLIEKIKLHDMQEGKCLYSLEAIPLEDLLNNPFNYEVDHIIPRSVSFDNSFNNKVLVKQEENSKKGNRTPFQYLSSSDSKISYETFKKHILNLAKGKGRISKTKKEYLLEERDINRFSVQKDFINRNLVDTRYATRGLMNLLRSYFRVNNLDVKVKSINGGFTSFLRRKWKFKKERNKGYKHHAEDALIIANADFIFKEWKKLDKAKKVMENQMFEEKQAESMPEIETEQEYKEIFITPHQIKHIKDFKDYKYSHRVDKKPNRKLINDTLYSTRKDDKGNTLIVNNLNGLYDKDNDKLKKLINKSPEKLLMYHHDPQTYQKLKLIMEQYGDEKNPLYKYYEETGNYLTKYSKKDNGPVIKKIKYYGNKLNAHLDITDDYPNSRNKVVKLSLKPYRFDVYLDNGVYKFVTVKNLDVIKKENYYEVNSKCYEEAKKLKKISNQAEFIASFYKNDLIKINGELYRVIGVNNNRLNKIELNMIDITYREYLENMNDKRPPHIIKTIASKTQSIKKYSTDILGNLYEVKSKKHPQIIKKG

SEQ ID NO: 15683 - protein, 1084 aa, Corynebacterium diphtheriae
MKYHVGIDVGTFSVGLAAIEVDDAGMPIKTLSLVSHIHDSGLDPDEIKSAVTRLASSGIARRTRRLYRRKRRRLQQLDKFIQRQGWPVIELEDYSDPLYPWKVRAELAASYIADEKERGEKLSVALRHIARHRGWRNPYAKVSSLYLPDGPSDAFKAIREEIKRASGQPVPETATVGQMVTLCELGTLKLRGEGGVLSARLQQSDYAREIQEICRMQEIGQELYRKIIDVVFAAESPKGSASSRVGKDPLQPGKNRALKASDAFQRYRIAALIGNLRVRVDGEKRILSVEEKNLVFDHLVNLTPKKEPEWVTIAEILGIDRGQLIGTATMTDDGERAGARPPTHDTNRSIVNSRIAPLVDWWKTASALEQHAMVKALSNAEVDDFDSPEGAKVQAFFADLDDDVHAKLDSLHLPVGRAAYSEDTLVRLTRRMLSDGVDLYTARLQEFGIEPSWTPPTPRIGEPVGNPAVDRVLKTVSRWLESATKTWGAPERVIIEHVREGFVTEKRAREMDGDMRRRAARNAKLFQEMQEKLNVQGKPSRADLWRYQSVQRQNCQCAYCGSPITFSNSEMDHIVPRAGQGSTNTRENLVAVCHRCNQSKGNTPFAIWAKNTSIEGVSVKEAVERTRHWVTDTGMRSTDFKKFTKAVVERFQRATMDEEIDARSMESVAWMANELRSRVAQHFASHGTTVRVYRGSLTAEARRASGISGKLKFFDGVGKSRLDRRHHAIDAAVIAFTSDYVAETLAVRSNLKQSQAHRQEAPQWREFTGKDAEHRAAWRVWCQKMEKLSALLTEDLRDDRVVVMSNVRLRLGNGSAHKETIGKLSKVKLSSQLSVSDIDKASSEALWCALTREPGFDPKEGLPANPERHIRVNGTHVYAGDNIGLFPVSAGSIALRGGYAELGSSFHHARVYKITSGKKPAFAMLRVYTIDLLPYRNQDLFSVELKPQTMSMRQAEKKLRDALATGNAEYLGWLVVDDELVVDTSKIATDQVKAVEAELGTIRRWRVDGFFSPSKLRLRPLQMSKEGIKKESAPELSKIIDRPGWLPAVNKLFSDGNVTVVRRDSLGRVRLESTAHLPVTWKVQ

SEQ ID NO: 15684 - protein, 984 aa, Campylobacter jejuni
MARILAFDIGISSIGWAFSENDELKDCGVRIFTKVENPKTGESLALPRRLARSARKRLARRKARLNHLKHLIANEFKLNYEDYQSFDESLAKAYKGSLISPYELRFRALNELLSKQDFARVILHIAKRRGYDDIKNSDDKEKGAILKAIKQNEEKLANYQSVGEYLYKEYFQKFKENSKEFTNVRNKKESYERCIAQSFLKDELKLIFKKQREFGFSFSKKFEEEVLSVAFYKRALKDFSHLVGNCSFFTDEKRAPKNSPLAFMFVALTRIINLLNNLKNTEGILYTKDDLNALLNEVLKNGTLTYKQTKKLLGLSDDYEFKGEKGTYFIEFKKYKEFIKALGEHNLSQDDLNEIAKDITLIKDEIKLKKALAKYDLNQNQIDSLSKLEFKDHLNISFKALKLVTPLMLEGKKYDEACNELNLKVAINEDKKDFLPAFNETYYKDEVTNPVVLRAIKEYRKVLNALLKKYGKVHKINIELAREVGKNHSQRAKIEKEQNENYKAKKDAELECEKLGLKINSKNILKLRLFKEQKEFCAYSGEKIKISDLQDEKMLEIDHIYPYSRSFDDSYMNKVLVFTKQNQEKLNQTPFEAFGNDSAKWQKIEVLAKNLPTKKQKRILDKNYKDKEQKNFKDRNLNDTRYIARLVLNYTKDYLDFLPLSDDENTKLNDTQKGSKVHVEAKSGMLTSALRHTWGFSAKDRNNHLHHAIDAVIIAYANNSIVKAFSDFKKEQESNSAELYAKKISELDYKNKRKFFEPFSGFRQKVLDKIDEIFVSKPERKKPSGALHEETFRKEEEFYQSYGGKEGVLKALELGKIRKVNGKIVKNGDMFRVDIFKHKKTNKFYAVPIYTMDFALKVLPNKAVARSKKGEIKDWILMDENYEFCFSLYKDSLILIQTKDMQEPEFVYYNAFTSSTVSLIVSKHDNKFETLSKNQKILFKNANEKEVIAKSIGIQNLKVFEKYIVSALGEVTKAEFRQREDFKK

SEQ ID NO: 15685 - protein, 1087 aa, Geobacillus stearothermophilus
MRYKIGLDIGITSVGWAVMNLDIPRIEDLGVRIFDRAENPQTGESLALPRRLARSARRRLRRRKHRLERIRRLVIREGILTKEELDKLFEEKHEIDVWQLRVEALDRKLNNDELARVLLHLAKRRGFKSNRKSERSNKENSTMLKHIEENRAILSSYRTVGEMIVKDPKFALHKRNKGENYTNTIARDDLEREIRLIFSKQREFGNMSCTEEFENEYITIWASQRPVASKDDIEKKVGFCTFEPKEKRAPKATYTFQSFIAWEHINKLRLISPSGARGLTDEERRLLYEQAFQKNKITYHDIRTLLHLPDDTYFKGIVYDRGESRKQNENIRFLELDAYHQIRKAVDKVYGKGKSSSFLPIDFDTFGYALTLFKDDADIHSYLRNEYEQNGKRMPNLANKVYDNELIEELLNLSFTKFGHLSLKALRSILPYMEQGEVYSSACERAGYTFTGPKKKQKTMLLPNIPPIANPVVMRALTQARKVVNAIIKKYGSPVSIHIELARDLSQTFDERRKTKKEQDENRKKNETAIRQLMEYGLTLNPTGHDIVKFKLWSEQNGRCAYSLQPIEIERLLEPGYVEVDHVIPYSRSLDDSYTNKVLVLTRENREKGNRIPAEYLGVGTERWQQFETFVLTNKQFSKKKRDRLLRLHYDENEETEFKNRNLNDTRYISRFFANFIREHLKFAESDDKQKVYTVNGRVTAHLRSRWEFNKNREESDLHHAVDAVIVACTTPSDIAKVTAFYQRREQNKELAKKTEPHFPQPWPHFADELRARLSKHPKESIKALNLGNYDDQKLESLQPVFVSRMPKRSVTGAAHQETLRRYVGIDERSGKIQTVVKTKLSEIKLDASGHFPMYGKESDPRTYEAIRQRLLEHNNDPKKAFQEPLYKPKKNGEPGPVIRTVKIIDTKNQVIPLNDGKTVAYNSNIVRVDVFEKDGKYYCVPVYTMDIMKGILPNKAIEPNKPYSEWKEMTEDYTFRFSLYPNDLIRIELPREKTVKTAAGEEINVKDVFVYYKTIDSANGGLELISHDHRFSLRGVGSRTLKRFEKYQVDVLGNIYKVRGEKRVGLASSAHSKPGKTIRPLQSTRD

SEQ ID NO: 15686 - protein, 1378 aa, Streptococcus sp.
MDKKYSIGLDIGTNSVGWAVITDEYKVPSKKFKVLGNTDRHSIKKNLIGALLFDSGETAEATRLKRTARRRYTRRKNRICYLQEIFSNEMAKVDDSFFHRLEESFLVEEDKKHERHPIFGNIVDEVAYHEKYPTIYHLRKKLVDSTDKADLRLIYLALAHMIKFRGHFLIEGDLNPDNSDVDKLFIQLVQTYNQLFEENPINASGVDAKAILSARLSKSRKLENLIAQLPGEKKNGLFGNLIALSLGLTPNFKSNFDLAEDAKLQLSKDTYDDDLDNLLAQIGDQYADLFLAAKNLSDAILLSDILRVNTEITKAPLSASMIKRYDEHHQDLTLLKALVRQQLPEKYKEIFFDQSKNGYAGYIDGGASQEEFYKFIKPILEKMDGTEELLVKLKREDLLRKQRTFDNGSIPHQIHLGELHAILRRQEDFYPFLKDNREKIEKILTFRIPYYVGPLARGNSRFAWMTRKSEETITPWNFEEVVDKGASAQSFIERMTNFDKNLPNEKVLPKHSLLYEYFTVYNELTKVKYVTEGMRKPAFLSGEQKKAIVDLLFKTNRKVTVKQLKEDYFKKIECFDSVEISGVEDRFNASLGTYHDLLKIIKDKDFLDNEENEDILEDIVLTLTLFEDREMIEERLKTYAHLFDDKVMKQLKRRRYTGWGRLSRKLINGIRDKQSGKTILDFLKSDGFANRNFMQLIHDDSLTFKEDIQKAQVSGQGDSLHEHIANLAGSPAIKKGILQTVKVVDELVKVMGRHKPENIVIEMARENQTTQKGQKNSRERMKRIEEGIKELGSQILKEHPVENTQLQNEKLYLYYLQNGRDMYVDQELDINRLSDYDVDHIVPQSFLKDDSIDNKVLTRSDKNRGKSDNVPSEEVVKKMKNYWRQLLNAKLITQRKFDNLTKAERGGLSELDKAGFIKRQLVETRQITKHVAQILDSRMNTKYDENDKLIREVKVITLKSKLVSDFRKDFQFYKVREINNYHHAHDAYLNAVVGTALIKKYPKLESEFVYGDYKVYDVRKMIAKSEQEIGKATAKYFFYSNIMNFFKTEITLANGEIRKRPLIETNGETGEIVWDKGRDFATVRKVLSMPQVNIVKKTEIQTVGQNGGLFDDNPKSPLEVTPSKLVPLKKELNPKKYGGYQKPTTAYPVLLITDTKQLIPISVMNKKQFEQNPVKFLRDRGYQQVGKNDFIKLPKYTLVDIGDGIKRLWASSKEIHKGNQLVVSKKSQILLYHAHHLDSDLSNDYLQNHNQQFDVLFNEIISFSKKCKLGKEHIQKIENVYSNKKNSASIEELAESFIKLLGFTQLGATSPFNFLGVKLNQKQYKGKKDYILPCTEGTLIRQSITGLYETRVDLSKIGEDSGGSGGSKRTADGSEFES

SEQ ID NO: 15687 - protein, 1082 aa, Neisseria meningitidis
MAAFKPNSINYILGLDIGIASVGWAMVEIDEEENPIRLIDLGVRVFERAEVPKTGDSLAMARRLARSVRRLTRRRAHRLLRTRRLLKREGVLQAANFDENGLIKSLPNTPWQLRAAALDRKLTPLEWSAVLLHLIKHRGYLSQRKNEGETADKELGALLKGVAGNAHALQTGDFRTPAELALNKFEKESGHIRNQRSDYSHTFSRKDLQAELILLFEKQKEFGNPHVSGGLKEGIETLLMTQRPALSGDAVQKMLGHCTFEPAEPKAAKNTYTAERFIWLTKLNNLRILEQGSERPLTDTERATLMDEPYRKSKLTYAQARKLLGLEDTAFFKGLRYGKDNAEASTLMEMKAYHAISRALEKEGLKDKKSPLNLSPELQDEIGTAFSLFKTDEDITGRLKDRIQPEILEALLKHISFDKFVQISLKALRRIVPLMEQGKRYDEACAEIYGDHYGKKNTEEKIYLPPIPADEIRNPVVLRALSQARKVINGVVRRYGSPARIHIETAREVGKSFKDRKEIEKRQEENRKDREKAAAKFREYFPNFVGEPKSKDILKLRLYEQQHGKCLYSGKEINLGRLNEKGYVEIDHALPFSRTWDDSFNNKVLVLGSENQNKGNQTPYEYFNGKDNSREWQEFKARVETSRFPRSKKQRILLQKFDEDGFKERNLNDTRYVNRFLCQFVADRMRLTGKGKKRVFASNGQITNLLRGFWGLRKVRAENDRHHALDAVVVACSTVAMQQKITRFVRYKEMNAFDGKTIDKETGEVLHQKTHFPQPWEFFAQEVMIRVFGKPDGKPEFEEADTLEKLRTLLAEKLSSRPEAVHEYVTPLFVSRAPNRKMSGQGHMETVKSAKRLDEGVSVLRVPLTQLKLKDLEKMVNREREPKLYEALKARLEAHKDDPAKAFAEPFYKYDKAGNRTQQVKAVRVEQVQKTGVWVRNHNGIADNATMVRVDVFEKGDKYYLVPIYSWQVAKGILPDRAVVQGKDEEDWQLIDDSFNFKFSLHPNDLVEVITKKARMFGYFASCHRGTGNINIRIHDLDHKIGKNGILEGIGVKTALSFQKYQIDELGKEIRPCRLKKRPPVR

SEQ ID NO: 15688 - protein, 1375 aa, Streptococcus canis
MEKKYSIGLDIGTNSVGWAVITDDYKVPSKKFKVLGNTNRKSIKKNLMGALLFDSGETAEATRLKRTARRRYTRRKNRIRYLQEIFANEMAKLDDSFFQRLEESFLVEEDKKNERHPIFGNLADEVAYHRNYPTIYHLRKKLADSPEKADLRLIYLALAHIIKFRGHFLIEGKLNAENSDVAKLFYQLIQTYNQLFEESPLDEIEVDAKGILSARLSKSKRLEKLIAVFPNEKKNGLFGNIIALALGLTPNFKSNFDLTEDAKLQLSKDTYDDDLDELLGQIGDQYADLFSAAKNLSDAILLSDILRSNSEVTKAPLSASMVKRYDEHHQDLALLKTLVRQQFPEKYAEIFKDDTKNGYAGYVGIGIKHRKRTTKLATQEEFYKFIKPILEKMDGAEELLAKLNRDDLLRKQRTFDNGSIPHQIHLKELHAILRRQEEFYPFLKENREKIEKILTFRIPYYVGPLARGNSRFAWLTRKSEEAITPWNFEEVVDKGASAQSFIERMTNFDEQLPNKKVLPKHSLLYEYFTVYNELTKVKYVTERMRKPEFLSGEQKKAIVDLLFKTNRKVTVKQLKEDYFKKIECFDSVEIIGVEDRFNASLGTYHDLLKIIKDKDFLDNEENEDILEDIVLTLTLFEDREMIEERLKTYAHLFDDKVMKQLKRRHYTGWGRLSRKMINGIRDKQSGKTILDFLKSDGFSNRNFMQLIHDDSLTFKEEIEKAQVSGQGDSLHEQIADLAGSPAIKKGILQTVKIVDELVKVMGHKPENIVIEMARENQTTTKGLQQSRERKKRIEEGIKELESQILKENPVENTQLQNEKLYLYYLQNGRDMYVDQELDINRLSDYDVDHIVPQSFIKDDSIDNKVLTRSVENRGKSDNVPSEEVVKKMKNYWRQLLNAKLITQRKFDNLTKAERGGLSEADKAGFIKRQLVETRQITKHVARILDSRMNTKRDKNDKPIREVKVITLKSKLVSDFRKDFQLYKVRDINNYHHAHDAYLNAVVGTALIKKYPKLESEFVYGDYKVYDVRKMIAKSEQEIGKATAKRFFYSNIMNFFKTEVKLANGEIRKRPLIETNGETGEVVWNKEKDFATVRKVLAMPQVNIVKKTEVQTGGFSKESILSKRESAKLIPRKKGWDTRKYGGFGSPTVAYSILVVAKVEKGKAKKLKSVKVLVGITIMEKGSYEKDPIGFLEAKGYKDIKKELIFKLPKYSLFELENGRRRMLASATELQKANELVLPQHLVRLLYYTQNISATTGSNNLGYIEQHREEFKEIFEKIIDFSEKYILKNKVNSNLKSSFDEQFAVSDSILLSNSFVSLLKYTSFGASGGFTFLDLDVKQGRLRYQTVTEVLDATLIYQSITGLYETRTDLSQLGGD

SEQ ID NO: 15689 - protein, 1375 aa, Streptococcus canis
MEKKYSIGLDIGTNSVGWAVITDDYKVPSKKFKVLGNTNRKSIKKNLMGALLFDSGETAEATRLKRTARRRYTRRKNRIRYLQEIFANEMAKLDDSFFQRLEESFLVEEDKKNERHPIFGNLADEVAYHRNYPTIYHLRKKLADSPEKADLRLIYLALAHIIKFRGHFLIEGKLNAENSDVAKLFYQLIQTYNQLFEESPLDEIEVDAKGILSARLSKSKRLEKLIAVFPNEKKNGLFGNIIALALGLTPNFKSNFDLTEDAKLQLSKDTYDDDLDELLGQIGDQYADLFSAAKNLSDAILLSDILRSNSEVTKAPLSASMVKRYDEHHQDLALLKTLVRQQFPEKYAEIFKDDTKNGYAGYVGADKKLRKRSGKLATEEEFYKFIKPILEKMDGAEELLAKLNRDDLLRKQRTFDNGSIPHQIHLKELHAILRRQEEFYPFLKENREKIEKILTFRIPYYVGPLARGNSRFAWLTRKSEEAITPWNFEEVVDKGASAQSFIERMTNFDEQLPNKKVLPKHSLLYEYFTVYNELTKVKYVTERMRKPEFLSGEQKKAIVDLLFKTNRKVTVKQLKEDYFKKIECFDSVEIIGVEDRFNASLGTYHDLLKIIKDKDFLDNEENEDILEDIVLTLTLFEDREMIEERLKTYAHLFDDKVMKQLKRRHYTGWGRLSRKMINGIRDKQSGKTILDFLKSDGFSNANFMQLIHDDSLTFKEEIEKAQVSGQGDSLHEQIADLAGSPAIKKGILQTVKIVDELVKVMGHKPENIVIEMARENQTTTKGLQQSRERKKRIEEGIKELESQILKENPVENTQLQNEKLYLYYLQNGRDMYVDQELDINRLSDYDVDHIVPQSFIKDDSIDNKVLTRSVENRGKSDNVPSEEVVKKMKNYWRQLLNAKLITQRKFDNLTKAERGGLSEADKAGFIKRQLVETRQITKHVARILDSRMNTKRDKNDKPIREVKVITLKSKLVSDFRKDFQLYKVRDINNYHHAHDAYLNAVVGTALIKKYPKLESEFVYGDYKVYDVRKMIAKSEQEIGKATAKRFFYSNIMNFFKTEVKLANGEIRKRPLIETNGETGEVVWNKEKDFATVRKVLAMPQVNIVKKTEVQTGGFSKESILSKRESAKLIPRKKGWDTRKYGGFGSPTVAYSILVVAKVEKGKAKKLKSVKVLVGITIMEKGSYEKDPIGFLEAKGYKDIKKELIFKLPKYSLFELENGRRRMLASAKELQKANELVLPQHLVRLLYYTQNISATTGSNNLGYIEQHREEFKEIFEKIIDFSEKYILKNKVNSNLKSSFDEQFAVSDSILLSNSFVSLLKYTSFGASGGFTFLDLDVKQGRLRYQTVTEVLDATLIYQSITGLYETRTDLSQLGGD

SEQ ID NO: 15690 - protein, 1368 aa, Streptococcus pyogenes
MDKKYSIGLDIGTNSVGWAVITDEYKVPSKKFKVLGNTDRHSIKKNLIGALLFDSGETAEATRLKRTARRRYTRRKNRICYLQEIFSNEMAKVDDSFFHRLEESFLVEEDKKHERHPIFGNIVDEVAYHEKYPTIYHLRKKLVDSTDKADLRLIYLALAHMIKFRGHFLIEGDLNPDNSDVDKLFIQLVQTYNQLFEENPINASGVDAKAILSARLSKSRRLENLIAQLPGEKKNGLFGNLIALSLGLTPNFKSNFDLAEDAKLQLSKDTYDDDLDNLLAQIGDQYADLFLAAKNLSDAILLSDILRVNTEITKAPLSASMVKRYDEHHQDLTLLKALVRQQLPEKYKEIFFDQSKNGYAGYIDGGASQEEFYKFIKPILEKMDGTEELLVKLNREDLLRKQRTFDNGIIPHQIHLGELHAILRRQGDFYPFLKDNREKIEKILTFRIPYYVGPLARGNSRFAWMTRKSEETITPWNFEEVVDKGASAQSFIERMTNFDKNLPNEKVLPKHSLLYEYFTVYNELTKVKYVTEGMRKPAFLSGEQKKAIVDLLFKTNRKVTVKQLKEDYFKKIECFDSVEISGVEDRFNASLGTYHDLLKIIKDKDFLDNEENEDILEDIVLTLTLFEDREMIEERLKTYAHLFDDKVMKQLKRLRYTGWGRLSRKLINGIRDKQSGKTILDFLKSDGFANRNFMQLIHDDSLTFKEDIQKAQVSGQGDSLHEHIANLAGSPAIKKGILQTVKVVDELVKVMGGHKPENIVIEMARENQTTQKGQKNSRERMKRIEEGIKELGSQILKEHPVENTQLQNEKLYLYYLQNGRDMYVDQELDINRLSDYDVDHIVPQSFLKDDSIDNKVLTRSDKNRGKSDNVPSEEVVKKMKNYWRQLLNAKLITQRKFDNLTKAERGGLSELDKAGFIKRQLVETRQITKHVAQILDSRMNTKYDENDKLIREVKVITLKSKLVSDFRKDFQFYKVREINNYHHAHDAYLNAVVGTALIKKYPKLESEFVYGDYKVYDVRKMIAKSEQEIGKATAKYFFYSNIMNFFKTEITLANGEIRKRPLIETNGETGEIVWDKGRDFATVRKVLSMPQVNIVKKTEVQTGGFSKESILPKGNSDKLIARKKDWDPKKYGGFNSPTAAYSVLVVAKVEKGKSKKLKSVKELLGITIMERSSFEKNPIGFLEAKGYKEVKKDLIIKLPKYSLFELENGRKRMLASAGVLHKGNELALPSKYVNFLYLASHYEKLKGSPEDNEQKQLFVEQHKHYLDEIIEQISEFSKRVILADANLDKVLSAYNKHRDKPIREQAENIIHLFTLTNLGVPAAFKYFDTTIDKKRYTSTKEVLDATLIHQSITGLYETRIDLSQLGGD

SEQ ID NO: 15691 - protein, 1368 aa, Streptococcus pyogenes
MDKKYSIGLDIGTNSVGWAVITDEYKVPSKKFKVLGNTDRHSIKKNLIGALLFDSGETAEATRLKRTARRRYTRRKNRICYLQEIFSNEMAKVDDSFFHRLEESFLVEEDKKHERHPIFGNIVDEVAYHEKYPTIYHLRKKLVDSTDKADLRLIYLALAHMIKFRGHFLIEGDLNPDNSDVDKLFIQLVQTYNQLFEENPINASGVDAKAILSARLSKSRRLENLIAQLPGEKKNGLFGNLIALSLGLTPNFKSNFDLAEDAKLQLSKDTYDDDLDNLLAQIGDQYADLFLAAKNLSDAILLSDILRVNTEITKAPLSASMVKRYDEHHQDLTLLKALVRQQLPEKYKEIFFDQSKNGYAGYIDGGASQEEFYKFIKPILEKMDGTEELLVKLNREDLLRKQRTFDNGIIPHQIHLGELHAILRRQGDFYPFLKDNREKIEKILTFRIPYYVGPLARGNSRFAWMTRKSEETITPWNFEEVVDKGASAQSFIERMTNFDKNLPNEKVLPKHSLLYEYFTVYNELTKVKYVTEGMRKPAFLSGEQKKAIVDLLFKTNRKVTVKQLKEDYFKKIECFDSVEISGVEDRFNASLGTYHDLLKIIKDKDFLDNEENEDILEDIVLTLTLFEDREMIEERLKTYAHLFDDKVMKQLKRLRYTGWGRLSRKLINGIRDKQSGKTILDFLKSDGFANRNFMQLIHDDSLTFKEDIQKAQVSGQGDSLHEHIANLAGSPAIKKGILQTVKVVDELVKVMGGHKPENIVIEMARENQTTQKGQKNSRERMKRIEEGIKELGSQILKEHPVENTQLQNEKLYLYYLQNGRDMYVDQELDINRLSDYDVDHIVPQSFLKDDSIDNKVLTRSDKNRGKSDNVPSEEVVKKMKNYWRQLLNAKLITQRKFDNLTKAERGGLSELDKAGFIKRQLVETRQITKHVAQILDSRMNTKYDENDKLIREVKVITLKSKLVSDFRKDFQFYKVREINNYHHAHDAYLNAVVGTALIKKYPKLESEFVYGDYKVYDVRKMIAKSEQEIGKATAKYFFYSNIMNFFKTEITLANGEIRKRPLIETNGETGEIVWDKGRDFATVRKVLSMPQVNIVKKTEVQTGGFSKESILPKGNSDKLIARKKDWDPKKYGGFNSPTVAYSVLVVAKVEKGKSKKLKSVKELLGITIMERSSFEKNPIGFLEAKGYKEVKKDLIIKLPKYSLFELENGRKRMLASASVLHKGNELALPSKYVNFLYLASHYEKLKGSSEDNKQKQLFVEQHKHYLDEIIEQISEFSKRVILADANLDKVLSAYNKHRDKPIREQAENIIHLFTLTNLGASAAFKYFDTTIGRKLYTSTKEVLDATLIHQSITGLYETRIDLSQLGGD

SEQ ID NO: 15692 - protein, 1368 aa, Streptococcus pyogenes
MDKKYSIGLDIGTNSVGWAVITDEYKVPSKKFKVLGNTDRHSIKKNLIGALLFDSGETAEATRLKRTARRRYTRRKNRICYLQEIFSNEMAKVDDSFFHRLEESFLVEEDKKHERHPIFGNIVDEVAYHEKYPTIYHLRKKLVDSTDKADLRLIYLALAHMIKFRGHFLIEGDLNPDNSDVDKLFIQLVQTYNQLFEENPINASGVDAKAILSARLSKSRRLENLIAQLPGEKKNGLFGNLIALSLGLTPNFKSNFDLAEDAKLQLSKDTYDDDLDNLLAQIGDQYADLFLAAKNLSDAILLSDILRVNTEITKAPLSASMVKRYDEHHQDLTLLKALVRQQLPEKYKEIFFDQSKNGYAGYIDGGASQEEFYKFIKPILEKMDGTEELLVKLNREDLLRKQRTFDNGIIPHQIHLGELHAILRRQGDFYPFLKDNREKIEKILTFRIPYYVGPLARGNSRFAWMTRKSEETITPWNFEEVVDKGASAQSFIERMTNFDKNLPNEKVLPKHSLLYEYFTVYNELTKVKYVTEGMRKPAFLSGEQKKAIVDLLFKTNRKVTVKQLKEDYFKKIECFDSVEISGVEDRFNASLGTYHDLLKIIKDKDFLDNEENEDILEDIVLTLTLFEDREMIEERLKTYAHLFDDKVMKQLKRLRYTGWGRLSRKLINGIRDKQSGKTILDFLKSDGFANRNFMQLIHDDSLTFKEDIQKAQVSGQGDSLHEHIANLAGSPAIKKGILQTVKVVDELVKVMGGHKPENIVIEMARENQTTQKGQKNSRERMKRIEEGIKELGSQILKEHPVENTQLQNEKLYLYYLQNGRDMYVDQELDINRLSDYDVDHIVPQSFLKDDSIDNKVLTRSDKNRGKSDNVPSEEVVKKMKNYWRQLLNAKLITQRKFDNLTKAERGGLSELDKAGFIKRQLVETRQITKHVAQILDSRMNTKYDENDKLIREVKVITLKSKLVSDFRKDFQFYKVREINNYHHAHDAYLNAVVGTALIKKYPKLESEFVYGDYKVYDVRKMIAKSEQEIGKATAKYFFYSNIMNFFKTEITLANGEIRKRPLIETNGETGEIVWDKGRDFATVRKVLSMPQVNIVKKTEVQTGGFSKESILPKGNSDKLIARKKDWDPKKYGGFNSPTVAYSVLVVAKVEKGKSKKLKSVKELLGITIMERSSFEKNPIDFLEAKGYKEVKKDLIIKLPKYSLFELENGRKRMLASAGVLQKGNELALPSKYVNFLYLASHYEKLKGSPEDNEQKQLFVEQHKHYLDEIIEQISEFSKRVILADANLDKVLSAYNKHRDKPIREQAENIIHLFTLTNLGAPAAFKYFDTTINRKQYNTTKEVLDATLIRQSITGLYETRIDLSQLGGD

SEQ ID NO: 15693 - protein, 1368 aa, Streptococcus pyogenes
MDKKYSIGLDIGTNSVGWAVITDEYKVPSKKFKVLGNTDRHSIKKNLIGALLFDSGETAEATRLKRTARRRYTRRKNRICYLQEIFSNEMAKVDDSFFHRLEESFLVEEDKKHERHPIFGNIVDEVAYHEKYPTIYHLRKKLVDSTDKADLRLIYLALAHMIKFRGHFLIEGDLNPDNSDVDKLFIQLVQTYNQLFEENPINASGVDAKAILSARLSKSRRLENLIAQLPGEKKNGLFGNLIALSLGLTPNFKSNFDLAEDAKLQLSKDTYDDDLDNLLAQIGDQYADLFLAAKNLSDAILLSDILRVNTEITKAPLSASMIKRYDEHHQDLTLLKALVRQQLPEKYKEIFFDQSKNGYAGYIDGGASQEEFYKFIKPILEKMDGTEELLVKLNREDLLRKQRTFDNGSIPHQIHLGELHAILRRQEDFYPFLKDNREKIEKILTFRIPYYVGPLARGNSRFAWMTRKSEETITPWNFEEVVDKGASAQSFIERMTNFDKNLPNEKVLPKHSLLYEYFTVYNELTKVKYVTEGMRKPAFLSGEQKKAIVDLLFKTNRKVTVKQLKEDYFKKIECFDSVEISGVEDRFNASLGTYHDLLKIIKDKDFLDNEENEDILEDIVLTLTLFEDREMIEERLKTYAHLFDDKVMKQLKRRRYTGWGRLSRKLINGIRDKQSGKTILDFLKSDGFANRNFMQLIHDDSLTFKEDIQKAQVSGQGDSLHEHIANLAGSPAIKKGILQTVKVVDELVKVMGRHKPENIVIEMARENQTTQKGQKNSRERMKRIEEGIKELGSQILKEHPVENTQLQNEKLYLYYLQNGRDMYVDQELDINRLSDYDVDHIVPQSFLKDDSIDNKVLTRSDKNRGKSDNVPSEEVVKKMKNYWRQLLNAKLITQRKFDNLTKAERGGLSELDKAGFIKRQLVETRQITKHVAQILDSRMNTKYDENDKLIREVKVITLKSKLVSDFRKDFQFYKVREINNYHHAHDAYLNAVVGTALIKKYPKLESEFVYGDYKVYDVRKMIAKSEQEIGKATAKYFFYSNIMNFFKTEITLANGEIRKRPLIETNGETGEIVWDKGRDFATVRKVLSMPQVNIVKKTEVQTGGFSKESILPKRNSDKLIARKKDWDPKKYGGFDSPTVAYSVLVVAKVEKGKSKKLKSVKELLGITIMERSSFEKNPIDFLEAKGYKEVKKDLIIKLPKYSLFELENGRKRMLASARELQKGNELALPSKYVNFLYLASHYEKLKGSPEDNEQKQLFVEQHKHYLDEIIEQISEFSKRVILADAQLDKVLSAYNKHRDKPIREQAENIIHLFTLTNLGAPAAFKYFDTTFKQKQYRSTKEVLDATLIHQSITGLYETRIDLSQLGGD

SEQ ID NO: 15694 - protein, 1368 aa, Streptococcus pyogenes
MDKKYSIGLDIGTNSVGWAVITDEYKVPSKKFKVLGNTDRHSIKKNLIGALLFDSGETAEATRLKRTARRRYTRRKNRICYLQEIFSNEMAKVDDSFFHRLEESFLVEEDKKHERHPIFGNIVDEVAYHEKYPTIYHLRKKLVDSTDKADLRLIYLALAHMIKFRGHFLIEGDLNPDNSDVDKLFIQLVQTYNQLFEENPINASGVDAKAILSARLSKSRRLENLIAQLPGEKKNGLFGNLIALSLGLTPNFKSNFDLAEDAKLQLSKDTYDDDLDNLLAQIGDQYADLFLAAKNLSDAILLSDILRVNTEITKAPLSASMIKRYDEHHQDLTLLKALVRQQLPEKYKEIFFDQSKNGYAGYIDGGASQEEFYKFIKPILEKMDGTEELLVKLNREDLLRKQRTFDNGSIPHQIHLGELHAILRRQEDFYPFLKDNREKIEKILTFRIPYYVGPLARGNSRFAWMTRKSEETITPWNFEEVVDKGASAQSFIERMTNFDKNLPNEKVLPKHSLLYEYFTVYNELTKVKYVTEGMRKPAFLSGEQKKAIVDLLFKTNRKVTVKQLKEDYFKKIECFDSVEISGVEDRFNASLGTYHDLLKIIKDKDFLDNEENEDILEDIVLTLTLFEDREMIEERLKTYAHLFDDKVMKQLKRRRYTGWGRLSRKLINGIRDKQSGKTILDFLKSDGFANRNFMQLIHDDSLTFKEDIQKAQVSGQGDSLHEHIANLAGSPAIKKGILQTVKVVDELVKVMGRHKPENIVIEMARENQTTQKGQKNSRERMKRIEEGIKELGSQILKEHPVENTQLQNEKLYLYYLQNGRDMYVDQELDINRLSDYDVDHIVPQSFLKDDSIDNKVLTRSDKNRGKSDNVPSEEVVKKMKNYWRQLLNAKLITQRKFDNLTKAERGGLSELDKAGFIKRQLVETRQITKHVAQILDSRMNTKYDENDKLIREVKVITLKSKLVSDFRKDFQFYKVREINNYHHAHDAYLNAVVGTALIKKYPKLESEFVYGDYKVYDVRKMIAKSEQEIGKATAKYFFYSNIMNFFKTEITLANGEIRKRPLIETNGETGEIVWDKGRDFATVRKVLSMPQVNIVKKTEVQTGGFSKESILPKRNSDKLIARKKDWDPKKYGGFLWPTVAYSVLVVAKVEKGKSKKLKSVKELLGITIMERSSFEKNPIDFLEAKGYKEVKKDLIIKLPKYSLFELENGRKRMLASAKQLQKGNELALPSKYVNFLYLASHYEKLKGSPEDNEQKQLFVEQHKHYLDEIIEQISEFSKRVILADANLDKVLSAYNKHRDKPIREQAENIIHLFTLTNLGAPAAFKYFDTTIDRKQYRSTKEVLDATLIHQSITGLYETRIDLSQLGGD

SEQ ID NO: 15695 - protein, 1368 aa, Streptococcus pyogenes
MDKKYSIGLDIGTNSVGWAVITDEYKVPSKKFKVLGNTDRHSIKKNLIGALLFDSGETAEATRLKRTARRRYTRRKNRICYLQEIFSNEMAKVDDSFFHRLEESFLVEEDKKHERHPIFGNIVDEVAYHEKYPTIYHLRKKLVDSTDKADLRLIYLALAHMIKFRGHFLIEGDLNPDNSDVDKLFIQLVQTYNQLFEENPINASGVDAKAILSARLSKSRRLENLIAQLPGEKKNGLFGNLIALSLGLTPNFKSNFDLAEDAKLQLSKDTYDDDLDNLLAQIGDQYADLFLAAKNLSDAILLSDILRVNTEITKAPLSASMIKRYDEHHQDLTLLKALVRQQLPEKYKEIFFDQSKNGYAGYIDGGASQEEFYKFIKPILEKMDGTEELLVKLNREDLLRKQRTFDNGSIPHQIHLGELHAILRRQEDFYPFLKDNREKIEKILTFRIPYYVGPLARGNSRFAWMTRKSEETITPWNFEEVVDKGASAQSFIERMTNFDKNLPNEKVLPKHSLLYEYFTVYNELTKVKYVTEGMRKPAFLSGEQKKAIVDLLFKTNRKVTVKQLKEDYFKKIECFDSVEISGVEDRFNASLGTYHDLLKIIKDKDFLDNEENEDILEDIVLTLTLFEDREMIEERLKTYAHLFDDKVMKQLKRRRYTGWGRLSRKLINGIRDKQSGKTILDFLKSDGFANRNFMQLIHDDSLTFKEDIQKAQVSGQGDSLHEHIANLAGSPAIKKGILQTVKVVDELVKVMGRHKPENIVIEMARENQTTQKGQKNSRERMKRIEEGIKELGSQILKEHPVENTQLQNEKLYLYYLQNGRDMYVDQELDINRLSDYDVDHIVPQSFLKDDSIDNKVLTRSDKNRGKSDNVPSEEVVKKMKNYWRQLLNAKLITQRKFDNLTKAERGGLSELDKAGFIKRQLVETRQITKHVAQILDSRMNTKYDENDKLIREVKVITLKSKLVSDFRKDFQFYKVREINNYHHAHDAYLNAVVGTALIKKYPKLESEFVYGDYKVYDVRKMIAKSEQEIGKATAKYFFYSNIMNFFKTEITLANGEIRKRPLIETNGETGEIVWDKGRDFATVRKVLSMPQVNIVKKTEVQTGGFSKESILPKRNSDKLIARKKDWDPKKYGGFVSPTVAYSVLVVAKVEKGKSKKLKSVKELLGITIMERSSFEKNPIDFLEAKGYKEVKKDLIIKLPKYSLFELENGRKRMLASAGELQKGNELALPSKYVNFLYLASHYEKLKGSPEDNEQKQLFVEQHKHYLDEIIEQISEFSKRVILADANLDKVLSAYNKHRDKPIREQAENIIHLFTLTNLGAPAAFKYFDTTIDRKQYRSTKEVLDATLIHQSITGLYETRIDLSQLGGD

SEQ ID NO: 15696 - protein, 1368 aa, Streptococcus pyogenes
MDKKYSIGLDIGTNSVGWAVITDEYKVPSKKFKVLGNTDRHSIKKNLIGALLFDSGETAEATRLKRTARRRYTRRKNRICYLQEIFSNEMAKVDDSFFHRLEESFLVEEDKKHERHPIFGNIVDEVAYHEKYPTIYHLRKKLVDSTDKADLRLIYLALAHMIKFRGHFLIEGDLNPDNSDVDKLFIQLVQTYNQLFEENPINASGVDAKAILSARLSKSRRLENLIAQLPGEKKNGLFGNLIALSLGLTPNFKSNFDLAEDAKLQLSKDTYDDDLDNLLAQIGDQYADLFLAAKNLSDAILLSDILRVNTEITKAPLSASMIKRYDEHHQDLTLLKALVRQQLPEKYKEIFFDQSKNGYAGYIDGGASQEEFYKFIKPILEKMDGTEELLVKLNREDLLRKQRTFDNGSIPHQIHLGELHAILRRQEDFYPFLKDNREKIEKILTFRIPYYVGPLARGNSRFAWMTRKSEETITPWNFEEVVDKGASAQSFIERMTNFDKNLPNEKVLPKHSLLYEYFTVYNELTKVKYVTEGMRKPAFLSGEQKKAIVDLLFKTNRKVTVKQLKEDYFKKIECFDSVEISGVEDRFNASLGTYHDLLKIIKDKDFLDNEENEDILEDIVLTLTLFEDREMIEERLKTYAHLFDDKVMKQLKRRRYTGWGRLSRKLINGIRDKQSGKTILDFLKSDGFANRNFMQLIHDDSLTFKEDIQKAQVSGQGDSLHEHIANLAGSPAIKKGILQTVKVVDELVKVMGRHKPENIVIEMARENQTTQKGQKNSRERMKRIEEGIKELGSQILKEHPVENTQLQNEKLYLYYLQNGRDMYVDQELDINRLSDYDVDHIVPQSFLKDDSIDNKVLTRSDKNRGKSDNVPSEEVVKKMKNYWRQLLNAKLITQRKFDNLTKAERGGLSELDKAGFIKRQLVETRQITKHVAQILDSRMNTKYDENDKLIREVKVITLKSKLVSDFRKDFQFYKVREINNYHHAHDAYLNAVVGTALIKKYPKLESEFVYGDYKVYDVRKMIAKSEQEIGKATAKYFFYSNIMNFFKTEITLANGEIRKRPLIETNGETGEIVWDKGRDFATVRKVLSMPQVNIVKKTEVQTGGFSKESILPKRNSDKLIARKKDWDPKKYGGFVSPTVAYSVLVVAKVEKGKSKKLKSVKELLGITIMERSSFEKNPIDFLEAKGYKEVKKDLIIKLPKYSLFELENGRKRMLASARELQKGNELALPSKYVNFLYLASHYEKLKGSPEDNEQKQLFVEQHKHYLDEIIEQISEFSKRVILADANLDKVLSAYNKHRDKPIREQAENIIHLFTLTNLGAPAAFKYFDTTIDRKEYRSTKEVLDATLIHQSITGLYETRIDLSQLGGD

SEQ ID NO: 15697 - protein, 1368 aa, Streptococcus pyogenes
MDKKYSIGLDIGTNSVGWAVITDEYKVPSKKFKVLGNTDRHSIKKNLIGALLFDSGETAEATRLKRTARRRYTRRKNRICYLQEIFSNEMAKVDDSFFHRLEESFLVEEDKKHERHPIFGNIVDEVAYHEKYPTIYHLRKKLVDSTDKADLRLIYLALAHMIKFRGHFLIEGDLNPDNSDVDKLFIQLVQTYNQLFEENPINASGVDAKAILSARLSKSRRLENLIAQLPGEKKNGLFGNLIALSLGLTPNFKSNFDLAEDTKLQLSKDTYDDDLDNLLAQIGDQYADLFLAAKNLSDAILLSDILRVNTEITKAPLSASMIKLYDEHHQDLTLLKALVRQQLPEKYKEIFFDQSKNGYAGYIDGGASQEEFYKFIKPILEKMDGTEELLVKLNREDLLRKQRTFDNGIIPHQIHLGELHAILRRQEDFYPFLKDNREKIEKILTFRIPYYVGPLARGNSRFAWMTRKSEETITPWNFEKVVDKGASAQSFIERMTNFDKNLPNEKVLPKHSLLYEYFTVYNELTKVKYVTEGMRKPAFLSGDQKKAIVDLLFKTNRKVTVKQLKEDYFKKIECFDSVEISGVEDRFNASLGTYHDLLKIIKDKDFLDNEENEDILEDIVLTLTLFEDREMIEERLKTYAHLFDDKVMKQLKRRRYTGWGRLSRKLINGIRDKQSGKTILDFLKSDGFANRNFIQLIHDDSLTFKEDIQKAQVSGQGDSLHEHIANLAGSPAIKKGILQTVKVVDELVKVMGRHKPENIVIEMARENQTTQKGQKNSRERMKRIEEGIKELGSQILKEHPVENTQLQNEKLYLYYLQNGRDMYVDQELDINRLSDYDVDHIVPQSFLKDDSIDNKVLTRSDKNRGKSDNVPSEEVVKKMKNYWRQLLNAKLITQRKFDNLTKAERGGLSELDKAGFIKRQLVETRQITKHVAQILDSRMNTKYDENDKLIREVKVITLKSKLVSDFRKDFQFYKVREINNYHHAHDAYLNAVVGTALIKKYPKLESEFVYGDYKVYDVRKMIAKSEQEIGKATAKYFFYSNIMNFFKTEITLANGEIRKRPLIETNGETGEIVWDKGRDFATVRKVLSMPQVNIVKKTEVQTGGFSKESILPKRNSDKLIARKKDWDPKKYGGFDSPTVAYSVLVVAKVEKGKSKKLKSVKELLGITIMERSSFEKNPIDFLEAKGYKEVKKDLIIKLPKYSLFELENGRKRMLASAGVLQKGNELALPSKYVNFLYLASHYEKLKGSPEDNEQKQLFVEQHKHYLDEIIEQISEFSKRVILADANLDKVLSAYNKHRDKPIREQAENIIHLFTLTNLGAPAAFKYFDTTIDRKRYTSTKEVLDATLIHQSITGLYETRIDLSQLGGD

SEQ ID NO: 15698 - protein, 1368 aa, Streptococcus pyogenes
MDKKYSIGLDIGTNSVGWAVITDEYKVPSKKFKVLGNTDRHSIKKNLIGALLFDSGETAEATRLKRTARRRYTRRKNRICYLQEIFSNEMAKVDDSFFHRLEESFLVEEDKKHERHPIFGNIVDEVAYHEKYPTIYHLRKKLVDSTDKADLRLIYLALAHMIKFRGHFLIEGDLNPDNSDVDKLFIQLVQTYNQLFEENPINASGVDAKAILSARLSKSRRLENLIAQLPGEKKNGLFGNLIALSLGLTPNFKSNFDLAEDTKLQLSKDTYDDDLDNLLAQIGDQYADLFLAAKNLSDAILLSDILRVNTEITKAPLSASMIKLYDEHHQDLTLLKALVRQQLPEKYKEIFFDQSKNGYAGYIDGGASQEEFYKFIKPILEKMDGTEELLVKLNREDLLRKQRTFDNGIIPHQIHLGELHAILRRQEDFYPFLKDNREKIEKILTFRIPYYVGPLARGNSRFAWMTRKSEETITPWNFEKVVDKGASAQSFIERMTNFDKNLPNEKVLPKHSLLYEYFTVYNELTKVKYVTEGMRKPAFLSGDQKKAIVDLLFKTNRKVTVKQLKEDYFKKIECFDSVEISGVEDRFNASLGTYHDLLKIIKDKDFLDNEENEDILEDIVLTLTLFEDREMIEERLKTYAHLFDDKVMKQLKRRRYTGWGRLSRKLINGIRDKQSGKTILDFLKSDGFANRNFIQLIHDDSLTFKEDIQKAQVSGQGDSLHEHIANLAGSPAIKKGILQTVKVVDELVKVMGRHKPENIVIEMARENQTTQKGQKNSRERMKRIEEGIKELGSQILKEHPVENTQLQNEKLYLYYLQNGRDMYVDQELDINRLSDYDVDHIVPQSFLKDDSIDNKVLTRSDKNRGKSDNVPSEEVVKKMKNYWRQLLNAKLITQRKFDNLTKAERGGLSELDKAGFIKRQLVETRQITKHVAQILDSRMNTKYDENDKLIREVKVITLKSKLVSDFRKDFQFYKVREINNYHHAHDAYLNAVVGTALIKKYPKLESEFVYGDYKVYDVRKMIAKSEQEIGKATAKYFFYSNIMNFFKTEITLANGEIRKRPLIETNGETGEIVWDKGRDFATVRKVLSMPQVNIVKKTEVQTGGFSKESIRPKRNSDKLIARKKDWDPKKYGGFVSPTVAYSVLVVAKVEKGKSKKLKSVKELLGITIMERSSFEKNPIDFLEAKGYKEVKKDLIIKLPKYSLFELENGRKRMLASARFLQKGNELALPSKYVNFLYLASHYEKLKGSPEDNEQKQLFVEQHKHYLDEIIEQISEFSKRVILADANLDKVLSAYNKHRDKPIREQAENIIHLFTLTNLGAPRAFKYFDTTIDRKVYRSTKEVLDATLIHQSITGLYETRIDLSQLGGD

SEQ ID NO: 15699 - protein, 1122 aa, Streptococcus thermophilus
MSDLVLGLDIGIGSVGVGILNKVTGEIIHKNSRIFPAAQAENNLVRRTNRQGRRLARRKKHRRVRLNRLFEESGLITDFTKISINLNPYQLRVKGLTDELSNEELFIALKNMVKHRGISYLDDASDDGNSSVGDYAQIVKENSKQLETKTPGQIQLERYQTYGQLRGDFTVEKDGKKHRLINVFPTSAYRSEALRILQTQQEFNPQITDEFINRYLEILTGKRKYYHGPGNEKSRTDYGRYRTSGETLDNIFGILIGKCTFYPDEFRAAKASYTAQEFNLLNDLNNLTVPTETKKLSKEQKNQIINYVKNEKAMGPAKLFKYIAKLLSCDVADIKGYRIDKSGKAEIHTFEAYRKMKTLETLDIEQMDRETLDKLAYVLTLNTEREGIQEALEHEFADGSFSQKQVDELVQFRKANSSIFGKGWHNFSVKLMMELIPELYETSEEQMTILTRLGKQKTTSSSNKTKYIDEKLLTEEIYNPVVAKSVRQAIKIVNAAIKEYGDFDNIVIEMARETNEDDEKKAIQKIQKANKDEKDAAMLKAANQYNGKAELPHSVFHGHKQLATKIRLWHQQGERCLYTGKTISIHDLINNSNQFEVDHILPLSITFDDSLANKVLVYATANQEKGQRTPYQALDSMDDAWSFRELKAFVRESKTLSNKKKEYLLTEEDISKFDVRKKFIERNLVDTRYASRVVLNALQEHFRAHKIDTKVSVVRGQFTSQLRRHWGIEKTRDTYHHHAVDALIIAASSQLNLWKKQKNTLVSYSEEQLLDIETGELISDDEYKESVFKAPYQHFVDTLKSKEFEDSILFSYQVDSKFNRKISDATIYATRQAKVGKDKKDETYVLGKIKDIYTQDGYDAFMKIYKKDKSKFLMYRHDPQTFEKVIEPILENYPNKQMNEKGKEVPCNPFLKYKEEHGYIRKYSKKGNGPEIKSLKYYDSKLLGNPIDITPENSKNKVVLQSLKPWRTDVYFNKATGKYEILGLKYADLQFEKGTGTYKISQEKYNDIKKKEGVDSDSEFKFTLYKNDLLLVKDTETKEQQLFRFLSRTLPKQKHYVELKPYDKQKFEGGEALIKVLGNVANGGQCIKGLAKSNISIYKVRTDVLGNQHIIKNEGDKPKLDF

SEQ ID NO: 15700 - protein, 1122 aa, Streptococcus thermophilus
MSDLVLGLDIGIGSVGVGILNKVTGEIIHKNSRIFPAAQAENNLVRRTNRQGRRLARRKKHRRVRLNRLFEESGLITDFTKISINLNPYQLRVKGLTDELSNEELFIALKNMVKHRGISYLDDASDDGNSSVGDYAQIVKENSKQLETKTPGQIQLERYQTYGQLRGDFTVEKDGKKHRLINVFPTSAYRSEALRILQTQQEFNPQITDEFINRYLEILTGKRKYYHGPGNEKSRTDYGRYRTSGETLDNIFGILIGKCTFYPDEFRAAKASYTAQEFNLLNDLNNLTVPTETKKLSKEQKNQIINYVKNEKAMGPAKLFKYIAKLLSCDVADIKGYRIDKSGKAEIHTFEAYRKMKTLETLDIEQMDRETLDKLAYVLTLNTEREGIQEALEHEFADGSFSQKQVDELVQFRKANSSIFGKGWHNFSVKLMMELIPELYETSEEQMTILTRLGKQKTTSSSNKTKYIDEKLLTEEIYNPVVAKSVRQAIKIVNAAIKEYGDFDNIVIEMARETNEDDEKKAIQKIQKANKDEKDAAMLKAANQYNGKAELPHSVFHGHKQLATKIRLWHQQGERCLYTGKTISIHDLINNSNQFEVDHILPLSITFDDSLANKVLVYATANQEKGQRTPYQALDSMDDAWSFRELKAFVRESKTLSNKKKEYLLTEEDISKFDVRKKFIERNLVDTRYASRVVLNALQEHFRAHKIDTKVSVVRGQFTSQLRRHWGIEKTRDTYHHHAVDALIIAASSQLNLWKKQKNTLVSYSEEQLLDIETGELISDDEYKESVFKAPYQHFVDTLKSKEFEDSILFSYQVDSKFNRKISDATIYATRQAKVGKDKKDETYVLGKIKDIYTQDGYDAFMKIYKKDKSKFLMYRHDPQTFEKVIEPILENYPNKQMNEKGKEVPCNPFLKYKEEHGYIRKYSKKGNGPEIKSLKYYDSKLLGNPIDITPENSKNKVVLQSLKPWRTDVYFNKNTGKYEILGLKYADLQFEKKTGTYKISQEKYNGIMKEEGVDSDSEFKFTLYKNDLLLVKDTETKEQQLFRFLSRTMPNVKYYVELKPYSKDKFEKNESLIEILGSADKSGRCIKGLGKSNISIYKVRTDVLGNQHIIKNEGDKPKLDF

SEQ ID NO: 15701 - protein, 1120 aa, Streptococcus thermophilus
MSDLVLGLDIGIGSVGVGILNKVTGEIIHKNSRIFPAAQAENNLVRRTNRQGRRLARRKKHRRVRLNRLFEESGLITDFTKISINLNPYQLRVKGLTDELSNEELFIALKNMVKHRGISYLDDASDDGNSSVGDYAQIVKENSKQLETKTPGQIQLERYQTYGQLRGDFTVEKDGKKHRLINVFPTSAYRSEALRILQTQQEFNPQITDEFINRYLEILTGKRKYYHGPGNEKSRTDYGRYRTSGETLDNIFGILIGKCTFYPDEFRAAKASYTAQEFNLLNDLNNLTVPTETKKLSKEQKNQIINYVKNEKAMGPAKLFKYIAKLLSCDVADIKGYRIDKSGKAEIHTFEAYRKMKTLETLDIEQMDRETLDKLAYVLTLNTEREGIQEALEHEFADGSFSQKQVDELVQFRKANSSIFGKGWHNFSVKLMMELIPELYETSEEQMTILTRLGKQKTTSSSNKTKYIDEKLLTEEIYNPVVAKSVRQAIKIVNAAIKEYGDFDNIVIEMARETNEDDEKKAIQKIQKANKDEKDAAMLKAANQYNGKAELPHSVFHGHKQLATKIRLWHQQGERCLYTGKTISIHDLINNSNQFEVDHILPLSITFDDSLANKVLVYATANQEKGQRTPYQALDSMDDAWSFRELKAFVRESKTLSNKKKEYLLTEEDISKFDVRKKFIERNLVDTRYASRVVLNALQEHFRAHKIDTKVSVVRGQFTSQLRRHWGIEKTRDTYHHHAVDALIIAASSQLNLWKKQKNTLVSYSEDQLLDIETGELISDDEYKESVFKAPYQHFVDTLKSKEFEDSILFSYQVDSKFNRKISDATIYATRQAKVGKDKADETYVLGKIKDIYTQDGYDAFMKIYKKDKSKFLMYRHDPQTFEKVIEPILENYPNKQINEKGKEVPCNPFLKYKEEHGYIRKYSKKGNGPEIKSLKYYDSKLGNHIDITPKDSNNKVVLQSLKPWRTDVYFNKNTGKYEILGLKYSDMQFEKGTGKYSISKEQYENIKVREGVDENSEFKFTLYKNDLLLLKDSENGEQILLRFTSRNDTSKHYVELKPYNRQKFEGSEYLIKSLGTVAKGGQCIKGLGKSNISIYKVRTDVLGNQHIIKNEGDKPKLDF

SEQ ID NO: 15702 - protein, 1120 aa, Streptococcus thermophilus
MSDLVLGLDIGIGSVGVGILNKVTGEIIHKNSRIFPAAQAENNLVRRTNRQGRRLARRKKHRRVRLNRLFEESGLITDFTKISINLNPYQLRVKGLTDELSNEELFIALKNMVKHRGISYLDDASDDGNSSVGDYAQIVKENSKQLETKTPGQIQLERYQTYGQLRGDFTVEKDGKKHRLINVFPTSAYRSEALRILQTQQEFNPQITDEFINRYLEILTGKRKYYHGPGNEKSRTDYGRYRTSGETLDNIFGILIGKCTFYPDEFRAAKASYTAQEFNLLNDLNNLTVPTETKKLSKEQKNQIINYVKNEKAMGPAKLFKYIAKLLSCDVADIKGYRIDKSGKAEIHTFEAYRKMKTLETLDIEQMDRETLDKLAYVLTLNTEREGIQEALEHEFADGSFSQKQVDELVQFRKANSSIFGKGWHNFSVKLMMELIPELYETSEEQMTILTRLGKQKTTSSSNKTKYIDEKLLTEEIYNPVVAKSVRQAIKIVNAAIKEYGDFDNIVIEMARETNEDDEKKAIQKIQKANKDEKDAAMLKAANQYNGKAELPHSVFHGHKQLATKIRLWHQQGERCLYTGKTISIHDLINNSNQFEVDHILPLSITFDDSLANKVLVYATANQEKGQRTPYQALDSMDDAWSFRELKAFVRESKTLSNKKKEYLLTEEDISKFDVRKKFIERNLVDTRYASRVVLNALQEHFRAHKIDTKVSVVRGQFTSQLRRHWGIEKTRDTYHHHAVDALIIAASSQLNLWKKQKNTLVSYSEDQLLDIETGELISDDEYKESVFKAPYQHFVDTLKSKEFEDSILFSYQVDSKFNRKISDATIYATRQAKVGKDKADETYVLGKIKDIYTQDGYDAFMKIYKKDKSKFLMYRHDPQTFEKVIEPILENYPNKQINEKGKEVPCNPFLKYKEEHGYIRKYSKKGNGPEIKSLKYYDSKLGNHIDITPKDSNNKVVLQSLKPWRTDVYFNKNTGKYEILGLKYSDMQFEKGTGKYSISKEQYENIKVREGVDENSEFKFTLYKNDLLLLKDSENGEQILLRFTSRNDTSKHYVELKPYNRQKFEGSEYLIKSLGTVVKGGRCIKGLGKSNISIYKVRTDVLGNQHIIKNEGDKPKLDF

SEQ ID NO: 15703 - protein, 1057 aa, Staphylococcus sp.
MNQKFILGLDIGITSVGYGLIDYETKNIIDAGVRLFPEANVENNEGRRSKRGSRRLKRRRIHRLERVKLLLTEYDLINKEQIPTSNNPYQIRVKGLSEILSKDELAIALLHLAKRRGIHNVDVAADKEETASDSLSTKDQINKNAKFLESRYVCELQKERLENEGHVRGVENRFLTKDIVREAKKIIDTQMQYYPEIDETFKEKYISLVETRREYFEGPGQGSPFGWNGDLKKWYEMLMGHCTYFPQELRSVKYAYSADLFNALNDLNNLIIQRDNSEKLEYHEKYHIIENVFKQKKKPTLKQIAKEIGVNPEDIKGYRITKSGTPEFTSFKLFHDLKKVVKDHAILDDIDLLNQIAEILTIYQDKDSIVAELGQLEYLMSEADKQSISELTGYTGTHSLSLKCMNMIIDELWHSSMNQMEVFTYLNMRPKKYELKGYQRIPTDMIDDAILSPVVKRTFIQSINVINKVIEKYGIPEDIIIELARENNSDDRKKFINNLQKKNEATRKRINEIIGQTGNQNAKRIVEKIRLHDQQEGKCLYSLESIPLEDLLNNPNHYEVDHIIPRSVSFDNSYHNKVLVKQSENSKKSNLTPYQYFNSGKSKLSYNQFKQHILNLSKSQDRISKKKKEYLLEERDINKFEVQKEFINRNLVDTRYATRELTNYLKAYFSANNMNVKVKTINGSFTDYLRKVWKFKKERNHGYKHHAEDALIIANADFLFKENKKLKAVNSVLEKPEIETKQLDIQVDSEDNYSEMFIIPKQVQDIKDFRNFKYSHRVDKKPNRQLINDTLYSTRKKDNSTYIVQTIKDIYAKDNTTLKKQFDKSPEKFLMYQHDPRTFEKLEVIMKQYANEKNPLAKYHEETGEYLTKYSKKNNGPIVKSLKYIGNKLGSHLDVTHQFKSSTKKLVKLSIKNYRFDVYLTEKGYKFVTIAYLNVFKKDNYYYIPKDKYQELKEKKKIKDTDQFIASFYKNDLIKLNGDLYKIIGVNSDDRNIIELDYYDIKYKDYCEINNIKGEPRIKKTIGKKTESIEKFTTDVLGNLYLHSTEKAPQLIFKRGL

SEQ ID NO: 15704 - protein, 1057 aa, Staphylococcus sp.
MNQKFILGLDIGITSVGYGLIDYETKNIIDAGVRLFPEANVENNEGRRSKRGSRRLKRRRIHRLERVKLLLTEYDLINKEQIPTSNNPYQIRVKGLSEILSKDELAIALLHLAKRRGIHNVDVAADKEETASDSLSTKDQINKNAKFLESRYVCELQKERLENEGHVRGVENRFLTKDIVREAKKIIDTQMQYYPEIDETFKEKYISLVETRREYFEGPGQGSPFGWNGDLKKWYEMLMGHCTYFPQELRSVKYAYSADLFNALNDLNNLIIQRDNSEKLEYHEKYHIIENVFKQKKKPTLKQIAKEIGVNPEDIKGYRITKSGTPEFTSFKLFHDLKKVVKDHAILDDIDLLNQIAEILTIYQDKDSIVAELGQLEYLMSEADKQSISELTGYTGTHSLSLKCMNMIIDELWHSSMNQMEVFTYLNMRPKKYELKGYQRIPTDMIDDAILSPVVKRTFIQSINVINKVIEKYGIPEDIIIELARENNSDDRKKFINNLQKKNEATRKRINEIIGQTGNQNAKRIVEKIRLHDQQEGKCLYSLESIPLEDLLNNPNHYEVDHIIPRSVSFDNSYHNKVLVKQSENSKKSNLTPYQYFNSGKSKLSYNQFKQHILNLSKSQDRISKKKKEYLLEERDINKFEVQKEFINRNLVDTRYATRELTSYLKAYFSANNMDVKVKTINGSFTNHLRKVWRFDKYRNHGYKHHAEDALIIANADFLFKENKKLQNTNKILEKPTIENNTKKVTVEKEEDYNNVFETPKLVEDIKQYRDYKFSHRVDKKPNRQLINDTLYSTRMKDEHDYIVQTITDIYGKDNTNLKKQFNKNPEKFLMYQNDPKTFEKLSIIMKQYSDEKNPLAKYYEETGEYLTKYSKKNNGPIVKKIKLLGNKVGNHLDVTNKYENSTKKLVKLSIKNYRFDVYLTEKGYKFVTIAYLNVFKKDNYYYIPKDKYQELKEKKKIKDTDQFIASFYKNDLIKLNGDLYKIIGVNSDDRNIIELDYYDIKYKDYCEINNIKGEPRIKKTIGKKTESIEKFTTDVLGNLYLHSTEKAPQLIFKRGL

SEQ ID NO: 15705 - protein, 1367 aa, unidentified
DKKYSIGLDIGTNSVGWAVITDEYKVPSKKFKVLGNTDRHSIKKNLIGALLFDSGETAEATRLKRTARRRYTRRKNRICYLQEIFSNEMAKVDDSFFHRLEESFLVEEDKKHERHPIFGNIVDEVAYHEKYPTIYHLRKKLVDSTDKADLRLIYLALAHMIKFRGHFLIEGDLNPDNSDVDKLFIQLVQTYNQLFEENPINASGVDAKAILSARLSKSRRLENLIAQLPGEKKNGLFGNLIALSLGLTPNFKSNFDLAEDAKLQLSKDTYDDDLDNLLAQIGDQYADLFLAAKNLSDAILLSDILRVNTEITKAPLSASMIKRYDEHHQDLTLLKALVRQQLPEKYKEIFFDQSKNGYAGYIDGGASQEEFYKFIKPILEKMDGTEELLVKLNREDLLRKQRTFDNGSIPHQIHLGELHAILRRQEDFYPFLKDNREKIEKILTFRIPYYVGPLARGNSRFAWMTRKSEETITPWNFEEVVDKGASAQSFIERMTNFDKNLPNEKVLPKHSLLYEYFTVYNELTKVKYVTEGMRKPAFLSGEQKKAIVDLLFKTNRKVTVKQLKEDYFKKIECFDSVEISGVEDRFNASLGTYHDLLKIIKDKDFLDNEENEDILEDIVLTLTLFEDREMIEERLKTYAHLFDDKVMKQLKRRRYTGWGRLSRKLINGIRDKQSGKTILDFLKSDGFANRNFMQLIHDDSLTFKEDIQKAQVSGQGDSLHEHIANLAGSPAIKKGILQTVKVVDELVKVMGRHKPENIVIEMARENQTTQKGQKNSRERMKRIEEGIKELGSQILKEHPVENTQLQNEKLYLYYLQNGRDMYVDQELDINRLSDYDVDAIVPQSFLKDDSIDNKVLTRSDKNRGKSDNVPSEEVVKKMKNYWRQLLNAKLITQRKFDNLTKAERGGLSELDKAGFIKRQLVETRQITKHVAQILDSRMNTKYDENDKLIREVKVITLKSKLVSDFRKDFQFYKVREINNYHHAHDAYLNAVVGTALIKKYPKLESEFVYGDYKVYDVRKMIAKSEQEIGKATAKYFFYSNIMNFFKTEITLANGEIRKRPLIETNGETGEIVWDKGRDFATVRKVLSMPQVNIVKKTEVQTGGFSKESILPKRNSDKLIARKKDWDPKKYGGFDSPTVAYSVLVVAKVEKGKSKKLKSVKELLGITIMERSSFEKNPIDFLEAKGYKEVKKDLIIKLPKYSLFELENGRKRMLASAGELQKGNELALPSKYVNFLYLASHYEKLKGSPEDNEQKQLFVEQHKHYLDEIIEQISEFSKRVILADANLDKVLSAYNKHRDKPIREQAENIIHLFTLTNLGAPAAFKYFDTTIDRKRYTSTKEVLDATLIHQSITGLYETRIDLSQLGGD

SEQ ID NO: 15706 - protein, 6 aa, synthetic construct
IENSSP

SEQ ID NO: 15707 - protein, 6 aa, synthetic construct
HNRNPK

SEQ ID NO: 15708 - DNA, 23 bp, synthetic construct
  source 1..23: mol_type = other DNA
agagcatccatgggcaccactca

SEQ ID NO: 15709 - DNA, 21 bp, synthetic construct
  source 1..21: mol_type = other DNA
agcatccatgggcaccactca

SEQ ID NO: 15710 - DNA, 20 bp, synthetic construct
  source 1..20: mol_type = other DNA
gcatccatgggcaccactca

SEQ ID NO: 15711 - DNA, 23 bp, synthetic construct
  source 1..23: mol_type = other DNA
gagagcatccatgggcaccactc

SEQ ID NO: 15712 - DNA, 21 bp, synthetic construct
  source 1..21: mol_type = other DNA
gagcatccatgggcaccactc

SEQ ID NO: 15713 - DNA, 20 bp, synthetic construct
  source 1..20: mol_type = other DNA
gaccactgtctctccgtgag

SEQ ID NO: 15714 - DNA, 20 bp, synthetic construct
  source 1..20: mol_type = other DNA
agcatccatgggcaccactc

SEQ ID NO: 15715 - DNA, 21 bp, synthetic construct
  source 1..21: mol_type = other DNA
agagcatccatgggcaccact

SEQ ID NO: 15716 - DNA, 21 bp, synthetic construct
  source 1..21: mol_type = other DNA
gggaccactgtctctccgtga

SEQ ID NO: 15717 - DNA, 20 bp, synthetic construct
  source 1..20: mol_type = other DNA
ggaccactgtctctccgtga

SEQ ID NO: 15718 - DNA, 20 bp, synthetic construct
  source 1..20: mol_type = other DNA
gagcatccatgggcaccact

SEQ ID NO: 15719 - DNA, 21 bp, synthetic construct
  source 1..21: mol_type = other DNA
tgggaccactgtctctccgtg

SEQ ID NO: 15720 - DNA, 20 bp, synthetic construct
  source 1..20: mol_type = other DNA
gggaccactgtctctccgtg

SEQ ID NO: 15721 - DNA, 20 bp, synthetic construct
  source 1..20: mol_type = other DNA
agagcatccatgggcaccac

SEQ ID NO: 15722 - DNA, 20 bp, synthetic construct
  source 1..20: mol_type = other DNA
tgggaccactgtctctccgt

SEQ ID NO: 15723 - DNA, 20 bp, synthetic construct
  source 1..20: mol_type = other DNA
gagagcatccatgggcacca

SEQ ID NO: 15724 - DNA, 23 bp, synthetic construct
  source 1..23: mol_type = other DNA
catgagagcatccatgggcacca

SEQ ID NO: 15725 - DNA, 21 bp, synthetic construct
  source 1..21: mol_type = other DNA
tttgggaccactgtctctccg

SEQ ID NO: 15726 - DNA, 20 bp, synthetic construct
  source 1..20: mol_type = other DNA
ttgggaccactgtctctccg

SEQ ID NO: 15727 - DNA, 20 bp, synthetic construct
  source 1..20: mol_type = other DNA
tgagagcatccatgggcacc

SEQ ID NO: 15728 - DNA, 23 bp, synthetic construct
  source 1..23: mol_type = other DNA
agttttgggaccactgtctctcc

SEQ ID NO: 15729 - DNA, 21 bp, synthetic construct
  source 1..21: mol_type = other DNA
ttttgggaccactgtctctcc

SEQ ID NO: 15730 - DNA, 20 bp, synthetic construct
  source 1..20: mol_type = other DNA
tttgggaccactgtctctcc

SEQ ID NO: 15731 - DNA, 20 bp, synthetic construct
  source 1..20: mol_type = other DNA
atgagagcatccatgggcac

SEQ ID NO: 15732 - DNA, 23 bp, synthetic construct
  source 1..23: mol_type = other DNA
ggcatgagagcatccatgggcac

SEQ ID NO: 15733 - DNA, 21 bp, synthetic construct
  source 1..21: mol_type = other DNA
gttttgggaccactgtctctc

SEQ ID NO: 15734 - DNA, 20 bp, synthetic construct
  source 1..20: mol_type = other DNA
ttttgggaccactgtctctc

SEQ ID NO: 15735 - DNA, 20 bp, synthetic construct
  source 1..20: mol_type = other DNA
catgagagcatccatgggca

SEQ ID NO: 15736 - DNA, 20 bp, synthetic construct
  source 1..20: mol_type = other DNA
gttttgggaccactgtctct

SEQ ID NO: 15737 - DNA, 20 bp, synthetic construct
  source 1..20: mol_type = other DNA
gcatgagagcatccatgggc

SEQ ID NO: 15738 - DNA, 23 bp, synthetic construct
  source 1..23: mol_type = other DNA
agggcatgagagcatccatgggc

SEQ ID NO: 15739 - DNA, 21 bp, synthetic construct
  source 1..21: mol_type = other DNA
ggcatgagagcatccatgggc

SEQ ID NO: 15740 - DNA, 20 bp, synthetic construct
  source 1..20: mol_type = other DNA
agttttgggaccactgtctc

SEQ ID NO: 15741 - DNA, 20 bp, synthetic construct
  source 1..20: mol_type = other DNA
ggcatgagagcatccatggg

SEQ ID NO: 15742 - DNA, 21 bp, synthetic construct
  source 1..21: mol_type = other DNA
gagttttgggaccactgtctc

SEQ ID NO: 15743 - DNA, 20 bp, synthetic construct
  source 1..20: mol_type = other DNA
gagttttgggaccactgtct

SEQ ID NO: 15744 - DNA, 20 bp, synthetic construct
  source 1..20: mol_type = other DNA
gggcatgagagcatccatgg

SEQ ID NO: 15745 - DNA, 23 bp, synthetic construct
  source 1..23: mol_type = other DNA
aaagggcatgagagcatccatgg

SEQ ID NO: 15746 - DNA, 22 bp, synthetic construct
  source 1..22: mol_type = other DNA
aagggcatgagagcatccatgg

SEQ ID NO: 15747 - DNA, 24 bp, synthetic construct
  source 1..24: mol_type = other DNA
gcaaagggcatgagagcatccatg

SEQ ID NO: 15748 - DNA, 20 bp, synthetic construct
  source 1..20: mol_type = other DNA
agggcatgagagcatccatg

SEQ ID NO: 15749 - DNA, 20 bp, synthetic construct
  source 1..20: mol_type = other DNA
agagttttgggaccactgtc

SEQ ID NO: 15750 - DNA, 23 bp, synthetic construct
  source 1..23: mol_type = other DNA
ggaagagttttgggaccactgtc

SEQ ID NO: 15751 - DNA, 23 bp, synthetic construct
  source 1..23: mol_type = other DNA
caaagggcatgagagcatccatg

SEQ ID NO: 15752 - DNA, 24 bp, synthetic construct
  source 1..24: mol_type = other DNA
tgggaagagttttgggaccactgt

SEQ ID NO: 15753 - DNA, 20 bp, synthetic construct
  source 1..20: mol_type = other DNA
aagggcatgagagcatccat

SEQ ID NO: 15754 - DNA, 20 bp, synthetic construct
  source 1..20: mol_type = other DNA
aagagttttgggaccactgt

SEQ ID NO: 15755 - DNA, 23 bp, synthetic construct
  source 1..23: mol_type = other DNA
gggaagagttttgggaccactgt

SEQ ID NO: 15756 - DNA, 22 bp, synthetic construct
  source 1..22: mol_type = other DNA
caaagggcatgagagcatccat

SEQ ID NO: 15757 - DNA, 21 bp, synthetic construct
  source 1..21: mol_type = other DNA
caaagggcatgagagcatcca

SEQ ID NO: 15758 - DNA, 20 bp, synthetic construct
  source 1..20: mol_type = other DNA
aaagggcatgagagcatcca

SEQ ID NO: 15759 - DNA, 20 bp, synthetic construct
  source 1..20: mol_type = other DNA
gaagagttttgggaccactg

SEQ ID NO: 15760 - DNA, 23 bp, synthetic construct
  source 1..23: mol_type = other DNA
agcaaagggcatgagagcatcca

SEQ ID NO: 15761 - DNA, 23 bp, synthetic construct
  source 1..23: mol_type = other DNA
cagcaaagggcatgagagcatcc

SEQ ID NO: 15762 - DNA, 21 bp, synthetic construct
  source 1..21: mol_type = other DNA
gcaaagggcatgagagcatcc

SEQ ID NO: 15763 - DNA, 20 bp, synthetic construct
  source 1..20: mol_type = other DNA
caaagggcatgagagcatcc

SEQ ID NO: 15764 - DNA, 20 bp, synthetic construct
  source 1..20: mol_type = other DNA
ggaagagttttgggaccact

SEQ ID NO: 15765 - DNA, 23 bp, synthetic construct
  source 1..23: mol_type = other DNA
ttgggaagagttttgggaccact

SEQ ID NO: 15766 - DNA, 21 bp, synthetic construct
  source 1..21: mol_type = other DNA
agcaaagggcatgagagcatc

SEQ ID NO: 15767 - DNA, 20 bp, synthetic construct
  source 1..20: mol_type = other DNA
gggaagagttttgggaccac

SEQ ID NO: 15768 - DNA, 20 bp, synthetic construct
  source 1..20: mol_type = other DNA
gcaaagggcatgagagcatc

SEQ ID NO: 15769 - DNA, 20 bp, synthetic construct
  source 1..20: mol_type = other DNA
tgggaagagttttgggacca

SEQ ID NO: 15770 - DNA, 20 bp, synthetic construct
  source 1..20: mol_type = other DNA
agcaaagggcatgagagcat

SEQ ID NO: 15771 - DNA, 23 bp, synthetic construct
  source 1..23: mol_type = other DNA
ccttgggaagagttttgggacca

SEQ ID NO: 15772 - DNA, 22 bp, synthetic construct
  source 1..22: mol_type = other DNA
cttgggaagagttttgggacca

SEQ ID NO: 15773 - DNA, 20 bp, synthetic construct
  source 1..20: mol_type = other DNA
ttgggaagagttttgggacc

SEQ ID NO: 15774 - DNA, 20 bp, synthetic construct
  source 1..20: mol_type = other DNA
cagcaaagggcatgagagca

SEQ ID NO: 15775 - DNA, 20 bp, synthetic construct
  source 1..20: mol_type = other DNA
cttgggaagagttttgggac

SEQ ID NO: 15776 - DNA, 20 bp, synthetic construct
  source 1..20: mol_type = other DNA
acagcaaagggcatgagagc

SEQ ID NO: 15777 - DNA, 24 bp, synthetic construct
  source 1..24: mol_type = other DNA
attccttgggaagagttttgggac

SEQ ID NO: 15778 - DNA, 20 bp, synthetic construct
  source 1..20: mol_type = other DNA
ccttgggaagagttttggga

SEQ ID NO: 15779 - DNA, 20 bp, synthetic construct
  source 1..20: mol_type = other DNA
cacagcaaagggcatgagag

SEQ ID NO: 15780 - DNA, 23 bp, synthetic construct
  source 1..23: mol_type = other DNA
gggcacagcaaagggcatgagag

SEQ ID NO: 15781 - DNA, 24 bp, synthetic construct
  source 1..24: mol_type = other DNA
ttgggcacagcaaagggcatgaga

SEQ ID NO: 15782 - DNA, 20 bp, synthetic construct
  source 1..20: mol_type = other DNA
tccttgggaagagttttggg

SEQ ID NO: 15783 - DNA, 20 bp, synthetic construct
  source 1..20: mol_type = other DNA
gcacagcaaagggcatgaga

SEQ ID NO: 15784 - DNA, 23 bp, synthetic construct
  source 1..23: mol_type = other DNA
cattccttgggaagagttttggg

SEQ ID NO: 15785 - DNA, 23 bp, synthetic construct
  source 1..23: mol_type = other DNA
tgggcacagcaaagggcatgaga

SEQ ID NO: 15786 - DNA, 21 bp, synthetic construct
  source 1..21: mol_type = other DNA
ttccttgggaagagttttggg

SEQ ID NO: 15787 - DNA, 20 bp, synthetic construct
  source 1..20: mol_type = other DNA
ggcacagcaaagggcatgag

SEQ ID NO: 15788 - DNA, 20 bp, synthetic construct
  source 1..20: mol_type = other DNA
ttccttgggaagagttttgg

SEQ ID NO: 15789 - DNA, 20 bp, synthetic construct
  source 1..20: mol_type = other DNA
gggcacagcaaagggcatga

SEQ ID NO: 15790 - DNA, 20 bp, synthetic construct
  source 1..20: mol_type = other DNA
attccttgggaagagttttg

SEQ ID NO: 15791 - DNA, 23 bp, synthetic construct
  source 1..23: mol_type = other DNA
gccattccttgggaagagttttg

SEQ ID NO: 15792 - DNA, 22 bp, synthetic construct
  source 1..22: mol_type = other DNA
ccattccttgggaagagttttg

SEQ ID NO: 15793 - DNA, 22 bp, synthetic construct
  source 1..22: mol_type = other DNA
ttgggcacagcaaagggcatga

SEQ ID NO: 15794 - DNA, 24 bp, synthetic construct
  source 1..24: mol_type = other DNA
gggccattccttgggaagagtttt

SEQ ID NO: 15795 - DNA, 21 bp, synthetic construct
  source 1..21: mol_type = other DNA
ttgggcacagcaaagggcatg

SEQ ID NO: 15796 - DNA, 20 bp, synthetic construct
  source 1..20: mol_type = other DNA
cattccttgggaagagtttt

SEQ ID NO: 15797 - DNA, 20 bp, synthetic construct
  source 1..20: mol_type = other DNA
tgggcacagcaaagggcatg

SEQ ID NO: 15798 - DNA, 23 bp, synthetic construct
  source 1..23: mol_type = other DNA
ggccattccttgggaagagtttt

SEQ ID NO: 15799 - DNA, 23 bp, synthetic construct
  source 1..23: mol_type = other DNA
ggttgggcacagcaaagggcatg

SEQ ID NO: 15800 - DNA, 23 bp, synthetic construct
  source 1..23: mol_type = other DNA
gggccattccttgggaagagttt

SEQ ID NO: 15801 - DNA, 23 bp, synthetic construct
  source 1..23: mol_type = other DNA
gggttgggcacagcaaagggcat

SEQ ID NO: 15802 - DNA, 21 bp, synthetic construct
  source 1..21: mol_type = other DNA
gccattccttgggaagagttt

SEQ ID NO: 15803 - DNA, 21 bp, synthetic construct
  source 1..21: mol_type = other DNA
gttgggcacagcaaagggcat

SEQ ID NO: 15804 - DNA, 20 bp, synthetic construct
  source 1..20: mol_type = other DNA
ccattccttgggaagagttt

SEQ ID NO: 15805 - DNA, 20 bp, synthetic construct
  source 1..20: mol_type = other DNA
ttgggcacagcaaagggcat

SEQ ID NO: 15806 - DNA, 23 bp, synthetic construct
  source 1..23: mol_type = other DNA
cgggccattccttgggaagagtt

SEQ ID NO: 15807 - DNA, 21 bp, synthetic construct
  source 1..21: mol_type = other DNA
ggccattccttgggaagagtt

SEQ ID NO: 15808 - DNA, 21 bp, synthetic construct
  source 1..21: mol_type = other DNA
ggttgggcacagcaaagggca

SEQ ID NO: 15809 - DNA, 20 bp, synthetic construct
  source 1..20: mol_type = other DNA
gccattccttgggaagagtt

SEQ ID NO: 15810 - DNA, 20 bp, synthetic construct
  source 1..20: mol_type = other DNA
gttgggcacagcaaagggca

SEQ ID NO: 15811 - DNA, 23 bp, synthetic construct
  source 1..23: mol_type = other DNA
tcgggttgggcacagcaaagggc

SEQ ID NO: 15812 - DNA, 21 bp, synthetic construct
  source 1..21: mol_type = other DNA
gggccattccttgggaagagt

SEQ ID NO: 15813 - DNA, 21 bp, synthetic construct
  source 1..21: mol_type = other DNA
gggttgggcacagcaaagggc

SEQ ID NO: 15814 - DNA, 20 bp, synthetic construct
  source 1..20: mol_type = other DNA
ggttgggcacagcaaagggc

SEQ ID NO: 15815 - DNA, 20 bp, synthetic construct
  source 1..20: mol_type = other DNA
ggccattccttgggaagagt

SEQ ID NO: 15816 - DNA, 21 bp, synthetic construct
  source 1..21: mol_type = other DNA
cgggttgggcacagcaaaggg

SEQ ID NO: 15817 - DNA, 20 bp, synthetic construct
  source 1..20: mol_type = other DNA
gggccattccttgggaagag

SEQ ID NO: 15818 - DNA, 20 bp, synthetic construct
  source 1..20: mol_type = other DNA
gggttgggcacagcaaaggg

SEQ ID NO: 15819 - DNA, 20 bp, synthetic construct
  source 1..20: mol_type = other DNA
cgggccattccttgggaaga

SEQ ID NO: 15820 - DNA, 20 bp, synthetic construct
  source 1..20: mol_type = other DNA
cgggttgggcacagcaaagg

SEQ ID NO: 15821 - DNA, 20 bp, synthetic construct
  source 1..20: mol_type = other DNA
tcgggccattccttgggaag

SEQ ID NO: 15822 - DNA, 20 bp, synthetic construct
  source 1..20: mol_type = other DNA
tcgggttgggcacagcaaag

SEQ ID NO: 15823 - DNA, 21 bp, synthetic construct
  source 1..21: mol_type = other DNA
ttcgggttgggcacagcaaag

SEQ ID NO: 15824 - DNA, 20 bp, synthetic construct
  source 1..20: mol_type = other DNA
ctcgggccattccttgggaa

SEQ ID NO: 15825 - DNA, 20 bp, synthetic construct
  source 1..20: mol_type = other DNA
ttcgggttgggcacagcaaa

SEQ ID NO: 15826 - DNA, 22 bp, synthetic construct
  source 1..22: mol_type = other DNA
ctctcgggccattccttgggaa

SEQ ID NO: 15827 - DNA, 21 bp, synthetic construct
  source 1..21: mol_type = other DNA
gcttcgggttgggcacagcaa

SEQ ID NO: 15828 - DNA, 21 bp, synthetic construct
  source 1..21: mol_type = other DNA
ctctcgggccattccttggga

SEQ ID NO: 15829 - DNA, 20 bp, synthetic construct
  source 1..20: mol_type = other DNA
cttcgggttgggcacagcaa

SEQ ID NO: 15830 - DNA, 20 bp, synthetic construct
  source 1..20: mol_type = other DNA
tctcgggccattccttggga

SEQ ID NO: 15831 - DNA, 23 bp, synthetic construct
  source 1..23: mol_type = other DNA
ctgcttcgggttgggcacagcaa

SEQ ID NO: 15832 - DNA, 24 bp, synthetic construct
  source 1..24: mol_type = other DNA
gtccctctcgggccattccttggg

SEQ ID NO: 15833 - DNA, 23 bp, synthetic construct
  source 1..23: mol_type = other DNA
tccctctcgggccattccttggg

SEQ ID NO: 15834 - DNA, 23 bp, synthetic construct
  source 1..23: mol_type = other DNA
cctgcttcgggttgggcacagca

SEQ ID NO: 15835 - DNA, 21 bp, synthetic construct
  source 1..21: mol_type = other DNA
cctctcgggccattccttggg

SEQ ID NO: 15836 - DNA, 21 bp, synthetic construct
  source 1..21: mol_type = other DNA
tgcttcgggttgggcacagca

SEQ ID NO: 15837 - DNA, 20 bp, synthetic construct
  source 1..20: mol_type = other DNA
ctctcgggccattccttggg

SEQ ID NO: 15838 - DNA, 20 bp, synthetic construct
  source 1..20: mol_type = other DNA
gcttcgggttgggcacagca

SEQ ID NO: 15839 - DNA, 21 bp, synthetic construct
  source 1..21: mol_type = other DNA
ccctctcgggccattccttgg

SEQ ID NO: 15840 - DNA, 21 bp, synthetic construct
  source 1..21: mol_type = other DNA
ctgcttcgggttgggcacagc

SEQ ID NO: 15841 - DNA, 20 bp, synthetic construct
  source 1..20: mol_type = other DNA
cctctcgggccattccttgg

SEQ ID NO: 15842 - DNA, 20 bp, synthetic construct
  source 1..20: mol_type = other DNA
tgcttcgggttgggcacagc

SEQ ID NO: 15843 - DNA, 21 bp, synthetic construct
  source 1..21: mol_type = other DNA
tccctctcgggccattccttg

SEQ ID NO: 15844 - DNA, 21 bp, synthetic construct
  source 1..21: mol_type = other DNA
cctgcttcgggttgggcacag

SEQ ID NO: 15845 - DNA, 20 bp, synthetic construct
  source 1..20: mol_type = other DNA
ccctctcgggccattccttg

SEQ ID NO: 15846 - DNA, 20 bp, synthetic construct
  source 1..20: mol_type = other DNA
ctgcttcgggttgggcacag

SEQ ID NO: 15847 - DNA, 23 bp, synthetic construct
  source 1..23: mol_type = other DNA
atgtccctctcgggccattcctt

SEQ ID NO: 15848 - DNA, 21 bp, synthetic construct
  source 1..21: mol_type = other DNA
gtccctctcgggccattcctt

SEQ ID NO: 15849 - DNA, 21 bp, synthetic construct
  source 1..21: mol_type = other DNA
acctgcttcgggttgggcaca

SEQ ID NO: 15850 - DNA, 20 bp, synthetic construct
  source 1..20: mol_type = other DNA
tccctctcgggccattcctt

SEQ ID NO: 15851 - DNA, 20 bp, synthetic construct
  source 1..20: mol_type = other DNA
cctgcttcgggttgggcaca

SEQ ID NO: 15852 - DNA, 23 bp, synthetic construct
  source 1..23: mol_type = other DNA
tatgtccctctcgggccattcct

SEQ ID NO: 15853 - DNA, 21 bp, synthetic construct
  source 1..21: mol_type = other DNA
tgtccctctcgggccattcct

SEQ ID NO: 15854 - DNA, 21 bp, synthetic construct
  source 1..21: mol_type = other DNA
tacctgcttcgggttgggcac

SEQ ID NO: 15855 - DNA, 20 bp, synthetic construct
  source 1..20: mol_type = other DNA
gtccctctcgggccattcct

SEQ ID NO: 15856 - DNA, 20 bp, synthetic construct
  source 1..20: mol_type = other DNA
acctgcttcgggttgggcac

SEQ ID NO: 15857 - DNA, 23 bp, synthetic construct
  source 1..23: mol_type = other DNA
gtatgtccctctcgggccattcc

SEQ ID NO: 15858 - DNA, 21 bp, synthetic construct
  source 1..21: mol_type = other DNA
atgtccctctcgggccattcc

SEQ ID NO: 15859 - DNA, 20 bp, synthetic construct
  source 1..20: mol_type = other DNA
tgtccctctcgggccattcc

SEQ ID NO: 15860 - DNA, 20 bp, synthetic construct
  source 1..20: mol_type = other DNA
tacctgcttcgggttgggca

SEQ ID NO: 15861 - DNA, 21 bp, synthetic construct
  source 1..21: mol_type = other DNA
tatgtccctctcgggccattc

SEQ ID NO: 15862 - DNA, 21 bp, synthetic construct
  source 1..21: mol_type = other DNA
cttacctgcttcgggttgggc

SEQ ID NO: 15863 - DNA, 20 bp, synthetic construct
  source 1..20: mol_type = other DNA
atgtccctctcgggccattc

SEQ ID NO: 15864 - DNA, 20 bp, synthetic construct
  source 1..20: mol_type = other DNA
ttacctgcttcgggttgggc

SEQ ID NO: 15865 - DNA, 23 bp, synthetic construct
  source 1..23: mol_type = other DNA
tgcttacctgcttcgggttgggc

SEQ ID NO: 15866 - DNA, 21 bp, synthetic construct
  source 1..21: mol_type = other DNA
gcttacctgcttcgggttggg

SEQ ID NO: 15867 - DNA, 20 bp, synthetic construct
  source 1..20: mol_type = other DNA
tatgtccctctcgggccatt

SEQ ID NO: 15868 - DNA, 20 bp, synthetic construct
  source 1..20: mol_type = other DNA
cttacctgcttcgggttggg

SEQ ID NO: 15869 - DNA, 20 bp, synthetic construct
  source 1..20: mol_type = other DNA
gtatgtccctctcgggccat

SEQ ID NO: 15870 - DNA, 20 bp, synthetic construct
  source 1..20: mol_type = other DNA
gcttacctgcttcgggttgg

SEQ ID NO: 15871 - DNA, 20 bp, synthetic construct
  source 1..20: mol_type = other DNA
tgcttacctgcttcgggttg

SEQ ID NO: 15872 - DNA, 20 bp, synthetic construct
  source 1..20: mol_type = other DNA
agtatgtccctctcgggcca

SEQ ID NO: 15873 - DNA, 23 bp, synthetic construct
  source 1..23: mol_type = other DNA
atgtgcttacctgcttcgggttg

SEQ ID NO: 15874 - DNA, 20 bp, synthetic construct
  source 1..20: mol_type = other DNA
gtgcttacctgcttcgggtt

SEQ ID NO: 15875 - DNA, 20 bp, synthetic construct
  source 1..20: mol_type = other DNA
gagtatgtccctctcgggcc

SEQ ID NO: 15876 - DNA, 23 bp, synthetic construct
  source 1..23: mol_type = other DNA
tgggagtatgtccctctcgggcc

SEQ ID NO: 15877 - DNA, 24 bp, synthetic construct
  source 1..24: mol_type = other DNA
agtgggagtatgtccctctcgggc

SEQ ID NO: 15878 - DNA, 21 bp, synthetic construct
  source 1..21: mol_type = other DNA
atgtgcttacctgcttcgggt

SEQ ID NO: 15879 - DNA, 20 bp, synthetic construct
  source 1..20: mol_type = other DNA
tgtgcttacctgcttcgggt

SEQ ID NO: 15880 - DNA, 20 bp, synthetic construct
  source 1..20: mol_type = other DNA
ggagtatgtccctctcgggc

SEQ ID NO: 15881 - DNA, 23 bp, synthetic construct
  source 1..23: mol_type = other DNA
gtgggagtatgtccctctcgggc

SEQ ID NO: 15882 - DNA, 23 bp, synthetic construct
  source 1..23: mol_type = other DNA
gaatgtgcttacctgcttcgggt

SEQ ID NO: 15883 - DNA, 23 bp, synthetic construct
  source 1..23: mol_type = other DNA
agaatgtgcttacctgcttcggg

SEQ ID NO: 15884 - DNA, 21 bp, synthetic construct
  source 1..21: mol_type = other DNA
aatgtgcttacctgcttcggg

SEQ ID NO: 15885 - DNA, 20 bp, synthetic construct
  source 1..20: mol_type = other DNA
atgtgcttacctgcttcggg

SEQ ID NO: 15886 - DNA, 20 bp, synthetic construct
  source 1..20: mol_type = other DNA
gggagtatgtccctctcggg

SEQ ID NO: 15887 - DNA, 22 bp, synthetic construct
  source 1..22: mol_type = other DNA
gtgggagtatgtccctctcggg

SEQ ID NO: 15888 - DNA, 21 bp, synthetic construct
  source 1..21: mol_type = other DNA
gaatgtgcttacctgcttcgg

SEQ ID NO: 15889 - DNA, 20 bp, synthetic construct
  source 1..20: mol_type = other DNA
tgggagtatgtccctctcgg

SEQ ID NO: 15890 - DNA, 20 bp, synthetic construct
  source 1..20: mol_type = other DNA
aatgtgcttacctgcttcgg

SEQ ID NO: 15891 - DNA, 21 bp, synthetic construct
  source 1..21: mol_type = other DNA
gtgggagtatgtccctctcgg

SEQ ID NO: 15892 - DNA, 24 bp, synthetic construct
  source 1..24: mol_type = other DNA
agaagtgggagtatgtccctctcg

SEQ ID NO: 15893 - DNA, 20 bp, synthetic construct
  source 1..20: mol_type = other DNA
gtgggagtatgtccctctcg

SEQ ID NO: 15894 - DNA, 20 bp, synthetic construct
  source 1..20: mol_type = other DNA
gaatgtgcttacctgcttcg

SEQ ID NO: 15895 - DNA, 20 bp, synthetic construct
  source 1..20: mol_type = other DNA
agtgggagtatgtccctctc

SEQ ID NO: 15896 - DNA, 20 bp, synthetic construct
  source 1..20: mol_type = other DNA
agaatgtgcttacctgcttc

SEQ ID NO: 15897 - DNA, 23 bp, synthetic construct
  source 1..23: mol_type = other DNA
agaagtgggagtatgtccctctc

SEQ ID NO: 15898 - DNA, 22 bp, synthetic construct
  source 1..22: mol_type = other DNA
gaagtgggagtatgtccctctc

SEQ ID NO: 15899 - DNA, 24 bp, synthetic construct
  source 1..24: mol_type = other DNA
tcagaagtgggagtatgtccctct

SEQ ID NO: 15900 - DNA, 21 bp, synthetic construct
  source 1..21: mol_type = other DNA
gaagtgggagtatgtccctct

SEQ ID NO: 15901 - DNA, 21 bp, synthetic construct
  source 1..21: mol_type = other DNA
agagaatgtgcttacctgctt

SEQ ID NO: 15902 - DNA, 20 bp, synthetic construct
  source 1..20: mol_type = other DNA
aagtgggagtatgtccctct

SEQ ID NO: 15903 - DNA, 20 bp, synthetic construct
  source 1..20: mol_type = other DNA
gagaatgtgcttacctgctt

SEQ ID NO: 15904 - DNA, 23 bp, synthetic construct
  source 1..23: mol_type = other DNA
cagaagtgggagtatgtccctct

SEQ ID NO: 15905 - DNA, 24 bp, synthetic construct
  source 1..24: mol_type = other DNA
ctgcagagaatgtgcttacctgct

SEQ ID NO: 15906 - DNA, 23 bp, synthetic construct
  source 1..23: mol_type = other DNA
tcagaagtgggagtatgtccctc

SEQ ID NO: 15907 - DNA, 23 bp, synthetic construct
  source 1..23: mol_type = other DNA
tgcagagaatgtgcttacctgct

SEQ ID NO: 15908 - DNA, 21 bp, synthetic construct
  source 1..21: mol_type = other DNA
agaagtgggagtatgtccctc

SEQ ID NO: 15909 - DNA, 21 bp, synthetic construct
  source 1..21: mol_type = other DNA
cagagaatgtgcttacctgct

SEQ ID NO: 15910 - DNA, 20 bp, synthetic construct
  source 1..20: mol_type = other DNA
gaagtgggagtatgtccctc

SEQ ID NO: 15911 - DNA, 20 bp, synthetic construct
  source 1..20: mol_type = other DNA
agagaatgtgcttacctgct

SEQ ID NO: 15912 - DNA, 21 bp, synthetic construct
  source 1..21: mol_type = other DNA
cagaagtgggagtatgtccct

SEQ ID NO: 15913 - DNA, 21 bp, synthetic construct
  source 1..21: mol_type = other DNA
gcagagaatgtgcttacctgc

SEQ ID NO: 15914 - DNA, 20 bp, synthetic construct
  source 1..20: mol_type = other DNA
agaagtgggagtatgtccct

SEQ ID NO: 15915 - DNA, 20 bp, synthetic construct
  source 1..20: mol_type = other DNA
cagagaatgtgcttacctgc

SEQ ID NO: 15916 - DNA, 20 bp, synthetic construct
  source 1..20: mol_type = other DNA
cagaagtgggagtatgtccc

SEQ ID NO: 15917 - DNA, 20 bp, synthetic construct
  source 1..20: mol_type = other DNA
gcagagaatgtgcttacctg

SEQ ID NO: 15918 - DNA, 20 bp, synthetic construct
  source 1..20: mol_type = other DNA
tcagaagtgggagtatgtcc

SEQ ID NO: 15919 - DNA, 20 bp, synthetic construct
  source 1..20: mol_type = other DNA
tgcagagaatgtgcttacct

SEQ ID NO: 15920 - DNA, 23 bp, synthetic construct
  source 1..23: mol_type = other DNA
cattcagaagtgggagtatgtcc

SEQ ID NO: 15921 - DNA, 23 bp, synthetic construct
  source 1..23: mol_type = other DNA
tcctgcagagaatgtgcttacct

SEQ ID NO: 15922 - DNA, 20 bp, synthetic construct
  source 1..20: mol_type = other DNA
ctgcagagaatgtgcttacc

SEQ ID NO: 15923 - DNA, 20 bp, synthetic construct
  source 1..20: mol_type = other DNA
ttcagaagtgggagtatgtc

SEQ ID NO: 15924 - DNA, 20 bp, synthetic construct
  source 1..20: mol_type = other DNA
cctgcagagaatgtgcttac

SEQ ID NO: 15925 - DNA, 20 bp, synthetic construct
  source 1..20: mol_type = other DNA
attcagaagtgggagtatgt

SEQ ID NO: 15926 - DNA, 23 bp, synthetic construct
  source 1..23: mol_type = other DNA
gacattcagaagtgggagtatgt

SEQ ID NO: 15927 - DNA, 22 bp, synthetic construct
  source 1..22: mol_type = other DNA
ttcctgcagagaatgtgcttac

SEQ ID NO: 15928 - DNA, 20 bp, synthetic construct
  source 1..20: mol_type = other DNA
cattcagaagtgggagtatg

SEQ ID NO: 15929 - DNA, 20 bp, synthetic construct
  source 1..20: mol_type = other DNA
tcctgcagagaatgtgctta

SEQ ID NO: 15930 - DNA, 23 bp, synthetic construct
  source 1..23: mol_type = other DNA
gcttcctgcagagaatgtgctta

SEQ ID NO: 15931 - DNA, 20 bp, synthetic construct
  source 1..20: mol_type = other DNA
acattcagaagtgggagtat

SEQ ID NO: 15932 - DNA, 20 bp, synthetic construct
  source 1..20: mol_type = other DNA
ttcctgcagagaatgtgctt

SEQ ID NO: 15933 - DNA, 23 bp, synthetic construct
  source 1..23: mol_type = other DNA
gagacattcagaagtgggagtat

SEQ ID NO: 15934 - DNA, 24 bp, synthetic construct
  source 1..24: mol_type = other DNA
gagcttcctgcagagaatgtgctt

SEQ ID NO: 15935 - DNA, 24 bp, synthetic construct
  source 1..24: mol_type = other DNA
acgagacattcagaagtgggagta

SEQ ID NO: 15936 - DNA, 20 bp, synthetic construct
  source 1..20: mol_type = other DNA
gacattcagaagtgggagta

SEQ ID NO: 15937 - DNA, 20 bp, synthetic construct
  source 1..20: mol_type = other DNA
cttcctgcagagaatgtgct

SEQ ID NO: 15938 - DNA, 23 bp, synthetic construct
  source 1..23: mol_type = other DNA
cgagacattcagaagtgggagta

SEQ ID NO: 15939 - DNA, 24 bp, synthetic construct
  source 1..24: mol_type = other DNA
cacgagacattcagaagtgggagt

SEQ ID NO: 15940 - DNA, 20 bp, synthetic construct
  source 1..20: mol_type = other DNA
agacattcagaagtgggagt

SEQ ID NO: 15941 - DNA, 20 bp, synthetic construct
  source 1..20: mol_type = other DNA
gcttcctgcagagaatgtgc

SEQ ID NO: 15942 - DNA, 23 bp, synthetic construct
  source 1..23: mol_type = other DNA
acgagacattcagaagtgggagt

SEQ ID NO: 15943 - DNA, 23 bp, synthetic construct
  source 1..23: mol_type = other DNA
ggagcttcctgcagagaatgtgc

SEQ ID NO: 15944 - DNA, 22 bp, synthetic construct
  source 1..22: mol_type = other DNA
cgagacattcagaagtgggagt

SEQ ID NO: 15945 - DNA, 24 bp, synthetic construct
  source 1..24: mol_type = other DNA
tgggagcttcctgcagagaatgtg

SEQ ID NO: 15946 - DNA, 20 bp, synthetic construct
  source 1..20: mol_type = other DNA
gagacattcagaagtgggag

SEQ ID NO: 15947 - DNA, 20 bp, synthetic construct
  source 1..20: mol_type = other DNA
agcttcctgcagagaatgtg

SEQ ID NO: 15948 - DNA, 23 bp, synthetic construct
  source 1..23: mol_type = other DNA
gggagcttcctgcagagaatgtg

SEQ ID NO: 15949 - DNA, 20 bp, synthetic construct
  source 1..20: mol_type = other DNA
cgagacattcagaagtggga

SEQ ID NO: 15950 - DNA, 20 bp, synthetic construct
  source 1..20: mol_type = other DNA
gagcttcctgcagagaatgt

SEQ ID NO: 15951 - DNA, 20 bp, synthetic construct
  source 1..20: mol_type = other DNA
acgagacattcagaagtggg

SEQ ID NO: 15952 - DNA, 20 bp, synthetic construct
  source 1..20: mol_type = other DNA
ggagcttcctgcagagaatg

SEQ ID NO: 15953 - DNA, 20 bp, synthetic construct
  source 1..20: mol_type = other DNA
cacgagacattcagaagtgg

SEQ ID NO: 15954 - DNA, 20 bp, synthetic construct
  source 1..20: mol_type = other DNA
gggagcttcctgcagagaat

SEQ ID NO: 15955 - DNA, 21 bp, synthetic construct
  source 1..21: mol_type = other DNA
agcacgagacattcagaagtg

SEQ ID NO: 15956 - DNA, 20 bp, synthetic construct
  source 1..20: mol_type = other DNA
gcacgagacattcagaagtg

SEQ ID NO: 15957 - DNA, 20 bp, synthetic construct
  source 1..20: mol_type = other DNA
tgggagcttcctgcagagaa

SEQ ID NO: 15958 - DNA, 23 bp, synthetic construct
  source 1..23: mol_type = other DNA
gtttgggagcttcctgcagagaa

SEQ ID NO: 15959 - DNA, 23 bp, synthetic construct
  source 1..23: mol_type = other DNA
tgcagcacgagacattcagaagt

SEQ ID NO: 15960 - DNA, 21 bp, synthetic construct
  source 1..21: mol_type = other DNA
cagcacgagacattcagaagt

SEQ ID NO: 15961 - DNA, 20 bp, synthetic construct
  source 1..20: mol_type = other DNA
agcacgagacattcagaagt

SEQ ID NO: 15962 - DNA, 20 bp, synthetic construct
  source 1..20: mol_type = other DNA
ttgggagcttcctgcagaga

SEQ ID NO: 15963 - DNA, 24 bp, synthetic construct
  source 1..24: mol_type = other DNA
gggtttgggagcttcctgcagaga

SEQ ID NO: 15964 - DNA, 23 bp, synthetic construct
  source 1..23: mol_type = other DNA
ctgcagcacgagacattcagaag

SEQ ID NO: 15965 - DNA, 21 bp, synthetic construct
  source 1..21: mol_type = other DNA
gcagcacgagacattcagaag

SEQ ID NO: 15966 - DNA, 20 bp, synthetic construct
  source 1..20: mol_type = other DNA
cagcacgagacattcagaag

SEQ ID NO: 15967 - DNA, 20 bp, synthetic construct
  source 1..20: mol_type = other DNA
tttgggagcttcctgcagag

SEQ ID NO: 15968 - DNA, 23 bp, synthetic construct
  source 1..23: mol_type = other DNA
tctgcagcacgagacattcagaa

SEQ ID NO: 15969 - DNA, 21 bp, synthetic construct
  source 1..21: mol_type = other DNA
tgcagcacgagacattcagaa

SEQ ID NO: 15970 - DNA, 20 bp, synthetic construct
  source 1..20: mol_type = other DNA
gcagcacgagacattcagaa

SEQ ID NO: 15971 - DNA, 20 bp, synthetic construct
  source 1..20: mol_type = other DNA
gtttgggagcttcctgcaga

SEQ ID NO: 15972 - DNA, 21 bp, synthetic construct
  source 1..21: mol_type = other DNA
ggtttgggagcttcctgcaga

SEQ ID NO: 15973 - DNA, 21 bp, synthetic construct
  source 1..21: mol_type = other DNA
ctgcagcacgagacattcaga

SEQ ID NO: 15974 - DNA, 20 bp, synthetic construct
  source 1..20: mol_type = other DNA
tgcagcacgagacattcaga

SEQ ID NO: 15975 - DNA, 20 bp, synthetic construct
  source 1..20: mol_type = other DNA
ggtttgggagcttcctgcag

SEQ ID NO: 15976 - DNA, 23 bp, synthetic construct
  source 1..23: mol_type = other DNA
gctgggtttgggagcttcctgca

SEQ ID NO: 15977 - DNA, 21 bp, synthetic construct
  source 1..21: mol_type = other DNA
tgggtttgggagcttcctgca

SEQ ID NO: 15978 - DNA, 20 bp, synthetic construct
  source 1..20: mol_type = other DNA
ctgcagcacgagacattcag

SEQ ID NO: 15979 - DNA, 20 bp, synthetic construct
  source 1..20: mol_type = other DNA
gggtttgggagcttcctgca

SEQ ID NO: 15980 - DNA, 21 bp, synthetic construct
  source 1..21: mol_type = other DNA
ctgggtttgggagcttcctgc

SEQ ID NO: 15981 - DNA, 21 bp, synthetic construct
  source 1..21: mol_type = other DNA
ttctgcagcacgagacattca

SEQ ID NO: 15982 - DNA, 20 bp, synthetic construct
  source 1..20: mol_type = other DNA
tgggtttgggagcttcctgc

SEQ ID NO: 15983 - DNA, 20 bp, synthetic construct
  source 1..20: mol_type = other DNA
tctgcagcacgagacattca

SEQ ID NO: 15984 - DNA, 23 bp, synthetic construct
  source 1..23: mol_type = other DNA
gggctgggtttgggagcttcctg

SEQ ID NO: 15985 - DNA, 21 bp, synthetic construct
  source 1..21: mol_type = other DNA
cttctgcagcacgagacattc

SEQ ID NO: 15986 - DNA, 21 bp, synthetic construct
  source 1..21: mol_type = other DNA
gctgggtttgggagcttcctg

SEQ ID NO: 15987 - DNA, 20 bp, synthetic construct
  source 1..20: mol_type = other DNA
ctgggtttgggagcttcctg

SEQ ID NO: 15988 - DNA, 20 bp, synthetic construct
  source 1..20: mol_type = other DNA
ttctgcagcacgagacattc

SEQ ID NO: 15989 - DNA, 23 bp, synthetic construct
  source 1..23: mol_type = other DNA
cttcttctgcagcacgagacatt

SEQ ID NO: 15990 - DNA, 21 bp, synthetic construct
  source 1..21: mol_type = other DNA
tcttctgcagcacgagacatt

SEQ ID NO: 15991 - DNA, 21 bp, synthetic construct
  source 1..21: mol_type = other DNA
ggctgggtttgggagcttcct

SEQ ID NO: 15992 - DNA, 20 bp, synthetic construct
  source 1..20: mol_type = other DNA
cttctgcagcacgagacatt

SEQ ID NO: 15993 - DNA, 20 bp, synthetic construct
  source 1..20: mol_type = other DNA
gctgggtttgggagcttcct

SEQ ID NO: 15994 - DNA, 21 bp, synthetic construct
  source 1..21: mol_type = other DNA
ttcttctgcagcacgagacat

SEQ ID NO: 15995 - DNA, 21 bp, synthetic construct
  source 1..21: mol_type = other DNA
gggctgggtttgggagcttcc

SEQ ID NO: 15996 - DNA, 20 bp, synthetic construct
  source 1..20: mol_type = other DNA
ggctgggtttgggagcttcc

SEQ ID NO: 15997 - DNA, 20 bp, synthetic construct
  source 1..20: mol_type = other DNA
tcttctgcagcacgagacat

SEQ ID NO: 15998 - DNA, 21 bp, synthetic construct
  source 1..21: mol_type = other DNA
cttcttctgcagcacgagaca

SEQ ID NO: 15999 - DNA, 20 bp, synthetic construct
  source 1..20: mol_type = other DNA
gggctgggtttgggagcttc

SEQ ID NO: 16000 - DNA, 20 bp, synthetic construct
  source 1..20: mol_type = other DNA
ttcttctgcagcacgagaca

SEQ ID NO: 16001 - DNA, 20 bp, synthetic construct
  source 1..20: mol_type = other DNA
cttcttctgcagcacgagac

SEQ ID NO: 16002 - DNA, 20 bp, synthetic construct
  source 1..20: mol_type = other DNA
agggctgggtttgggagctt

SEQ ID NO: 16003 - DNA, 23 bp, synthetic construct
  source 1..23: mol_type = other DNA
agcagggctgggtttgggagctt

SEQ ID NO: 16004 - DNA, 20 bp, synthetic construct
  source 1..20: mol_type = other DNA
ccttcttctgcagcacgaga

SEQ ID NO: 16005 - DNA, 20 bp, synthetic construct
  source 1..20: mol_type = other DNA
cagggctgggtttgggagct

SEQ ID NO: 16006 - DNA, 23 bp, synthetic construct
  source 1..23: mol_type = other DNA
tgcccttcttctgcagcacgaga

SEQ ID NO: 16007 - DNA, 20 bp, synthetic construct
  source 1..20: mol_type = other DNA
cccttcttctgcagcacgag

SEQ ID NO: 16008 - DNA, 20 bp, synthetic construct
  source 1..20: mol_type = other DNA
gcagggctgggtttgggagc

SEQ ID NO: 16009 - DNA, 20 bp, synthetic construct
  source 1..20: mol_type = other DNA
gcccttcttctgcagcacga

SEQ ID NO: 16010 - DNA, 20 bp, synthetic construct
  source 1..20: mol_type = other DNA
agcagggctgggtttgggag

SEQ ID NO: 16011 - DNA, 23 bp, synthetic construct
  source 1..23: mol_type = other DNA
ggcagcagggctgggtttgggag

SEQ ID NO: 16012 - DNA, 21 bp, synthetic construct
  source 1..21: mol_type = other DNA
tgcccttcttctgcagcacga

SEQ ID NO: 16013 - DNA, 24 bp, synthetic construct
  source 1..24: mol_type = other DNA
gaggcagcagggctgggtttggga

SEQ ID NO: 16014 - DNA, 24 bp, synthetic construct
  source 1..24: mol_type = other DNA
gctgtgcccttcttctgcagcacg

SEQ ID NO: 16015 - DNA, 20 bp, synthetic construct
  source 1..20: mol_type = other DNA
tgcccttcttctgcagcacg

SEQ ID NO: 16016 - DNA, 20 bp, synthetic construct
  source 1..20: mol_type = other DNA
cagcagggctgggtttggga

SEQ ID NO: 16017 - DNA, 23 bp, synthetic construct
  source 1..23: mol_type = other DNA
aggcagcagggctgggtttggga

SEQ ID NO: 16018 - DNA, 22 bp, synthetic construct
  source 1..22: mol_type = other DNA
tgtgcccttcttctgcagcacg

SEQ ID NO: 16019 - DNA, 20 bp, synthetic construct
  source 1..20: mol_type = other DNA
gtgcccttcttctgcagcac

SEQ ID NO: 16020 - DNA, 20 bp, synthetic construct
  source 1..20: mol_type = other DNA
gcagcagggctgggtttggg

SEQ ID NO: 16021 - DNA, 23 bp, synthetic construct
  source 1..23: mol_type = other DNA
gctgtgcccttcttctgcagcac

SEQ ID NO: 16022 - DNA, 22 bp, synthetic construct
  source 1..22: mol_type = other DNA
ctgtgcccttcttctgcagcac

SEQ ID NO: 16023 - DNA, 21 bp, synthetic construct
  source 1..21: mol_type = other DNA
ctgtgcccttcttctgcagca

SEQ ID NO: 16024 - DNA, 20 bp, synthetic construct
  source 1..20: mol_type = other DNA
ggcagcagggctgggtttgg

SEQ ID NO: 16025 - DNA, 20 bp, synthetic construct
  source 1..20: mol_type = other DNA
tgtgcccttcttctgcagca

SEQ ID NO: 16026 - DNA, 22 bp, synthetic construct
  source 1..22: mol_type = other DNA
gaggcagcagggctgggtttgg

SEQ ID NO: 16027 - DNA, 23 bp, synthetic construct
  source 1..23: mol_type = other DNA
tggctgtgcccttcttctgcagc

SEQ ID NO: 16028 - DNA, 21 bp, synthetic construct
  source 1..21: mol_type = other DNA
gctgtgcccttcttctgcagc

SEQ ID NO: 16029 - DNA, 21 bp, synthetic construct
  source 1..21: mol_type = other DNA
gaggcagcagggctgggtttg

SEQ ID NO: 16030 - DNA, 20 bp, synthetic construct
  source 1..20: mol_type = other DNA
ctgtgcccttcttctgcagc

SEQ ID NO: 16031 - DNA, 20 bp, synthetic construct
  source 1..20: mol_type = other DNA
aggcagcagggctgggtttg

SEQ ID NO: 16032 - DNA, 23 bp, synthetic construct
  source 1..23: mol_type = other DNA
cagaggcagcagggctgggtttg

SEQ ID NO: 16033 - DNA, 24 bp, synthetic construct
  source 1..24: mol_type = other DNA
ctggctgtgcccttcttctgcagc

SEQ ID NO: 16034 - DNA, 23 bp, synthetic construct
  source 1..23: mol_type = other DNA
tcagaggcagcagggctgggttt

SEQ ID NO: 16035 - DNA, 21 bp, synthetic construct
  source 1..21: mol_type = other DNA
ggctgtgcccttcttctgcag

SEQ ID NO: 16036 - DNA, 21 bp, synthetic construct
  source 1..21: mol_type = other DNA
agaggcagcagggctgggttt

SEQ ID NO: 16037 - DNA, 20 bp, synthetic construct
  source 1..20: mol_type = other DNA
gaggcagcagggctgggttt

SEQ ID NO: 16038 - DNA, 20 bp, synthetic construct
  source 1..20: mol_type = other DNA
gctgtgcccttcttctgcag

SEQ ID NO: 16039 - DNA, 24 bp, synthetic construct
  source 1..24: mol_type = other DNA
ctcagaggcagcagggctgggttt

SEQ ID NO: 16040 - DNA, 23 bp, synthetic construct
  source 1..23: mol_type = other DNA
ctcagaggcagcagggctgggtt

SEQ ID NO: 16041 - DNA, 21 bp, synthetic construct
  source 1..21: mol_type = other DNA
cagaggcagcagggctgggtt

SEQ ID NO: 16042 - DNA, 20 bp, synthetic construct
  source 1..20: mol_type = other DNA
agaggcagcagggctgggtt

SEQ ID NO: 16043 - DNA, 20 bp, synthetic construct
  source 1..20: mol_type = other DNA
ggctgtgcccttcttctgca

SEQ ID NO: 16044 - DNA, 23 bp, synthetic construct
  source 1..23: mol_type = other DNA
cctcagaggcagcagggctgggt

SEQ ID NO: 16045 - DNA, 21 bp, synthetic construct
  source 1..21: mol_type = other DNA
tcagaggcagcagggctgggt

SEQ ID NO: 16046 - DNA, 20 bp, synthetic construct
  source 1..20: mol_type = other DNA
cagaggcagcagggctgggt

SEQ ID NO: 16047 - DNA, 20 bp, synthetic construct
  source 1..20: mol_type = other DNA
tggctgtgcccttcttctgc

SEQ ID NO: 16048 - DNA, 23 bp, synthetic construct
  source 1..23: mol_type = other DNA
tcctggctgtgcccttcttctgc

SEQ ID NO: 16049 - DNA, 21 bp, synthetic construct
  source 1..21: mol_type = other DNA
ctcagaggcagcagggctggg

SEQ ID NO: 16050 - DNA, 20 bp, synthetic construct
  source 1..20: mol_type = other DNA
ctggctgtgcccttcttctg

SEQ ID NO: 16051 - DNA, 20 bp, synthetic construct
  source 1..20: mol_type = other DNA
tcagaggcagcagggctggg

SEQ ID NO: 16052 - DNA, 21 bp, synthetic construct
  source 1..21: mol_type = other DNA
tcctggctgtgcccttcttct

SEQ ID NO: 16053 - DNA, 20 bp, synthetic construct
  source 1..20: mol_type = other DNA
cctggctgtgcccttcttct

SEQ ID NO: 16054 - DNA, 20 bp, synthetic construct
  source 1..20: mol_type = other DNA
ctcagaggcagcagggctgg

SEQ ID NO: 16055 - DNA, 23 bp, synthetic construct
  source 1..23: mol_type = other DNA
agtcctggctgtgcccttcttct

SEQ ID NO: 16056 - DNA, 21 bp, synthetic construct
  source 1..21: mol_type = other DNA
gtcctggctgtgcccttcttc

SEQ ID NO: 16057 - DNA, 20 bp, synthetic construct
  source 1..20: mol_type = other DNA
tcctggctgtgcccttcttc

SEQ ID NO: 16058 - DNA, 20 bp, synthetic construct
  source 1..20: mol_type = other DNA
cctcagaggcagcagggctg

SEQ ID NO: 16059 - DNA, 23 bp, synthetic construct
  source 1..23: mol_type = other DNA
aagtcctggctgtgcccttcttc

SEQ ID NO: 16060 - DNA, 20 bp, synthetic construct
  source 1..20: mol_type = other DNA
gtcctggctgtgcccttctt

SEQ ID NO: 16061 - DNA, 20 bp, synthetic construct
  source 1..20: mol_type = other DNA
gcctcagaggcagcagggct

SEQ ID NO: 16062 - DNA, 21 bp, synthetic construct
  source 1..21: mol_type = other DNA
cagcctcagaggcagcagggc

SEQ ID NO: 16063 - DNA, 20 bp, synthetic construct
  source 1..20: mol_type = other DNA
agcctcagaggcagcagggc

SEQ ID NO: 16064 - DNA, 20 bp, synthetic construct
  source 1..20: mol_type = other DNA
agtcctggctgtgcccttct

SEQ ID NO: 16065 - DNA, 23 bp, synthetic construct
  source 1..23: mol_type = other DNA
gtaagtcctggctgtgcccttct

SEQ ID NO: 16066 - DNA, 24 bp, synthetic construct
  source 1..24: mol_type = other DNA
caagcagcctcagaggcagcaggg

SEQ ID NO: 16067 - DNA, 23 bp, synthetic construct
  source 1..23: mol_type = other DNA
aagcagcctcagaggcagcaggg

SEQ ID NO: 16068 - DNA, 21 bp, synthetic construct
  source 1..21: mol_type = other DNA
gcagcctcagaggcagcaggg

SEQ ID NO: 16069 - DNA, 20 bp, synthetic construct
  source 1..20: mol_type = other DNA
cagcctcagaggcagcaggg

SEQ ID NO: 16070 - DNA, 20 bp, synthetic construct
  source 1..20: mol_type = other DNA
aagtcctggctgtgcccttc

SEQ ID NO: 16071 - DNA, 21 bp, synthetic construct
  source 1..21: mol_type = other DNA
agcagcctcagaggcagcagg

SEQ ID NO: 16072 - DNA, 20 bp, synthetic construct
  source 1..20: mol_type = other DNA
taagtcctggctgtgccctt

SEQ ID NO: 16073 - DNA, 20 bp, synthetic construct
  source 1..20: mol_type = other DNA
gcagcctcagaggcagcagg

SEQ ID NO: 16074 - DNA, 20 bp, synthetic construct
  source 1..20: mol_type = other DNA
agcagcctcagaggcagcag

SEQ ID NO: 16075 - DNA, 20 bp, synthetic construct
  source 1..20: mol_type = other DNA
gtaagtcctggctgtgccct

SEQ ID NO: 16076 - DNA, 23 bp, synthetic construct
  source 1..23: mol_type = other DNA
tttgtaagtcctggctgtgccct

SEQ ID NO: 16077 - DNA, 20 bp, synthetic construct
  source 1..20: mol_type = other DNA
aagcagcctcagaggcagca

SEQ ID NO: 16078 - DNA, 20 bp, synthetic construct
  source 1..20: mol_type = other DNA
tgtaagtcctggctgtgccc

SEQ ID NO: 16079 - DNA, 21 bp, synthetic construct
  source 1..21: mol_type = other DNA
gcaagcagcctcagaggcagc

SEQ ID NO: 16080 - DNA, 20 bp, synthetic construct
  source 1..20: mol_type = other DNA
caagcagcctcagaggcagc

SEQ ID NO: 16081 - DNA, 20 bp, synthetic construct
  source 1..20: mol_type = other DNA
ttgtaagtcctggctgtgcc

SEQ ID NO: 16082 - DNA, 23 bp, synthetic construct
  source 1..23: mol_type = other DNA
gggcaagcagcctcagaggcagc

SEQ ID NO: 16083 - DNA, 23 bp, synthetic construct
  source 1..23: mol_type = other DNA
tgggcaagcagcctcagaggcag

SEQ ID NO: 16084 - DNA, 21 bp, synthetic construct
  source 1..21: mol_type = other DNA
ggcaagcagcctcagaggcag

SEQ ID NO: 16085 - DNA, 20 bp, synthetic construct
  source 1..20: mol_type = other DNA
gcaagcagcctcagaggcag

SEQ ID NO: 16086 - DNA, 20 bp, synthetic construct
  source 1..20: mol_type = other DNA
tttgtaagtcctggctgtgc

SEQ ID NO: 16087 - DNA, 23 bp, synthetic construct
  source 1..23: mol_type = other DNA
gcctttgtaagtcctggctgtgc

SEQ ID NO: 16088 - DNA, 21 bp, synthetic construct
  source 1..21: mol_type = other DNA
gggcaagcagcctcagaggca

SEQ ID NO: 16089 - DNA, 20 bp, synthetic construct
  source 1..20: mol_type = other DNA
ctttgtaagtcctggctgtg

SEQ ID NO: 16090 - DNA, 20 bp, synthetic construct
  source 1..20: mol_type = other DNA
ggcaagcagcctcagaggca

SEQ ID NO: 16091 - DNA, 21 bp, synthetic construct
  source 1..21: mol_type = other DNA
tgggcaagcagcctcagaggc

SEQ ID NO: 16092 - DNA, 20 bp, synthetic construct
  source 1..20: mol_type = other DNA
gggcaagcagcctcagaggc

SEQ ID NO: 16093 - DNA, 20 bp, synthetic construct
  source 1..20: mol_type = other DNA
cctttgtaagtcctggctgt

SEQ ID NO: 16094 - DNA, 20 bp, synthetic construct
  source 1..20: mol_type = other DNA
tgggcaagcagcctcagagg

SEQ ID NO: 16095 - DNA, 20 bp, synthetic construct
  source 1..20: mol_type = other DNA
gcctttgtaagtcctggctg

SEQ ID NO: 16096 - DNA, 23 bp, synthetic construct
  source 1..23: mol_type = other DNA
tcagcctttgtaagtcctggctg

SEQ ID NO: 16097 - DNA, 24 bp, synthetic construct
  source 1..24: mol_type = other DNA
gatcagcctttgtaagtcctggct

SEQ ID NO: 16098 - DNA, 21 bp, synthetic construct
  source 1..21: mol_type = other DNA
agtgggcaagcagcctcagag

SEQ ID NO: 16099 - DNA, 20 bp, synthetic construct
  source 1..20: mol_type = other DNA
agcctttgtaagtcctggct

SEQ ID NO: 16100 - DNA, 20 bp, synthetic construct
  source 1..20: mol_type = other DNA
gtgggcaagcagcctcagag

SEQ ID NO: 16101 - DNA, 23 bp, synthetic construct
  source 1..23: mol_type = other DNA
atcagcctttgtaagtcctggct

SEQ ID NO: 16102 - DNA, 23 bp, synthetic construct
  source 1..23: mol_type = other DNA
tcagtgggcaagcagcctcagag

SEQ ID NO: 16103 - DNA, 22 bp, synthetic construct
  source 1..22: mol_type = other DNA
tcagcctttgtaagtcctggct

SEQ ID NO: 16104 - DNA, 24 bp, synthetic construct
  source 1..24: mol_type = other DNA
tgatcagcctttgtaagtcctggc

SEQ ID NO: 16105 - DNA, 20 bp, synthetic construct
  source 1..20: mol_type = other DNA
cagcctttgtaagtcctggc

SEQ ID NO: 16106 - DNA, 23 bp, synthetic construct
  source 1..23: mol_type = other DNA
gatcagcctttgtaagtcctggc

SEQ ID NO: 16107 - DNA, 21 bp, synthetic construct
  source 1..21: mol_type = other DNA
cctcagtgcagccagatattc

SEQ ID NO: 16108 - DNA, 20 bp, synthetic construct
  source 1..20: mol_type = other DNA
ctcagtgcagccagatattc

SEQ ID NO: 16109 - DNA, 20 bp, synthetic construct
  source 1..20: mol_type = other DNA
ccatcagcgggccggtgaat

SEQ ID NO: 16110 - DNA, 20 bp, synthetic construct
  source 1..20: mol_type = other DNA
cctcagtgcagccagatatt

SEQ ID NO: 16111 - DNA, 20 bp, synthetic construct
  source 1..20: mol_type = other DNA
accatcagcgggccggtgaa

SEQ ID NO: 16112 - DNA, 20 bp, synthetic construct
  source 1..20: mol_type = other DNA
ccctcagtgcagccagatat

SEQ ID NO: 16113 - DNA, 23 bp, synthetic construct
  source 1..23: mol_type = other DNA
cagccctcagtgcagccagatat

SEQ ID NO: 16114 - DNA, 24 bp, synthetic construct
  source 1..24: mol_type = other DNA
ggcagccctcagtgcagccagata

SEQ ID NO: 16115 - DNA, 20 bp, synthetic construct
  source 1..20: mol_type = other DNA
gaccatcagcgggccggtga

SEQ ID NO: 16116 - DNA, 20 bp, synthetic construct
  source 1..20: mol_type = other DNA
gccctcagtgcagccagata

SEQ ID NO: 16117 - DNA, 23 bp, synthetic construct
  source 1..23: mol_type = other DNA
tgggaccatcagcgggccggtga

SEQ ID NO: 16118 - DNA, 23 bp, synthetic construct
  source 1..23: mol_type = other DNA
gcagccctcagtgcagccagata

SEQ ID NO: 16119 - DNA, 20 bp, synthetic construct
  source 1..20: mol_type = other DNA
ggaccatcagcgggccggtg

SEQ ID NO: 16120 - DNA, 20 bp, synthetic construct
  source 1..20: mol_type = other DNA
agccctcagtgcagccagat

SEQ ID NO: 16121 - DNA, 20 bp, synthetic construct
  source 1..20: mol_type = other DNA
gggaccatcagcgggccggt

SEQ ID NO: 16122 - DNA, 20 bp, synthetic construct
  source 1..20: mol_type = other DNA
cagccctcagtgcagccaga

SEQ ID NO: 16123 - DNA, 23 bp, synthetic construct
  source 1..23: mol_type = other DNA
gggcagccctcagtgcagccaga

SEQ ID NO: 16124 - DNA, 22 bp, synthetic construct
  source 1..22: mol_type = other DNA
ctgggaccatcagcgggccggt

SEQ ID NO: 16125 - DNA, 21 bp, synthetic construct
  source 1..21: mol_type = other DNA
tgggaccatcagcgggccggt

SEQ ID NO: 16126 - DNA, 20 bp, synthetic construct
  source 1..20: mol_type = other DNA
tgggaccatcagcgggccgg

SEQ ID NO: 16127 - DNA, 20 bp, synthetic construct
  source 1..20: mol_type = other DNA
gcagccctcagtgcagccag

SEQ ID NO: 16128 - DNA, 22 bp, synthetic construct
  source 1..22: mol_type = other DNA
tctgggaccatcagcgggccgg

SEQ ID NO: 16129 - DNA, 23 bp, synthetic construct
  source 1..23: mol_type = other DNA
cttctgggaccatcagcgggccg

SEQ ID NO: 16130 - DNA, 21 bp, synthetic construct
  source 1..21: mol_type = other DNA
tctgggaccatcagcgggccg

SEQ ID NO: 16131 - DNA, 20 bp, synthetic construct
  source 1..20: mol_type = other DNA
ctgggaccatcagcgggccg

SEQ ID NO: 16132 - DNA, 20 bp, synthetic construct
  source 1..20: mol_type = other DNA
ggcagccctcagtgcagcca

SEQ ID NO: 16133 - DNA, 24 bp, synthetic construct
  source 1..24: mol_type = other DNA
gcgtgggcagccctcagtgcagcc

SEQ ID NO: 16134 - DNA, 21 bp, synthetic construct
  source 1..21: mol_type = other DNA
ttctgggaccatcagcgggcc

SEQ ID NO: 16135 - DNA, 20 bp, synthetic construct
  source 1..20: mol_type = other DNA
tctgggaccatcagcgggcc

SEQ ID NO: 16136 - DNA, 20 bp, synthetic construct
  source 1..20: mol_type = other DNA
gggcagccctcagtgcagcc

SEQ ID NO: 16137 - DNA, 22 bp, synthetic construct
  source 1..22: mol_type = other DNA
gtgggcagccctcagtgcagcc

SEQ ID NO: 16138 - DNA, 20 bp, synthetic construct
  source 1..20: mol_type = other DNA
ttctgggaccatcagcgggc

SEQ ID NO: 16139 - DNA, 20 bp, synthetic construct
  source 1..20: mol_type = other DNA
tgggcagccctcagtgcagc

SEQ ID NO: 16140 - DNA, 22 bp, synthetic construct
  source 1..22: mol_type = other DNA
cgtgggcagccctcagtgcagc

SEQ ID NO: 16141 - DNA, 21 bp, synthetic construct
  source 1..21: mol_type = other DNA
cgtgggcagccctcagtgcag

SEQ ID NO: 16142 - DNA, 21 bp, synthetic construct
  source 1..21: mol_type = other DNA
gcttctgggaccatcagcggg

SEQ ID NO: 16143 - DNA, 20 bp, synthetic construct
  source 1..20: mol_type = other DNA
cttctgggaccatcagcggg

SEQ ID NO: 16144 - DNA, 20 bp, synthetic construct
  source 1..20: mol_type = other DNA
gtgggcagccctcagtgcag

SEQ ID NO: 16145 - DNA, 21 bp, synthetic construct
  source 1..21: mol_type = other DNA
ggcttctgggaccatcagcgg

SEQ ID NO: 16146 - DNA, 21 bp, synthetic construct
  source 1..21: mol_type = other DNA
gcgtgggcagccctcagtgca

SEQ ID NO: 16147 - DNA, 20 bp, synthetic construct
  source 1..20: mol_type = other DNA
gcttctgggaccatcagcgg

SEQ ID NO: 16148 - DNA, 20 bp, synthetic construct
  source 1..20: mol_type = other DNA
cgtgggcagccctcagtgca

SEQ ID NO: 16149 - DNA, 24 bp, synthetic construct
  source 1..24: mol_type = other DNA
tctgcgtgggcagccctcagtgca

SEQ ID NO: 16150 - DNA, 20 bp, synthetic construct
  source 1..20: mol_type = other DNA
ggcttctgggaccatcagcg

SEQ ID NO: 16151 - DNA, 20 bp, synthetic construct
  source 1..20: mol_type = other DNA
gcgtgggcagccctcagtgc

SEQ ID NO: 16152 - DNA, 20 bp, synthetic construct
  source 1..20: mol_type = other DNA
tggcttctgggaccatcagc

SEQ ID NO: 16153 - DNA, 20 bp, synthetic construct
  source 1..20: mol_type = other DNA
tgcgtgggcagccctcagtg

SEQ ID NO: 16154 - DNA, 23 bp, synthetic construct
  source 1..23: mol_type = other DNA
tcctggcttctgggaccatcagc

SEQ ID NO: 16155 - DNA, 23 bp, synthetic construct
  source 1..23: mol_type = other DNA
ctctgcgtgggcagccctcagtg

SEQ ID NO: 16156 - DNA, 24 bp, synthetic construct
  source 1..24: mol_type = other DNA
cctcctggcttctgggaccatcag

SEQ ID NO: 16157 - DNA, 24 bp, synthetic construct
  source 1..24: mol_type = other DNA
tgctctgcgtgggcagccctcagt

SEQ ID NO: 16158 - DNA, 21 bp, synthetic construct
  source 1..21: mol_type = other DNA
cctggcttctgggaccatcag

SEQ ID NO: 16159 - DNA, 21 bp, synthetic construct
  source 1..21: mol_type = other DNA
tctgcgtgggcagccctcagt

SEQ ID NO: 16160 - DNA, 20 bp, synthetic construct
  source 1..20: mol_type = other DNA
ctggcttctgggaccatcag

SEQ ID NO: 16161 - DNA, 20 bp, synthetic construct
  source 1..20: mol_type = other DNA
ctgcgtgggcagccctcagt

SEQ ID NO: 16162 - DNA, 23 bp, synthetic construct
  source 1..23: mol_type = other DNA
ctcctggcttctgggaccatcag

SEQ ID NO: 16163 - DNA, 23 bp, synthetic construct
  source 1..23: mol_type = other DNA
gctctgcgtgggcagccctcagt

SEQ ID NO: 16164 - DNA, 23 bp, synthetic construct
  source 1..23: mol_type = other DNA
cctcctggcttctgggaccatca

SEQ ID NO: 16165 - DNA, 21 bp, synthetic construct
  source 1..21: mol_type = other DNA
tcctggcttctgggaccatca

SEQ ID NO: 16166 - DNA, 21 bp, synthetic construct
  source 1..21: mol_type = other DNA
ctctgcgtgggcagccctcag

SEQ ID NO: 16167 - DNA, 20 bp, synthetic construct
  source 1..20: mol_type = other DNA
cctggcttctgggaccatca

SEQ ID NO: 16168 - DNA, 20 bp, synthetic construct
  source 1..20: mol_type = other DNA
tctgcgtgggcagccctcag

SEQ ID NO: 16169 - DNA, 21 bp, synthetic construct
  source 1..21: mol_type = other DNA
ctcctggcttctgggaccatc

SEQ ID NO: 16170 - DNA, 20 bp, synthetic construct
  source 1..20: mol_type = other DNA
ctctgcgtgggcagccctca

SEQ ID NO: 16171 - DNA, 20 bp, synthetic construct
  source 1..20: mol_type = other DNA
tcctggcttctgggaccatc

SEQ ID NO: 16172 - DNA, 20 bp, synthetic construct
  source 1..20: mol_type = other DNA
ctcctggcttctgggaccat

SEQ ID NO: 16173 - DNA, 20 bp, synthetic construct
  source 1..20: mol_type = other DNA
gctctgcgtgggcagccctc

SEQ ID NO: 16174 - DNA, 23 bp, synthetic construct
  source 1..23: mol_type = other DNA
gatgctctgcgtgggcagccctc

SEQ ID NO: 16175 - DNA, 21 bp, synthetic construct
  source 1..21: mol_type = other DNA
acctcctggcttctgggacca

SEQ ID NO: 16176 - DNA, 20 bp, synthetic construct
  source 1..20: mol_type = other DNA
tgctctgcgtgggcagccct

SEQ ID NO: 16177 - DNA, 20 bp, synthetic construct
  source 1..20: mol_type = other DNA
cctcctggcttctgggacca

SEQ ID NO: 16178 - DNA, 23 bp, synthetic construct
  source 1..23: mol_type = other DNA
ggacctcctggcttctgggacca

SEQ ID NO: 16179 - DNA, 21 bp, synthetic construct
  source 1..21: mol_type = other DNA
gacctcctggcttctgggacc

SEQ ID NO: 16180 - DNA, 21 bp, synthetic construct
  source 1..21: mol_type = other DNA
gatgctctgcgtgggcagccc

SEQ ID NO: 16181 - DNA, 20 bp, synthetic construct
  source 1..20: mol_type = other DNA
acctcctggcttctgggacc

SEQ ID NO: 16182 - DNA, 20 bp, synthetic construct
  source 1..20: mol_type = other DNA
atgctctgcgtgggcagccc

SEQ ID NO: 16183 - DNA, 21 bp, synthetic construct
  source 1..21: mol_type = other DNA
ggatgctctgcgtgggcagcc

SEQ ID NO: 16184 - DNA, 20 bp, synthetic construct
  source 1..20: mol_type = other DNA
gacctcctggcttctgggac

SEQ ID NO: 16185 - DNA, 20 bp, synthetic construct
  source 1..20: mol_type = other DNA
gatgctctgcgtgggcagcc

SEQ ID NO: 16186 - DNA, 20 bp, synthetic construct
  source 1..20: mol_type = other DNA
ggacctcctggcttctggga

SEQ ID NO: 16187 - DNA, 20 bp, synthetic construct
  source 1..20: mol_type = other DNA
ggatgctctgcgtgggcagc

SEQ ID NO: 16188 - DNA, 23 bp, synthetic construct
  source 1..23: mol_type = other DNA
gggggacctcctggcttctggga

SEQ ID NO: 16189 - DNA, 20 bp, synthetic construct
  source 1..20: mol_type = other DNA
gggacctcctggcttctggg

SEQ ID NO: 16190 - DNA, 20 bp, synthetic construct
  source 1..20: mol_type = other DNA
gggatgctctgcgtgggcag

SEQ ID NO: 16191 - DNA, 23 bp, synthetic construct
  source 1..23: mol_type = other DNA
gcagggatgctctgcgtgggcag

SEQ ID NO: 16192 - DNA, 20 bp, synthetic construct
  source 1..20: mol_type = other DNA
ggggacctcctggcttctgg

SEQ ID NO: 16193 - DNA, 20 bp, synthetic construct
  source 1..20: mol_type = other DNA
agggatgctctgcgtgggca

SEQ ID NO: 16194 - DNA, 20 bp, synthetic construct
  source 1..20: mol_type = other DNA
gggggacctcctggcttctg

SEQ ID NO: 16195 - DNA, 20 bp, synthetic construct
  source 1..20: mol_type = other DNA
cagggatgctctgcgtgggc

SEQ ID NO: 16196 - DNA, 23 bp, synthetic construct
  source 1..23: mol_type = other DNA
gccgggggacctcctggcttctg

SEQ ID NO: 16197 - DNA, 23 bp, synthetic construct
  source 1..23: mol_type = other DNA
gagcagggatgctctgcgtgggc

SEQ ID NO: 16198 - DNA, 22 bp, synthetic construct
  source 1..22: mol_type = other DNA
ccgggggacctcctggcttctg

SEQ ID NO: 16199 - DNA, 24 bp, synthetic construct
  source 1..24: mol_type = other DNA
cggccgggggacctcctggcttct

SEQ ID NO: 16200 - DNA, 24 bp, synthetic construct
  source 1..24: mol_type = other DNA
gggagcagggatgctctgcgtggg

SEQ ID NO: 16201 - DNA, 20 bp, synthetic construct
  source 1..20: mol_type = other DNA
cgggggacctcctggcttct

SEQ ID NO: 16202 - DNA, 20 bp, synthetic construct
  source 1..20: mol_type = other DNA
gcagggatgctctgcgtggg

SEQ ID NO: 16203 - DNA, 23 bp, synthetic construct
  source 1..23: mol_type = other DNA
ggccgggggacctcctggcttct

SEQ ID NO: 16204 - DNA, 23 bp, synthetic construct
  source 1..23: mol_type = other DNA
ggagcagggatgctctgcgtggg

SEQ ID NO: 16205 - DNA, 22 bp, synthetic construct
  source 1..22: mol_type = other DNA
gagcagggatgctctgcgtggg

SEQ ID NO: 16206 - DNA, 24 bp, synthetic construct
  source 1..24: mol_type = other DNA
ggggagcagggatgctctgcgtgg

SEQ ID NO: 16207 - DNA, 23 bp, synthetic construct
  source 1..23: mol_type = other DNA
cggccgggggacctcctggcttc

SEQ ID NO: 16208 - DNA, 21 bp, synthetic construct
  source 1..21: mol_type = other DNA
gccgggggacctcctggcttc

SEQ ID NO: 16209 - DNA, 21 bp, synthetic construct
  source 1..21: mol_type = other DNA
gagcagggatgctctgcgtgg

SEQ ID NO: 16210 - DNA, 20 bp, synthetic construct
  source 1..20: mol_type = other DNA
ccgggggacctcctggcttc

SEQ ID NO: 16211 - DNA, 20 bp, synthetic construct
  source 1..20: mol_type = other DNA
agcagggatgctctgcgtgg

SEQ ID NO: 16212 - DNA, 23 bp, synthetic construct
  source 1..23: mol_type = other DNA
gggagcagggatgctctgcgtgg

SEQ ID NO: 16213 - DNA, 23 bp, synthetic construct
  source 1..23: mol_type = other DNA
gcggccgggggacctcctggctt

SEQ ID NO: 16214 - DNA, 21 bp, synthetic construct
  source 1..21: mol_type = other DNA
ggccgggggacctcctggctt

SEQ ID NO: 16215 - DNA, 21 bp, synthetic construct
  source 1..21: mol_type = other DNA
ggagcagggatgctctgcgtg

SEQ ID NO: 16216 - DNA, 20 bp, synthetic construct
  source 1..20: mol_type = other DNA
gccgggggacctcctggctt

SEQ ID NO: 16217 - DNA, 20 bp, synthetic construct
  source 1..20: mol_type = other DNA
gagcagggatgctctgcgtg

SEQ ID NO: 16218 - DNA, 21 bp, synthetic construct
  source 1..21: mol_type = other DNA
cggccgggggacctcctggct

SEQ ID NO: 16219 - DNA, 20 bp, synthetic construct
  source 1..20: mol_type = other DNA
ggagcagggatgctctgcgt

SEQ ID NO: 16220 - DNA, 20 bp, synthetic construct
  source 1..20: mol_type = other DNA
ggccgggggacctcctggct

SEQ ID NO: 16221 - DNA, 21 bp, synthetic construct
  source 1..21: mol_type = other DNA
ggggagcagggatgctctgcg

SEQ ID NO: 16222 - DNA, 20 bp, synthetic construct
  source 1..20: mol_type = other DNA
gggagcagggatgctctgcg

SEQ ID NO: 16223 - DNA, 20 bp, synthetic construct
  source 1..20: mol_type = other DNA
cggccgggggacctcctggc

SEQ ID NO: 16224 - DNA, 23 bp, synthetic construct
  source 1..23: mol_type = other DNA
gtggggagcagggatgctctgcg

SEQ ID NO: 16225 - DNA, 23 bp, synthetic construct
  source 1..23: mol_type = other DNA
tgtggggagcagggatgctctgc

SEQ ID NO: 16226 - DNA, 21 bp, synthetic construct
  source 1..21: mol_type = other DNA
tggggagcagggatgctctgc

SEQ ID NO: 16227 - DNA, 20 bp, synthetic construct
  source 1..20: mol_type = other DNA
ggggagcagggatgctctgc

SEQ ID NO: 16228 - DNA, 20 bp, synthetic construct
  source 1..20: mol_type = other DNA
gcggccgggggacctcctgg

SEQ ID NO: 16229 - DNA, 21 bp, synthetic construct
  source 1..21: mol_type = other DNA
gtggggagcagggatgctctg

SEQ ID NO: 16230 - DNA, 20 bp, synthetic construct
  source 1..20: mol_type = other DNA
tggggagcagggatgctctg

SEQ ID NO: 16231 - DNA, 20 bp, synthetic construct
  source 1..20: mol_type = other DNA
tgcggccgggggacctcctg

SEQ ID NO: 16232 - DNA, 23 bp, synthetic construct
  source 1..23: mol_type = other DNA
acctgcggccgggggacctcctg

SEQ ID NO: 16233 - DNA, 20 bp, synthetic construct
  source 1..20: mol_type = other DNA
gtggggagcagggatgctct

SEQ ID NO: 16234 - DNA, 20 bp, synthetic construct
  source 1..20: mol_type = other DNA
ctgcggccgggggacctcct

SEQ ID NO: 16235 - DNA, 20 bp, synthetic construct
  source 1..20: mol_type = other DNA
cctgcggccgggggacctcc

SEQ ID NO: 16236 - DNA, 20 bp, synthetic construct
  source 1..20: mol_type = other DNA
tgtggggagcagggatgctc

SEQ ID NO: 16237 - DNA, 21 bp, synthetic construct
  source 1..21: mol_type = other DNA
gtgtggggagcagggatgctc

SEQ ID NO: 16238 - DNA, 22 bp, synthetic construct
  source 1..22: mol_type = other DNA
aacctgcggccgggggacctcc

SEQ ID NO: 16239 - DNA, 21 bp, synthetic construct
  source 1..21: mol_type = other DNA
aacctgcggccgggggacctc

SEQ ID NO: 16240 - DNA, 20 bp, synthetic construct
  source 1..20: mol_type = other DNA
acctgcggccgggggacctc

SEQ ID NO: 16241 - DNA, 20 bp, synthetic construct
  source 1..20: mol_type = other DNA
gtgtggggagcagggatgct

SEQ ID NO: 16242 - DNA, 23 bp, synthetic construct
  source 1..23: mol_type = other DNA
gcaacctgcggccgggggacctc

SEQ ID NO: 16243 - DNA, 21 bp, synthetic construct
  source 1..21: mol_type = other DNA
caacctgcggccgggggacct

SEQ ID NO: 16244 - DNA, 20 bp, synthetic construct
  source 1..20: mol_type = other DNA
aacctgcggccgggggacct

SEQ ID NO: 16245 - DNA, 20 bp, synthetic construct
  source 1..20: mol_type = other DNA
tgtgtggggagcagggatgc

SEQ ID NO: 16246 - DNA, 23 bp, synthetic construct
  source 1..23: mol_type = other DNA
ggctgtgtggggagcagggatgc

SEQ ID NO: 16247 - DNA, 24 bp, synthetic construct
  source 1..24: mol_type = other DNA
ctgcaacctgcggccgggggacct

SEQ ID NO: 16248 - DNA, 20 bp, synthetic construct
  source 1..20: mol_type = other DNA
caacctgcggccgggggacc

SEQ ID NO: 16249 - DNA, 20 bp, synthetic construct
  source 1..20: mol_type = other DNA
ctgtgtggggagcagggatg

SEQ ID NO: 16250 - DNA, 20 bp, synthetic construct
  source 1..20: mol_type = other DNA
gcaacctgcggccgggggac

SEQ ID NO: 16251 - DNA, 20 bp, synthetic construct
  source 1..20: mol_type = other DNA
gctgtgtggggagcagggat

SEQ ID NO: 16252 - DNA, 20 bp, synthetic construct
  source 1..20: mol_type = other DNA
ggctgtgtggggagcaggga

SEQ ID NO: 16253 - DNA, 20 bp, synthetic construct
  source 1..20: mol_type = other DNA
tgcaacctgcggccggggga

SEQ ID NO: 16254 - DNA, 23 bp, synthetic construct
  source 1..23: mol_type = other DNA
ggctgcaacctgcggccggggga

SEQ ID NO: 16255 - DNA, 23 bp, synthetic construct
  source 1..23: mol_type = other DNA
tggggctgtgtggggagcaggga

SEQ ID NO: 16256 - DNA, 24 bp, synthetic construct
  source 1..24: mol_type = other DNA
acggctgcaacctgcggccggggg

SEQ ID NO: 16257 - DNA, 20 bp, synthetic construct
  source 1..20: mol_type = other DNA
gggctgtgtggggagcaggg

SEQ ID NO: 16258 - DNA, 20 bp, synthetic construct
  source 1..20: mol_type = other DNA
ctgcaacctgcggccggggg

SEQ ID NO: 16259 - DNA, 23 bp, synthetic construct
  source 1..23: mol_type = other DNA
cggctgcaacctgcggccggggg

SEQ ID NO: 16260 - DNA, 22 bp, synthetic construct
  source 1..22: mol_type = other DNA
tggggctgtgtggggagcaggg

SEQ ID NO: 16261 - DNA, 20 bp, synthetic construct
  source 1..20: mol_type = other DNA
gctgcaacctgcggccgggg

SEQ ID NO: 16262 - DNA, 20 bp, synthetic construct
  source 1..20: mol_type = other DNA
ggggctgtgtggggagcagg

SEQ ID NO: 16263 - DNA, 23 bp, synthetic construct
  source 1..23: mol_type = other DNA
cttggggctgtgtggggagcagg

SEQ ID NO: 16264 - DNA, 20 bp, synthetic construct
  source 1..20: mol_type = other DNA
ggctgcaacctgcggccggg

SEQ ID NO: 16265 - DNA, 20 bp, synthetic construct
  source 1..20: mol_type = other DNA
tggggctgtgtggggagcag

SEQ ID NO: 16266 - DNA, 23 bp, synthetic construct
  source 1..23: mol_type = other DNA
aacggctgcaacctgcggccggg

SEQ ID NO: 16267 - DNA, 22 bp, synthetic construct
  source 1..22: mol_type = other DNA
acggctgcaacctgcggccggg

SEQ ID NO: 16268 - DNA, 24 bp, synthetic construct
  source 1..24: mol_type = other DNA
tcaacggctgcaacctgcggccgg

SEQ ID NO: 16269 - DNA, 20 bp, synthetic construct
  source 1..20: mol_type = other DNA
cggctgcaacctgcggccgg

SEQ ID NO: 16270 - DNA, 20 bp, synthetic construct
  source 1..20: mol_type = other DNA
ttggggctgtgtggggagca

SEQ ID NO: 16271 - DNA, 23 bp, synthetic construct
  source 1..23: mol_type = other DNA
caacggctgcaacctgcggccgg

SEQ ID NO: 16272 - DNA, 21 bp, synthetic construct
  source 1..21: mol_type = other DNA
cttggggctgtgtggggagca

SEQ ID NO: 16273 - DNA, 22 bp, synthetic construct
  source 1..22: mol_type = other DNA
aacggctgcaacctgcggccgg

SEQ ID NO: 16274 - DNA, 23 bp, synthetic construct
  source 1..23: mol_type = other DNA
tcaacggctgcaacctgcggccg

SEQ ID NO: 16275 - DNA, 23 bp, synthetic construct
  source 1..23: mol_type = other DNA
gcccttggggctgtgtggggagc

SEQ ID NO: 16276 - DNA, 21 bp, synthetic construct
  source 1..21: mol_type = other DNA
aacggctgcaacctgcggccg

SEQ ID NO: 16277 - DNA, 21 bp, synthetic construct
  source 1..21: mol_type = other DNA
ccttggggctgtgtggggagc

SEQ ID NO: 16278 - DNA, 20 bp, synthetic construct
  source 1..20: mol_type = other DNA
acggctgcaacctgcggccg

SEQ ID NO: 16279 - DNA, 20 bp, synthetic construct
  source 1..20: mol_type = other DNA
cttggggctgtgtggggagc

SEQ ID NO: 16280 - DNA, 23 bp, synthetic construct
  source 1..23: mol_type = other DNA
gtcaacggctgcaacctgcggcc

SEQ ID NO: 16281 - DNA, 23 bp, synthetic construct
  source 1..23: mol_type = other DNA
ggcccttggggctgtgtggggag

SEQ ID NO: 16282 - DNA, 21 bp, synthetic construct
  source 1..21: mol_type = other DNA
caacggctgcaacctgcggcc

SEQ ID NO: 16283 - DNA, 21 bp, synthetic construct
  source 1..21: mol_type = other DNA
cccttggggctgtgtggggag

SEQ ID NO: 16284 - DNA, 20 bp, synthetic construct
  source 1..20: mol_type = other DNA
aacggctgcaacctgcggcc

SEQ ID NO: 16285 - DNA, 20 bp, synthetic construct
  source 1..20: mol_type = other DNA
ccttggggctgtgtggggag

SEQ ID NO: 16286 - DNA, 23 bp, synthetic construct
  source 1..23: mol_type = other DNA
tgtcaacggctgcaacctgcggc

SEQ ID NO: 16287 - DNA, 21 bp, synthetic construct
  source 1..21: mol_type = other DNA
tcaacggctgcaacctgcggc

SEQ ID NO: 16288 - DNA, 21 bp, synthetic construct
  source 1..21: mol_type = other DNA
gcccttggggctgtgtgggga

SEQ ID NO: 16289 - DNA, 20 bp, synthetic construct
  source 1..20: mol_type = other DNA
caacggctgcaacctgcggc

SEQ ID NO: 16290 - DNA, 20 bp, synthetic construct
  source 1..20: mol_type = other DNA
cccttggggctgtgtgggga

SEQ ID NO: 16291 - DNA, 23 bp, synthetic construct
  source 1..23: mol_type = other DNA
ctgtcaacggctgcaacctgcgg

SEQ ID NO: 16292 - DNA, 21 bp, synthetic construct
  source 1..21: mol_type = other DNA
gtcaacggctgcaacctgcgg

SEQ ID NO: 16293 - DNA, 21 bp, synthetic construct
  source 1..21: mol_type = other DNA
ggcccttggggctgtgtgggg

SEQ ID NO: 16294 - DNA, 20 bp, synthetic construct
  source 1..20: mol_type = other DNA
tcaacggctgcaacctgcgg

SEQ ID NO: 16295 - DNA, 20 bp, synthetic construct
  source 1..20: mol_type = other DNA
gcccttggggctgtgtgggg

SEQ ID NO: 16296 - DNA, 21 bp, synthetic construct
  source 1..21: mol_type = other DNA
tgtcaacggctgcaacctgcg

SEQ ID NO: 16297 - DNA, 20 bp, synthetic construct
  source 1..20: mol_type = other DNA
ggcccttggggctgtgtggg

SEQ ID NO: 16298 - DNA, 20 bp, synthetic construct
  source 1..20: mol_type = other DNA
gtcaacggctgcaacctgcg

SEQ ID NO: 16299 - DNA, 21 bp, synthetic construct
  source 1..21: mol_type = other DNA
agggcccttggggctgtgtgg

SEQ ID NO: 16300 - DNA, 20 bp, synthetic construct
  source 1..20: mol_type = other DNA
tgtcaacggctgcaacctgc

SEQ ID NO: 16301 - DNA, 20 bp, synthetic construct
  source 1..20: mol_type = other DNA
gggcccttggggctgtgtgg

SEQ ID NO: 16302 - DNA, 23 bp, synthetic construct
  source 1..23: mol_type = other DNA
tgagggcccttggggctgtgtgg

SEQ ID NO: 16303 - DNA, 23 bp, synthetic construct
  source 1..23: mol_type = other DNA
ctgagggcccttggggctgtgtg

SEQ ID NO: 16304 - DNA, 21 bp, synthetic construct
  source 1..21: mol_type = other DNA
gagggcccttggggctgtgtg

SEQ ID NO: 16305 - DNA, 20 bp, synthetic construct
  source 1..20: mol_type = other DNA
ctgtcaacggctgcaacctg

SEQ ID NO: 16306 - DNA, 20 bp, synthetic construct
  source 1..20: mol_type = other DNA
agggcccttggggctgtgtg

SEQ ID NO: 16307 - DNA, 23 bp, synthetic construct
  source 1..23: mol_type = other DNA
actctgtcaacggctgcaacctg

SEQ ID NO: 16308 - DNA, 24 bp, synthetic construct
  source 1..24: mol_type = other DNA
ccactctgtcaacggctgcaacct

SEQ ID NO: 16309 - DNA, 23 bp, synthetic construct
  source 1..23: mol_type = other DNA
gctgagggcccttggggctgtgt

SEQ ID NO: 16310 - DNA, 21 bp, synthetic construct
  source 1..21: mol_type = other DNA
tgagggcccttggggctgtgt

SEQ ID NO: 16311 - DNA, 21 bp, synthetic construct
  source 1..21: mol_type = other DNA
ctctgtcaacggctgcaacct

SEQ ID NO: 16312 - DNA, 20 bp, synthetic construct
  source 1..20: mol_type = other DNA
tctgtcaacggctgcaacct

SEQ ID NO: 16313 - DNA, 20 bp, synthetic construct
  source 1..20: mol_type = other DNA
gagggcccttggggctgtgt

SEQ ID NO: 16314 - DNA, 23 bp, synthetic construct
  source 1..23: mol_type = other DNA
cactctgtcaacggctgcaacct

SEQ ID NO: 16315 - DNA, 23 bp, synthetic construct
  source 1..23: mol_type = other DNA
agctgagggcccttggggctgtg

SEQ ID NO: 16316 - DNA, 21 bp, synthetic construct
  source 1..21: mol_type = other DNA
actctgtcaacggctgcaacc

SEQ ID NO: 16317 - DNA, 21 bp, synthetic construct
  source 1..21: mol_type = other DNA
ctgagggcccttggggctgtg

SEQ ID NO: 16318 - DNA, 20 bp, synthetic construct
  source 1..20: mol_type = other DNA
tgagggcccttggggctgtg

SEQ ID NO: 16319 - DNA, 20 bp, synthetic construct
  source 1..20: mol_type = other DNA
ctctgtcaacggctgcaacc

SEQ ID NO: 16320 - DNA, 23 bp, synthetic construct
  source 1..23: mol_type = other DNA
gagctgagggcccttggggctgt

SEQ ID NO: 16321 - DNA, 21 bp, synthetic construct
  source 1..21: mol_type = other DNA
gctgagggcccttggggctgt

SEQ ID NO: 16322 - DNA, 20 bp, synthetic construct
  source 1..20: mol_type = other DNA
actctgtcaacggctgcaac

SEQ ID NO: 16323 - DNA, 20 bp, synthetic construct
  source 1..20: mol_type = other DNA
ctgagggcccttggggctgt

SEQ ID NO: 16324 - DNA, 21 bp, synthetic construct
  source 1..21: mol_type = other DNA
agctgagggcccttggggctg

SEQ ID NO: 16325 - DNA, 20 bp, synthetic construct
  source 1..20: mol_type = other DNA
gctgagggcccttggggctg

SEQ ID NO: 16326 - DNA, 20 bp, synthetic construct
  source 1..20: mol_type = other DNA
cactctgtcaacggctgcaa

SEQ ID NO: 16327 - DNA, 23 bp, synthetic construct
  source 1..23: mol_type = other DNA
caccactctgtcaacggctgcaa

SEQ ID NO: 16328 - DNA, 20 bp, synthetic construct
  source 1..20: mol_type = other DNA
agctgagggcccttggggct

SEQ ID NO: 16329 - DNA, 20 bp, synthetic construct
  source 1..20: mol_type = other DNA
ccactctgtcaacggctgca

SEQ ID NO: 16330 - DNA, 20 bp, synthetic construct
  source 1..20: mol_type = other DNA
gagctgagggcccttggggc

SEQ ID NO: 16331 - DNA, 20 bp, synthetic construct
  source 1..20: mol_type = other DNA
accactctgtcaacggctgc

SEQ ID NO: 16332 - DNA, 20 bp, synthetic construct
  source 1..20: mol_type = other DNA
tgagctgagggcccttgggg

SEQ ID NO: 16333 - DNA, 20 bp, synthetic construct
  source 1..20: mol_type = other DNA
caccactctgtcaacggctg

SEQ ID NO: 16334 - DNA, 23 bp, synthetic construct
  source 1..23: mol_type = other DNA
actcaccactctgtcaacggctg

SEQ ID NO: 16335 - DNA, 21 bp, synthetic construct
  source 1..21: mol_type = other DNA
tcaccactctgtcaacggctg

SEQ ID NO: 16336 - DNA, 24 bp, synthetic construct
  source 1..24: mol_type = other DNA
tcactcaccactctgtcaacggct

SEQ ID NO: 16337 - DNA, 20 bp, synthetic construct
  source 1..20: mol_type = other DNA
tcaccactctgtcaacggct

SEQ ID NO: 16338 - DNA, 20 bp, synthetic construct
  source 1..20: mol_type = other DNA
ctgagctgagggcccttggg

SEQ ID NO: 16339 - DNA, 23 bp, synthetic construct
  source 1..23: mol_type = other DNA
cactcaccactctgtcaacggct

SEQ ID NO: 16340 - DNA, 22 bp, synthetic construct
  source 1..22: mol_type = other DNA
actcaccactctgtcaacggct

SEQ ID NO: 16341 - DNA, 21 bp, synthetic construct
  source 1..21: mol_type = other DNA
actcaccactctgtcaacggc

SEQ ID NO: 16342 - DNA, 20 bp, synthetic construct
  source 1..20: mol_type = other DNA
ctcaccactctgtcaacggc

SEQ ID NO: 16343 - DNA, 20 bp, synthetic construct
  source 1..20: mol_type = other DNA
gctgagctgagggcccttgg

SEQ ID NO: 16344 - DNA, 20 bp, synthetic construct
  source 1..20: mol_type = other DNA
actcaccactctgtcaacgg

SEQ ID NO: 16345 - DNA, 20 bp, synthetic construct
  source 1..20: mol_type = other DNA
ggctgagctgagggcccttg

SEQ ID NO: 16346 - DNA, 22 bp, synthetic construct
  source 1..22: mol_type = other DNA
tcactcaccactctgtcaacgg

SEQ ID NO: 16347 - DNA, 21 bp, synthetic construct
  source 1..21: mol_type = other DNA
gaggctgagctgagggccctt

SEQ ID NO: 16348 - DNA, 20 bp, synthetic construct
  source 1..20: mol_type = other DNA
aggctgagctgagggccctt

SEQ ID NO: 16349 - DNA, 20 bp, synthetic construct
  source 1..20: mol_type = other DNA
cactcaccactctgtcaacg

SEQ ID NO: 16350 - DNA, 23 bp, synthetic construct
  source 1..23: mol_type = other DNA
gctcactcaccactctgtcaacg

SEQ ID NO: 16351 - DNA, 23 bp, synthetic construct
  source 1..23: mol_type = other DNA
tcgaggctgagctgagggccctt

SEQ ID NO: 16352 - DNA, 23 bp, synthetic construct
  source 1..23: mol_type = other DNA
ctcgaggctgagctgagggccct

SEQ ID NO: 16353 - DNA, 21 bp, synthetic construct
  source 1..21: mol_type = other DNA
cgaggctgagctgagggccct

SEQ ID NO: 16354 - DNA, 20 bp, synthetic construct
  source 1..20: mol_type = other DNA
gaggctgagctgagggccct

SEQ ID NO: 16355 - DNA, 20 bp, synthetic construct
  source 1..20: mol_type = other DNA
tcactcaccactctgtcaac

SEQ ID NO: 16356 - DNA, 23 bp, synthetic construct
  source 1..23: mol_type = other DNA
tctcgaggctgagctgagggccc

SEQ ID NO: 16357 - DNA, 21 bp, synthetic construct
  source 1..21: mol_type = other DNA
tcgaggctgagctgagggccc

SEQ ID NO: 16358 - DNA, 20 bp, synthetic construct
  source 1..20: mol_type = other DNA
ctcactcaccactctgtcaa

SEQ ID NO: 16359 - DNA, 20 bp, synthetic construct
  source 1..20: mol_type = other DNA
cgaggctgagctgagggccc

SEQ ID NO: 16360 - DNA, 21 bp, synthetic construct
  source 1..21: mol_type = other DNA
ctcgaggctgagctgagggcc

SEQ ID NO: 16361 - DNA, 21 bp, synthetic construct
  source 1..21: mol_type = other DNA
agctcactcaccactctgtca

SEQ ID NO: 16362 - DNA, 20 bp, synthetic construct
  source 1..20: mol_type = other DNA
gctcactcaccactctgtca

SEQ ID NO: 16363 - DNA, 20 bp, synthetic construct
  source 1..20: mol_type = other DNA
tcgaggctgagctgagggcc

SEQ ID NO: 16364 - DNA, 23 bp, synthetic construct
  source 1..23: mol_type = other DNA
gcagctcactcaccactctgtca

SEQ ID NO: 16365 - DNA, 21 bp, synthetic construct
  source 1..21: mol_type = other DNA
cagctcactcaccactctgtc

SEQ ID NO: 16366 - DNA, 20 bp, synthetic construct
  source 1..20: mol_type = other DNA
agctcactcaccactctgtc

SEQ ID NO: 16367 - DNA, 20 bp, synthetic construct
  source 1..20: mol_type = other DNA
ctcgaggctgagctgagggc

SEQ ID NO: 16368 - DNA, 20 bp, synthetic construct
  source 1..20: mol_type = other DNA
cagctcactcaccactctgt

SEQ ID NO: 16369 - DNA, 20 bp, synthetic construct
  source 1..20: mol_type = other DNA
tctcgaggctgagctgaggg

SEQ ID NO: 16370 - DNA, 21 bp, synthetic construct
  source 1..21: mol_type = other DNA
gcagctcactcaccactctgt

SEQ ID NO: 16371 - DNA, 20 bp, synthetic construct
  source 1..20: mol_type = other DNA
gcagctcactcaccactctg

SEQ ID NO: 16372 - DNA, 20 bp, synthetic construct
  source 1..20: mol_type = other DNA
ttctcgaggctgagctgagg

SEQ ID NO: 16373 - DNA, 23 bp, synthetic construct
  source 1..23: mol_type = other DNA
gcagcagctcactcaccactctg

SEQ ID NO: 16374 - DNA, 21 bp, synthetic construct
  source 1..21: mol_type = other DNA
cagcagctcactcaccactct

SEQ ID NO: 16375 - DNA, 20 bp, synthetic construct
  source 1..20: mol_type = other DNA
cttctcgaggctgagctgag

SEQ ID NO: 16376 - DNA, 20 bp, synthetic construct
  source 1..20: mol_type = other DNA
agcagctcactcaccactct

SEQ ID NO: 16377 - DNA, 23 bp, synthetic construct
  source 1..23: mol_type = other DNA
tctcttctcgaggctgagctgag

SEQ ID NO: 16378 - DNA, 24 bp, synthetic construct
  source 1..24: mol_type = other DNA
aatctcttctcgaggctgagctga

SEQ ID NO: 16379 - DNA, 20 bp, synthetic construct
  source 1..20: mol_type = other DNA
tcttctcgaggctgagctga

SEQ ID NO: 16380 - DNA, 20 bp, synthetic construct
  source 1..20: mol_type = other DNA
cagcagctcactcaccactc

SEQ ID NO: 16381 - DNA, 23 bp, synthetic construct
  source 1..23: mol_type = other DNA
atctcttctcgaggctgagctga

SEQ ID NO: 16382 - DNA, 22 bp, synthetic construct
  source 1..22: mol_type = other DNA
tctcttctcgaggctgagctga

SEQ ID NO: 16383 - DNA, 24 bp, synthetic construct
  source 1..24: mol_type = other DNA
aaatctcttctcgaggctgagctg

SEQ ID NO: 16384 - DNA, 21 bp, synthetic construct
  source 1..21: mol_type = other DNA
tctcttctcgaggctgagctg

SEQ ID NO: 16385 - DNA, 20 bp, synthetic construct
  source 1..20: mol_type = other DNA
gcagcagctcactcaccact

SEQ ID NO: 16386 - DNA, 20 bp, synthetic construct
  source 1..20: mol_type = other DNA
ctcttctcgaggctgagctg

SEQ ID NO: 16387 - DNA, 23 bp, synthetic construct
  source 1..23: mol_type = other DNA
gctgcagcagctcactcaccact

SEQ ID NO: 16388 - DNA, 23 bp, synthetic construct
  source 1..23: mol_type = other DNA
aatctcttctcgaggctgagctg

SEQ ID NO: 16389 - DNA, 23 bp, synthetic construct
  source 1..23: mol_type = other DNA
aaatctcttctcgaggctgagct

SEQ ID NO: 16390 - DNA, 21 bp, synthetic construct
  source 1..21: mol_type = other DNA
atctcttctcgaggctgagct

SEQ ID NO: 16391 - DNA, 20 bp, synthetic construct
  source 1..20: mol_type = other DNA
tctcttctcgaggctgagct

SEQ ID NO: 16392 - DNA, 20 bp, synthetic construct
  source 1..20: mol_type = other DNA
tgcagcagctcactcaccac

SEQ ID NO: 16393 - DNA, 21 bp, synthetic construct
  source 1..21: mol_type = other DNA
aatctcttctcgaggctgagc

SEQ ID NO: 16394 - DNA, 20 bp, synthetic construct
  source 1..20: mol_type = other DNA
atctcttctcgaggctgagc

SEQ ID NO: 16395 - DNA, 20 bp, synthetic construct
  source 1..20: mol_type = other DNA
ctgcagcagctcactcacca

SEQ ID NO: 16396 - DNA, 23 bp, synthetic construct
  source 1..23: mol_type = other DNA
tgaaatctcttctcgaggctgag

SEQ ID NO: 16397 - DNA, 21 bp, synthetic construct
  source 1..21: mol_type = other DNA
aaatctcttctcgaggctgag

SEQ ID NO: 16398 - DNA, 20 bp, synthetic construct
  source 1..20: mol_type = other DNA
aatctcttctcgaggctgag

SEQ ID NO: 16399 - DNA, 20 bp, synthetic construct
  source 1..20: mol_type = other DNA
gctgcagcagctcactcacc

SEQ ID NO: 16400 - DNA, 21 bp, synthetic construct
  source 1..21: mol_type = other DNA
gaaatctcttctcgaggctga

SEQ ID NO: 16401 - DNA, 20 bp, synthetic construct
  source 1..20: mol_type = other DNA
tgctgcagcagctcactcac

SEQ ID NO: 16402 - DNA, 20 bp, synthetic construct
  source 1..20: mol_type = other DNA
aaatctcttctcgaggctga

SEQ ID NO: 16403 - DNA, 23 bp, synthetic construct
  source 1..23: mol_type = other DNA
cgatgctgcagcagctcactcac

SEQ ID NO: 16404 - DNA, 20 bp, synthetic construct
  source 1..20: mol_type = other DNA
gaaatctcttctcgaggctg

SEQ ID NO: 16405 - DNA, 20 bp, synthetic construct
  source 1..20: mol_type = other DNA
atgctgcagcagctcactca

SEQ ID NO: 16406 - DNA, 22 bp, synthetic construct
  source 1..22: mol_type = other DNA
cgatgctgcagcagctcactca

SEQ ID NO: 16407 - DNA, 20 bp, synthetic construct
  source 1..20: mol_type = other DNA
tgaaatctcttctcgaggct

SEQ ID NO: 16408 - DNA, 20 bp, synthetic construct
  source 1..20: mol_type = other DNA
gatgctgcagcagctcactc

SEQ ID NO: 16409 - DNA, 23 bp, synthetic construct
  source 1..23: mol_type = other DNA
gacgatgctgcagcagctcactc

SEQ ID NO: 16410 - DNA, 21 bp, synthetic construct
  source 1..21: mol_type = other DNA
cgatgctgcagcagctcactc

SEQ ID NO: 16411 - DNA, 21 bp, synthetic construct
  source 1..21: mol_type = other DNA
cctgaaatctcttctcgaggc

SEQ ID NO: 16412 - DNA, 20 bp, synthetic construct
  source 1..20: mol_type = other DNA
ctgaaatctcttctcgaggc

SEQ ID NO: 16413 - DNA, 20 bp, synthetic construct
  source 1..20: mol_type = other DNA
cgatgctgcagcagctcact

SEQ ID NO: 16414 - DNA, 23 bp, synthetic construct
  source 1..23: mol_type = other DNA
ggcctgaaatctcttctcgaggc

SEQ ID NO: 16415 - DNA, 23 bp, synthetic construct
  source 1..23: mol_type = other DNA
gggcctgaaatctcttctcgagg

SEQ ID NO: 16416 - DNA, 21 bp, synthetic construct
  source 1..21: mol_type = other DNA
gcctgaaatctcttctcgagg

SEQ ID NO: 16417 - DNA, 20 bp, synthetic construct
  source 1..20: mol_type = other DNA
cctgaaatctcttctcgagg

SEQ ID NO: 16418 - DNA, 20 bp, synthetic construct
  source 1..20: mol_type = other DNA
acgatgctgcagcagctcac

SEQ ID NO: 16419 - DNA, 23 bp, synthetic construct
  source 1..23: mol_type = other DNA
tggacgatgctgcagcagctcac

SEQ ID NO: 16420 - DNA, 22 bp, synthetic construct
  source 1..22: mol_type = other DNA
ggacgatgctgcagcagctcac

SEQ ID NO: 16421 - DNA, 24 bp, synthetic construct
  source 1..24: mol_type = other DNA
actggacgatgctgcagcagctca

SEQ ID NO: 16422 - DNA, 21 bp, synthetic construct
  source 1..21: mol_type = other DNA
ggcctgaaatctcttctcgag

SEQ ID NO: 16423 - DNA, 20 bp, synthetic construct
  source 1..20: mol_type = other DNA
gacgatgctgcagcagctca

SEQ ID NO: 16424 - DNA, 20 bp, synthetic construct
  source 1..20: mol_type = other DNA
gcctgaaatctcttctcgag

SEQ ID NO: 16425 - DNA, 23 bp, synthetic construct
  source 1..23: mol_type = other DNA
ctggacgatgctgcagcagctca

SEQ ID NO: 16426 - DNA, 20 bp, synthetic construct
  source 1..20: mol_type = other DNA
ggcctgaaatctcttctcga

SEQ ID NO: 16427 - DNA, 20 bp, synthetic construct
  source 1..20: mol_type = other DNA
ggacgatgctgcagcagctc

SEQ ID NO: 16428 - DNA, 20 bp, synthetic construct
  source 1..20: mol_type = other DNA
gggcctgaaatctcttctcg

SEQ ID NO: 16429 - DNA, 20 bp, synthetic construct
  source 1..20: mol_type = other DNA
tggacgatgctgcagcagct

SEQ ID NO: 16430 - DNA, 23 bp, synthetic construct
  source 1..23: mol_type = other DNA
tactggacgatgctgcagcagct

SEQ ID NO: 16431 - DNA, 21 bp, synthetic construct
  source 1..21: mol_type = other DNA
tcgggcctgaaatctcttctc

SEQ ID NO: 16432 - DNA, 20 bp, synthetic construct
  source 1..20: mol_type = other DNA
cgggcctgaaatctcttctc

SEQ ID NO: 16433 - DNA, 20 bp, synthetic construct
  source 1..20: mol_type = other DNA
ctggacgatgctgcagcagc

SEQ ID NO: 16434 - DNA, 23 bp, synthetic construct
  source 1..23: mol_type = other DNA
cctcgggcctgaaatctcttctc

SEQ ID NO: 16435 - DNA, 21 bp, synthetic construct
  source 1..21: mol_type = other DNA
ctcgggcctgaaatctcttct

SEQ ID NO: 16436 - DNA, 20 bp, synthetic construct
  source 1..20: mol_type = other DNA
tcgggcctgaaatctcttct

SEQ ID NO: 16437 - DNA, 20 bp, synthetic construct
  source 1..20: mol_type = other DNA
actggacgatgctgcagcag

SEQ ID NO: 16438 - DNA, 23 bp, synthetic construct
  source 1..23: mol_type = other DNA
tgtactggacgatgctgcagcag

SEQ ID NO: 16439 - DNA, 21 bp, synthetic construct
  source 1..21: mol_type = other DNA
tactggacgatgctgcagcag

SEQ ID NO: 16440 - DNA, 23 bp, synthetic construct
  source 1..23: mol_type = other DNA
cacctcgggcctgaaatctcttc

SEQ ID NO: 16441 - DNA, 21 bp, synthetic construct
  source 1..21: mol_type = other DNA
cctcgggcctgaaatctcttc

SEQ ID NO: 16442 - DNA, 20 bp, synthetic construct
  source 1..20: mol_type = other DNA
ctcgggcctgaaatctcttc

SEQ ID NO: 16443 - DNA, 20 bp, synthetic construct
  source 1..20: mol_type = other DNA
tactggacgatgctgcagca

SEQ ID NO: 16444 - DNA, 21 bp, synthetic construct
  source 1..21: mol_type = other DNA
acctcgggcctgaaatctctt

SEQ ID NO: 16445 - DNA, 20 bp, synthetic construct
  source 1..20: mol_type = other DNA
gtactggacgatgctgcagc

SEQ ID NO: 16446 - DNA, 20 bp, synthetic construct
  source 1..20: mol_type = other DNA
cctcgggcctgaaatctctt

SEQ ID NO: 16447 - DNA, 23 bp, synthetic construct
  source 1..23: mol_type = other DNA
catgtactggacgatgctgcagc

SEQ ID NO: 16448 - DNA, 20 bp, synthetic construct
  source 1..20: mol_type = other DNA
tgtactggacgatgctgcag

SEQ ID NO: 16449 - DNA, 20 bp, synthetic construct
  source 1..20: mol_type = other DNA
acctcgggcctgaaatctct

SEQ ID NO: 16450 - DNA, 21 bp, synthetic construct
  source 1..21: mol_type = other DNA
catgtactggacgatgctgca

SEQ ID NO: 16451 - DNA, 20 bp, synthetic construct
  source 1..20: mol_type = other DNA
atgtactggacgatgctgca

SEQ ID NO: 16452 - DNA, 20 bp, synthetic construct
  source 1..20: mol_type = other DNA
cacctcgggcctgaaatctc

SEQ ID NO: 16453 - DNA, 23 bp, synthetic construct
  source 1..23: mol_type = other DNA
tacatgtactggacgatgctgca

SEQ ID NO: 16454 - DNA, 23 bp, synthetic construct
  source 1..23: mol_type = other DNA
acccacctcgggcctgaaatctc

SEQ ID NO: 16455 - DNA, 21 bp, synthetic construct
  source 1..21: mol_type = other DNA
acatgtactggacgatgctgc

SEQ ID NO: 16456 - DNA, 20 bp, synthetic construct
  source 1..20: mol_type = other DNA
catgtactggacgatgctgc

SEQ ID NO: 16457 - DNA, 20 bp, synthetic construct
  source 1..20: mol_type = other DNA
ccacctcgggcctgaaatct

SEQ ID NO: 16458 - DNA, 20 bp, synthetic construct
  source 1..20: mol_type = other DNA
acatgtactggacgatgctg

SEQ ID NO: 16459 - DNA, 20 bp, synthetic construct
  source 1..20: mol_type = other DNA
cccacctcgggcctgaaatc

SEQ ID NO: 16460 - DNA, 23 bp, synthetic construct
  source 1..23: mol_type = other DNA
acacccacctcgggcctgaaatc

SEQ ID NO: 16461 - DNA, 21 bp, synthetic construct
  source 1..21: mol_type = other DNA
gtacatgtactggacgatgct

SEQ ID NO: 16462 - DNA, 20 bp, synthetic construct
  source 1..20: mol_type = other DNA
tacatgtactggacgatgct

SEQ ID NO: 16463 - DNA, 20 bp, synthetic construct
  source 1..20: mol_type = other DNA
acccacctcgggcctgaaat

SEQ ID NO: 16464 - DNA, 23 bp, synthetic construct
  source 1..23: mol_type = other DNA
cagtacatgtactggacgatgct

SEQ ID NO: 16465 - DNA, 21 bp, synthetic construct
  source 1..21: mol_type = other DNA
agtacatgtactggacgatgc

SEQ ID NO: 16466 - DNA, 20 bp, synthetic construct
  source 1..20: mol_type = other DNA
gtacatgtactggacgatgc

SEQ ID NO: 16467 - DNA, 20 bp, synthetic construct
  source 1..20: mol_type = other DNA
cacccacctcgggcctgaaa

SEQ ID NO: 16468 - DNA, 20 bp, synthetic construct
  source 1..20: mol_type = other DNA
agtacatgtactggacgatg

SEQ ID NO: 16469 - DNA, 20 bp, synthetic construct
  source 1..20: mol_type = other DNA
acacccacctcgggcctgaa

SEQ ID NO: 16470 - DNA, 23 bp, synthetic construct
  source 1..23: mol_type = other DNA
gatacacccacctcgggcctgaa

SEQ ID NO: 16471 - DNA, 20 bp, synthetic construct
  source 1..20: mol_type = other DNA
cagtacatgtactggacgat

SEQ ID NO: 16472 - DNA, 20 bp, synthetic construct
  source 1..20: mol_type = other DNA
tacacccacctcgggcctga

SEQ ID NO: 16473 - DNA, 23 bp, synthetic construct
  source 1..23: mol_type = other DNA
ctgcagtacatgtactggacgat

SEQ ID NO: 16474 - DNA, 20 bp, synthetic construct
  source 1..20: mol_type = other DNA
gcagtacatgtactggacga

SEQ ID NO: 16475 - DNA, 20 bp, synthetic construct
  source 1..20: mol_type = other DNA
atacacccacctcgggcctg

SEQ ID NO: 16476 - DNA, 23 bp, synthetic construct
  source 1..23: mol_type = other DNA
gagatacacccacctcgggcctg

SEQ ID NO: 16477 - DNA, 22 bp, synthetic construct
  source 1..22: mol_type = other DNA
agatacacccacctcgggcctg

SEQ ID NO: 16478 - DNA, 21 bp, synthetic construct
  source 1..21: mol_type = other DNA
gatacacccacctcgggcctg

SEQ ID NO: 16479 - DNA, 20 bp, synthetic construct
  source 1..20: mol_type = other DNA
tgcagtacatgtactggacg

SEQ ID NO: 16480 - DNA, 20 bp, synthetic construct
  source 1..20: mol_type = other DNA
gatacacccacctcgggcct

SEQ ID NO: 16481 - DNA, 22 bp, synthetic construct
  source 1..22: mol_type = other DNA
gagatacacccacctcgggcct

SEQ ID NO: 16482 - DNA, 21 bp, synthetic construct
  source 1..21: mol_type = other DNA
agatacacccacctcgggcct

SEQ ID NO: 16483 - DNA, 21 bp, synthetic construct
  source 1..21: mol_type = other DNA
gagatacacccacctcgggcc

SEQ ID NO: 16484 - DNA, 20 bp, synthetic construct
  source 1..20: mol_type = other DNA
agatacacccacctcgggcc

SEQ ID NO: 16485 - DNA, 20 bp, synthetic construct
  source 1..20: mol_type = other DNA
ctgcagtacatgtactggac

SEQ ID NO: 16486 - DNA, 23 bp, synthetic construct
  source 1..23: mol_type = other DNA
tgcctgcagtacatgtactggac

SEQ ID NO: 16487 - DNA, 22 bp, synthetic construct
  source 1..22: mol_type = other DNA
tgagatacacccacctcgggcc

SEQ ID NO: 16488 - DNA, 23 bp, synthetic construct
  source 1..23: mol_type = other DNA
tgtgagatacacccacctcgggc

SEQ ID NO: 16489 - DNA, 21 bp, synthetic construct
  source 1..21: mol_type = other DNA
tgagatacacccacctcgggc

SEQ ID NO: 16490 - DNA, 20 bp, synthetic construct
  source 1..20: mol_type = other DNA
gagatacacccacctcgggc

SEQ ID NO: 16491 - DNA, 20 bp, synthetic construct
  source 1..20: mol_type = other DNA
cctgcagtacatgtactgga

SEQ ID NO: 16492 - DNA, 22 bp, synthetic construct
  source 1..22: mol_type = other DNA
gtgagatacacccacctcgggc

SEQ ID NO: 16493 - DNA, 21 bp, synthetic construct
  source 1..21: mol_type = other DNA
gtgagatacacccacctcggg

SEQ ID NO: 16494 - DNA, 20 bp, synthetic construct
  source 1..20: mol_type = other DNA
gcctgcagtacatgtactgg

SEQ ID NO: 16495 - DNA, 20 bp, synthetic construct
  source 1..20: mol_type = other DNA
tgagatacacccacctcggg

SEQ ID NO: 16496 - DNA, 21 bp, synthetic construct
  source 1..21: mol_type = other DNA
tgcctgcagtacatgtactgg

SEQ ID NO: 16497 - DNA, 21 bp, synthetic construct
  source 1..21: mol_type = other DNA
ttgcctgcagtacatgtactg

SEQ ID NO: 16498 - DNA, 20 bp, synthetic construct
  source 1..20: mol_type = other DNA
tgcctgcagtacatgtactg

SEQ ID NO: 16499 - DNA, 20 bp, synthetic construct
  source 1..20: mol_type = other DNA
gtgagatacacccacctcgg

SEQ ID NO: 16500 - DNA, 20 bp, synthetic construct
  source 1..20: mol_type = other DNA
ttgcctgcagtacatgtact

SEQ ID NO: 16501 - DNA, 20 bp, synthetic construct
  source 1..20: mol_type = other DNA
tgtgagatacacccacctcg

SEQ ID NO: 16502 - DNA, 20 bp, synthetic construct
  source 1..20: mol_type = other DNA
attgcctgcagtacatgtac

SEQ ID NO: 16503 - DNA, 23 bp, synthetic construct
  source 1..23: mol_type = other DNA
tccattgcctgcagtacatgtac

SEQ ID NO: 16504 - DNA, 20 bp, synthetic construct
  source 1..20: mol_type = other DNA
atatacgggaggcttagatg

SEQ ID NO: 16505 - DNA, 22 bp, synthetic construct
  source 1..22: mol_type = other DNA
ccatatacgggaggcttagatg

SEQ ID NO: 16506 - DNA, 21 bp, synthetic construct
  source 1..21: mol_type = other DNA
catatacgggaggcttagatg

SEQ ID NO: 16507 - DNA, 24 bp, synthetic construct
  source 1..24: mol_type = other DNA
ttttttttctggtgttattccatc

SEQ ID NO: 16508 - DNA, 21 bp, synthetic construct
  source 1..21: mol_type = other DNA
tttttctggtgttattccatc

SEQ ID NO: 16509 - DNA, 20 bp, synthetic construct
  source 1..20: mol_type = other DNA
catatacgggaggcttagat

SEQ ID NO: 16510 - DNA, 20 bp, synthetic construct
  source 1..20: mol_type = other DNA
ttttctggtgttattccatc

SEQ ID NO: 16511 - DNA, 23 bp, synthetic construct
  source 1..23: mol_type = other DNA
tttttttctggtgttattccatc

SEQ ID NO: 16512 - DNA, 23 bp, synthetic construct
  source 1..23: mol_type = other DNA
gcaccatatacgggaggcttaga

SEQ ID NO: 16513 - DNA, 21 bp, synthetic construct
  source 1..21: mol_type = other DNA
ttttttctggtgttattccat

SEQ ID NO: 16514 - DNA, 21 bp, synthetic construct
  source 1..21: mol_type = other DNA
accatatacgggaggcttaga

SEQ ID NO: 16515 - DNA, 20 bp, synthetic construct
  source 1..20: mol_type = other DNA
ccatatacgggaggcttaga

SEQ ID NO: 16516 - DNA, 20 bp, synthetic construct
  source 1..20: mol_type = other DNA
tttttctggtgttattccat

SEQ ID NO: 16517 - DNA, 23 bp, synthetic construct
  source 1..23: mol_type = other DNA
ggcaccatatacgggaggcttag

SEQ ID NO: 16518 - DNA, 21 bp, synthetic construct
  source 1..21: mol_type = other DNA
tttttttctggtgttattcca

SEQ ID NO: 16519 - DNA, 21 bp, synthetic construct
  source 1..21: mol_type = other DNA
caccatatacgggaggcttag

SEQ ID NO: 16520 - DNA, 20 bp, synthetic construct
  source 1..20: mol_type = other DNA
accatatacgggaggcttag

SEQ ID NO: 16521 - DNA, 20 bp, synthetic construct
  source 1..20: mol_type = other DNA
ttttttctggtgttattcca

SEQ ID NO: 16522 - DNA, 21 bp, synthetic construct
  source 1..21: mol_type = other DNA
gcaccatatacgggaggctta

SEQ ID NO: 16523 - DNA, 20 bp, synthetic construct
  source 1..20: mol_type = other DNA
tttttttctggtgttattcc

SEQ ID NO: 16524 - DNA, 20 bp, synthetic construct
  source 1..20: mol_type = other DNA
caccatatacgggaggctta

SEQ ID NO: 16525 - DNA, 20 bp, synthetic construct
  source 1..20: mol_type = other DNA
gcaccatatacgggaggctt

SEQ ID NO: 16526 - DNA, 20 bp, synthetic construct
  source 1..20: mol_type = other DNA
ttttttttctggtgttattc

SEQ ID NO: 16527 - DNA, 20 bp, synthetic construct
  source 1..20: mol_type = other DNA
ggcaccatatacgggaggct

SEQ ID NO: 16528 - DNA, 20 bp, synthetic construct
  source 1..20: mol_type = other DNA
tttttttttctggtgttatt

SEQ ID NO: 16529 - DNA, 23 bp, synthetic construct
  source 1..23: mol_type = other DNA
ttttttttttttctggtgttatt

SEQ ID NO: 16530 - DNA, 21 bp, synthetic construct
  source 1..21: mol_type = other DNA
caggcaccatatacgggaggc

SEQ ID NO: 16531 - DNA, 20 bp, synthetic construct
  source 1..20: mol_type = other DNA
ttttttttttctggtgttat

SEQ ID NO: 16532 - DNA, 20 bp, synthetic construct
  source 1..20: mol_type = other DNA
aggcaccatatacgggaggc

SEQ ID NO: 16533 - DNA, 21 bp, synthetic construct
  source 1..21: mol_type = other DNA
gcaggcaccatatacgggagg

SEQ ID NO: 16534 - DNA, 20 bp, synthetic construct
  source 1..20: mol_type = other DNA
tttttttttttctggtgtta

SEQ ID NO: 16535 - DNA, 20 bp, synthetic construct
  source 1..20: mol_type = other DNA
caggcaccatatacgggagg

SEQ ID NO: 16536 - DNA, 20 bp, synthetic construct
  source 1..20: mol_type = other DNA
ttttttttttttctggtgtt

SEQ ID NO: 16537 - DNA, 20 bp, synthetic construct
  source 1..20: mol_type = other DNA
gcaggcaccatatacgggag

SEQ ID NO: 16538 - DNA, 23 bp, synthetic construct
  source 1..23: mol_type = other DNA
gttttttttttttttctggtgtt

SEQ ID NO: 16539 - DNA, 24 bp, synthetic construct
  source 1..24: mol_type = other DNA
ccgttttttttttttttctggtgt

SEQ ID NO: 16540 - DNA, 20 bp, synthetic construct
  source 1..20: mol_type = other DNA
tgcaggcaccatatacggga

SEQ ID NO: 16541 - DNA, 20 bp, synthetic construct
  source 1..20: mol_type = other DNA
tttttttttttttctggtgt

SEQ ID NO: 16542 - DNA, 23 bp, synthetic construct
  source 1..23: mol_type = other DNA
cgttttttttttttttctggtgt

SEQ ID NO: 16543 - DNA, 20 bp, synthetic construct
  source 1..20: mol_type = other DNA
ttgcaggcaccatatacggg

SEQ ID NO: 16544 - DNA, 20 bp, synthetic construct
  source 1..20: mol_type = other DNA
ttttttttttttttctggtg

SEQ ID NO: 16545 - DNA, 22 bp, synthetic construct
  source 1..22: mol_type = other DNA
cgttttttttttttttctggtg

SEQ ID NO: 16546 - DNA, 21 bp, synthetic construct
  source 1..21: mol_type = other DNA
gcttgcaggcaccatatacgg

SEQ ID NO: 16547 - DNA, 20 bp, synthetic construct
  source 1..20: mol_type = other DNA
cttgcaggcaccatatacgg

SEQ ID NO: 16548 - DNA, 20 bp, synthetic construct
  source 1..20: mol_type = other DNA
gttttttttttttttctggt

SEQ ID NO: 16549 - DNA, 23 bp, synthetic construct
  source 1..23: mol_type = other DNA
gagcttgcaggcaccatatacgg

SEQ ID NO: 16550 - DNA, 24 bp, synthetic construct
  source 1..24: mol_type = other DNA
gcaccgttttttttttttttctgg

SEQ ID NO: 16551 - DNA, 21 bp, synthetic construct
  source 1..21: mol_type = other DNA
agcttgcaggcaccatatacg

SEQ ID NO: 16552 - DNA, 20 bp, synthetic construct
  source 1..20: mol_type = other DNA
cgttttttttttttttctgg

SEQ ID NO: 16553 - DNA, 20 bp, synthetic construct
  source 1..20: mol_type = other DNA
gcttgcaggcaccatatacg

SEQ ID NO: 16554 - DNA, 24 bp, synthetic construct
  source 1..24: mol_type = other DNA
aagagcttgcaggcaccatatacg

SEQ ID NO: 16555 - DNA, 23 bp, synthetic construct
  source 1..23: mol_type = other DNA
aagagcttgcaggcaccatatac

SEQ ID NO: 16556 - DNA, 21 bp, synthetic construct
  source 1..21: mol_type = other DNA
gagcttgcaggcaccatatac

SEQ ID NO: 16557 - DNA, 20 bp, synthetic construct
  source 1..20: mol_type = other DNA
ccgttttttttttttttctg

SEQ ID NO: 16558 - DNA, 20 bp, synthetic construct
  source 1..20: mol_type = other DNA
agcttgcaggcaccatatac

SEQ ID NO: 16559 - DNA, 22 bp, synthetic construct
  source 1..22: mol_type = other DNA
caccgttttttttttttttctg

SEQ ID NO: 16560 - DNA, 23 bp, synthetic construct
  source 1..23: mol_type = other DNA
caagagcttgcaggcaccatata

SEQ ID NO: 16561 - DNA, 21 bp, synthetic construct
  source 1..21: mol_type = other DNA
agagcttgcaggcaccatata

SEQ ID NO: 16562 - DNA, 20 bp, synthetic construct
  source 1..20: mol_type = other DNA
gagcttgcaggcaccatata

SEQ ID NO: 16563 - DNA, 20 bp, synthetic construct
  source 1..20: mol_type = other DNA
accgttttttttttttttct

SEQ ID NO: 16564 - DNA, 24 bp, synthetic construct
  source 1..24: mol_type = other DNA
acagcaccgttttttttttttttc

SEQ ID NO: 16565 - DNA, 23 bp, synthetic construct
  source 1..23: mol_type = other DNA
ccaagagcttgcaggcaccatat

SEQ ID NO: 16566 - DNA, 21 bp, synthetic construct
  source 1..21: mol_type = other DNA
aagagcttgcaggcaccatat

SEQ ID NO: 16567 - DNA, 20 bp, synthetic construct
  source 1..20: mol_type = other DNA
caccgttttttttttttttc

SEQ ID NO: 16568 - DNA, 20 bp, synthetic construct
  source 1..20: mol_type = other DNA
agagcttgcaggcaccatat

SEQ ID NO: 16569 - DNA, 21 bp, synthetic construct
  source 1..21: mol_type = other DNA
caagagcttgcaggcaccata

SEQ ID NO: 16570 - DNA, 21 bp, synthetic construct
  source 1..21: mol_type = other DNA
agcaccgtttttttttttttt

SEQ ID NO: 16571 - DNA, 20 bp, synthetic construct
  source 1..20: mol_type = other DNA
gcaccgtttttttttttttt

SEQ ID NO: 16572 - DNA, 20 bp, synthetic construct
  source 1..20: mol_type = other DNA
aagagcttgcaggcaccata

SEQ ID NO: 16573 - DNA, 21 bp, synthetic construct
  source 1..21: mol_type = other DNA
cagcaccgttttttttttttt

SEQ ID NO: 16574 - DNA, 20 bp, synthetic construct
  source 1..20: mol_type = other DNA
agcaccgttttttttttttt

SEQ ID NO: 16575 - DNA, 20 bp, synthetic construct
  source 1..20: mol_type = other DNA
caagagcttgcaggcaccat

SEQ ID NO: 16576 - DNA, 20 bp, synthetic construct
  source 1..20: mol_type = other DNA
cagcaccgtttttttttttt

SEQ ID NO: 16577 - DNA, 20 bp, synthetic construct
  source 1..20: mol_type = other DNA
ccaagagcttgcaggcacca

SEQ ID NO: 16578 - DNA, 23 bp, synthetic construct
  source 1..23: mol_type = other DNA
tgtccaagagcttgcaggcacca

SEQ ID NO: 16579 - DNA, 20 bp, synthetic construct
  source 1..20: mol_type = other DNA
acagcaccgttttttttttt

SEQ ID NO: 16580 - DNA, 20 bp, synthetic construct
  source 1..20: mol_type = other DNA
tccaagagcttgcaggcacc

SEQ ID NO: 16581 - DNA, 20 bp, synthetic construct
  source 1..20: mol_type = other DNA
cacagcaccgtttttttttt

SEQ ID NO: 16582 - DNA, 20 bp, synthetic construct
  source 1..20: mol_type = other DNA
gtccaagagcttgcaggcac

SEQ ID NO: 16583 - DNA, 23 bp, synthetic construct
  source 1..23: mol_type = other DNA
actcacagcaccgtttttttttt

SEQ ID NO: 16584 - DNA, 20 bp, synthetic construct
  source 1..20: mol_type = other DNA
tcacagcaccgttttttttt

SEQ ID NO: 16585 - DNA, 20 bp, synthetic construct
  source 1..20: mol_type = other DNA
tgtccaagagcttgcaggca

SEQ ID NO: 16586 - DNA, 23 bp, synthetic construct
  source 1..23: mol_type = other DNA
ccatgtccaagagcttgcaggca

SEQ ID NO: 16587 - DNA, 20 bp, synthetic construct
  source 1..20: mol_type = other DNA
ctcacagcaccgtttttttt

SEQ ID NO: 16588 - DNA, 20 bp, synthetic construct
  source 1..20: mol_type = other DNA
atgtccaagagcttgcaggc

SEQ ID NO: 16589 - DNA, 20 bp, synthetic construct
  source 1..20: mol_type = other DNA
actcacagcaccgttttttt

SEQ ID NO: 16590 - DNA, 20 bp, synthetic construct
  source 1..20: mol_type = other DNA
catgtccaagagcttgcagg

SEQ ID NO: 16591 - DNA, 20 bp, synthetic construct
  source 1..20: mol_type = other DNA
cactcacagcaccgtttttt

SEQ ID NO: 16592 - DNA, 20 bp, synthetic construct
  source 1..20: mol_type = other DNA
ccatgtccaagagcttgcag

SEQ ID NO: 16593 - DNA, 23 bp, synthetic construct
  source 1..23: mol_type = other DNA
gctccatgtccaagagcttgcag

SEQ ID NO: 16594 - DNA, 22 bp, synthetic construct
  source 1..22: mol_type = other DNA
ctccatgtccaagagcttgcag

SEQ ID NO: 16595 - DNA, 24 bp, synthetic construct
  source 1..24: mol_type = other DNA
cagctccatgtccaagagcttgca

SEQ ID NO: 16596 - DNA, 20 bp, synthetic construct
  source 1..20: mol_type = other DNA
tccatgtccaagagcttgca

SEQ ID NO: 16597 - DNA, 20 bp, synthetic construct
  source 1..20: mol_type = other DNA
tcactcacagcaccgttttt

SEQ ID NO: 16598 - DNA, 23 bp, synthetic construct
  source 1..23: mol_type = other DNA
agctccatgtccaagagcttgca

SEQ ID NO: 16599 - DNA, 20 bp, synthetic construct
  source 1..20: mol_type = other DNA
ctccatgtccaagagcttgc

SEQ ID NO: 16600 - DNA, 20 bp, synthetic construct
  source 1..20: mol_type = other DNA
ctcactcacagcaccgtttt

SEQ ID NO: 16601 - DNA, 22 bp, synthetic construct
  source 1..22: mol_type = other DNA
agctccatgtccaagagcttgc

SEQ ID NO: 16602 - DNA, 21 bp, synthetic construct
  source 1..21: mol_type = other DNA
agctccatgtccaagagcttg

SEQ ID NO: 16603 - DNA, 20 bp, synthetic construct
  source 1..20: mol_type = other DNA
gctccatgtccaagagcttg

SEQ ID NO: 16604 - DNA, 20 bp, synthetic construct
  source 1..20: mol_type = other DNA
cctcactcacagcaccgttt

SEQ ID NO: 16605 - DNA, 23 bp, synthetic construct
  source 1..23: mol_type = other DNA
ccagctccatgtccaagagcttg

SEQ ID NO: 16606 - DNA, 21 bp, synthetic construct
  source 1..21: mol_type = other DNA
cagctccatgtccaagagctt

SEQ ID NO: 16607 - DNA, 20 bp, synthetic construct
  source 1..20: mol_type = other DNA
gcctcactcacagcaccgtt

SEQ ID NO: 16608 - DNA, 20 bp, synthetic construct
  source 1..20: mol_type = other DNA
agctccatgtccaagagctt

SEQ ID NO: 16609 - DNA, 23 bp, synthetic construct
  source 1..23: mol_type = other DNA
tccagctccatgtccaagagctt

SEQ ID NO: 16610 - DNA, 21 bp, synthetic construct
  source 1..21: mol_type = other DNA
ccagctccatgtccaagagct

SEQ ID NO: 16611 - DNA, 20 bp, synthetic construct
  source 1..20: mol_type = other DNA
cagctccatgtccaagagct

SEQ ID NO: 16612 - DNA, 20 bp, synthetic construct
  source 1..20: mol_type = other DNA
ggcctcactcacagcaccgt

SEQ ID NO: 16613 - DNA, 20 bp, synthetic construct
  source 1..20: mol_type = other DNA
ccagctccatgtccaagagc

SEQ ID NO: 16614 - DNA, 20 bp, synthetic construct
  source 1..20: mol_type = other DNA
tggcctcactcacagcaccg

SEQ ID NO: 16615 - DNA, 20 bp, synthetic construct
  source 1..20: mol_type = other DNA
gtggcctcactcacagcacc

SEQ ID NO: 16616 - DNA, 20 bp, synthetic construct
  source 1..20: mol_type = other DNA
tccagctccatgtccaagag

SEQ ID NO: 16617 - DNA, 23 bp, synthetic construct
  source 1..23: mol_type = other DNA
atttccagctccatgtccaagag

SEQ ID NO: 16618 - DNA, 20 bp, synthetic construct
  source 1..20: mol_type = other DNA
tgtggcctcactcacagcac

SEQ ID NO: 16619 - DNA, 20 bp, synthetic construct
  source 1..20: mol_type = other DNA
ttccagctccatgtccaaga

SEQ ID NO: 16620 - DNA, 20 bp, synthetic construct
  source 1..20: mol_type = other DNA
ctgtggcctcactcacagca

SEQ ID NO: 16621 - DNA, 20 bp, synthetic construct
  source 1..20: mol_type = other DNA
tttccagctccatgtccaag

SEQ ID NO: 16622 - DNA, 22 bp, synthetic construct
  source 1..22: mol_type = other DNA
ttctgtggcctcactcacagca

SEQ ID NO: 16623 - DNA, 20 bp, synthetic construct
  source 1..20: mol_type = other DNA
atttccagctccatgtccaa

SEQ ID NO: 16624 - DNA, 20 bp, synthetic construct
  source 1..20: mol_type = other DNA
tctgtggcctcactcacagc

SEQ ID NO: 16625 - DNA, 21 bp, synthetic construct
  source 1..21: mol_type = other DNA
ttctgtggcctcactcacagc

SEQ ID NO: 16626 - DNA, 24 bp, synthetic construct
  source 1..24: mol_type = other DNA
agagttctgtggcctcactcacag

SEQ ID NO: 16627 - DNA, 21 bp, synthetic construct
  source 1..21: mol_type = other DNA
ccatttccagctccatgtcca

SEQ ID NO: 16628 - DNA, 20 bp, synthetic construct
  source 1..20: mol_type = other DNA
catttccagctccatgtcca

SEQ ID NO: 16629 - DNA, 20 bp, synthetic construct
  source 1..20: mol_type = other DNA
ttctgtggcctcactcacag

SEQ ID NO: 16630 - DNA, 23 bp, synthetic construct
  source 1..23: mol_type = other DNA
taccatttccagctccatgtcca

SEQ ID NO: 16631 - DNA, 23 bp, synthetic construct
  source 1..23: mol_type = other DNA
ttaccatttccagctccatgtcc

SEQ ID NO: 16632 - DNA, 21 bp, synthetic construct
  source 1..21: mol_type = other DNA
accatttccagctccatgtcc

SEQ ID NO: 16633 - DNA, 20 bp, synthetic construct
  source 1..20: mol_type = other DNA
ccatttccagctccatgtcc

SEQ ID NO: 16634 - DNA, 20 bp, synthetic construct
  source 1..20: mol_type = other DNA
gttctgtggcctcactcaca

SEQ ID NO: 16635 - DNA, 23 bp, synthetic construct
  source 1..23: mol_type = other DNA
agagttctgtggcctcactcaca

SEQ ID NO: 16636 - DNA, 24 bp, synthetic construct
  source 1..24: mol_type = other DNA
cttaccatttccagctccatgtcc

SEQ ID NO: 16637 - DNA, 24 bp, synthetic construct
  source 1..24: mol_type = other DNA
agagagttctgtggcctcactcac

SEQ ID NO: 16638 - DNA, 21 bp, synthetic construct
  source 1..21: mol_type = other DNA
taccatttccagctccatgtc

SEQ ID NO: 16639 - DNA, 20 bp, synthetic construct
  source 1..20: mol_type = other DNA
agttctgtggcctcactcac

SEQ ID NO: 16640 - DNA, 20 bp, synthetic construct
  source 1..20: mol_type = other DNA
accatttccagctccatgtc

SEQ ID NO: 16641 - DNA, 23 bp, synthetic construct
  source 1..23: mol_type = other DNA
gagagttctgtggcctcactcac

SEQ ID NO: 16642 - DNA, 21 bp, synthetic construct
  source 1..21: mol_type = other DNA
ttaccatttccagctccatgt

SEQ ID NO: 16643 - DNA, 20 bp, synthetic construct
  source 1..20: mol_type = other DNA
gagttctgtggcctcactca

SEQ ID NO: 16644 - DNA, 20 bp, synthetic construct
  source 1..20: mol_type = other DNA
taccatttccagctccatgt

SEQ ID NO: 16645 - DNA, 22 bp, synthetic construct
  source 1..22: mol_type = other DNA
gagagttctgtggcctcactca

SEQ ID NO: 16646 - DNA, 21 bp, synthetic construct
  source 1..21: mol_type = other DNA
cttaccatttccagctccatg

SEQ ID NO: 16647 - DNA, 21 bp, synthetic construct
  source 1..21: mol_type = other DNA
gagagttctgtggcctcactc

SEQ ID NO: 16648 - DNA, 20 bp, synthetic construct
  source 1..20: mol_type = other DNA
agagttctgtggcctcactc

SEQ ID NO: 16649 - DNA, 20 bp, synthetic construct
  source 1..20: mol_type = other DNA
ttaccatttccagctccatg

SEQ ID NO: 16650 - DNA, 23 bp, synthetic construct
  source 1..23: mol_type = other DNA
cagagagttctgtggcctcactc

SEQ ID NO: 16651 - DNA, 21 bp, synthetic construct
  source 1..21: mol_type = other DNA
agagagttctgtggcctcact

SEQ ID NO: 16652 - DNA, 20 bp, synthetic construct
  source 1..20: mol_type = other DNA
gagagttctgtggcctcact

SEQ ID NO: 16653 - DNA, 20 bp, synthetic construct
  source 1..20: mol_type = other DNA
cttaccatttccagctccat

SEQ ID NO: 16654 - DNA, 23 bp, synthetic construct
  source 1..23: mol_type = other DNA
acagagagttctgtggcctcact

SEQ ID NO: 16655 - DNA, 20 bp, synthetic construct
  source 1..20: mol_type = other DNA
acttaccatttccagctcca

SEQ ID NO: 16656 - DNA, 20 bp, synthetic construct
  source 1..20: mol_type = other DNA
agagagttctgtggcctcac

SEQ ID NO: 16657 - DNA, 23 bp, synthetic construct
  source 1..23: mol_type = other DNA
ctcacttaccatttccagctcca

SEQ ID NO: 16658 - DNA, 24 bp, synthetic construct
  source 1..24: mol_type = other DNA
agctcacttaccatttccagctcc

SEQ ID NO: 16659 - DNA, 20 bp, synthetic construct
  source 1..20: mol_type = other DNA
cacttaccatttccagctcc

SEQ ID NO: 16660 - DNA, 20 bp, synthetic construct
  source 1..20: mol_type = other DNA
cagagagttctgtggcctca

SEQ ID NO: 16661 - DNA, 23 bp, synthetic construct
  source 1..23: mol_type = other DNA
acacagagagttctgtggcctca

SEQ ID NO: 16662 - DNA, 23 bp, synthetic construct
  source 1..23: mol_type = other DNA
gctcacttaccatttccagctcc

SEQ ID NO: 16663 - DNA, 20 bp, synthetic construct
  source 1..20: mol_type = other DNA
acagagagttctgtggcctc

SEQ ID NO: 16664 - DNA, 20 bp, synthetic construct
  source 1..20: mol_type = other DNA
tcacttaccatttccagctc

SEQ ID NO: 16665 - DNA, 20 bp, synthetic construct
  source 1..20: mol_type = other DNA
cacagagagttctgtggcct

SEQ ID NO: 16666 - DNA, 20 bp, synthetic construct
  source 1..20: mol_type = other DNA
ctcacttaccatttccagct

SEQ ID NO: 16667 - DNA, 23 bp, synthetic construct
  source 1..23: mol_type = other DNA
ccacacagagagttctgtggcct

SEQ ID NO: 16668 - DNA, 20 bp, synthetic construct
  source 1..20: mol_type = other DNA
acacagagagttctgtggcc

SEQ ID NO: 16669 - DNA, 20 bp, synthetic construct
  source 1..20: mol_type = other DNA
gctcacttaccatttccagc

SEQ ID NO: 16670 - DNA, 20 bp, synthetic construct
  source 1..20: mol_type = other DNA
cacacagagagttctgtggc

SEQ ID NO: 16671 - DNA, 20 bp, synthetic construct
  source 1..20: mol_type = other DNA
agctcacttaccatttccag

SEQ ID NO: 16672 - DNA, 23 bp, synthetic construct
  source 1..23: mol_type = other DNA
tcccacacagagagttctgtggc

SEQ ID NO: 16673 - DNA, 21 bp, synthetic construct
  source 1..21: mol_type = other DNA
ccacacagagagttctgtggc

SEQ ID NO: 16674 - DNA, 20 bp, synthetic construct
  source 1..20: mol_type = other DNA
ccacacagagagttctgtgg

SEQ ID NO: 16675 - DNA, 20 bp, synthetic construct
  source 1..20: mol_type = other DNA
aagctcacttaccatttcca

SEQ ID NO: 16676 - DNA, 23 bp, synthetic construct
  source 1..23: mol_type = other DNA
atcaagctcacttaccatttcca

SEQ ID NO: 16677 - DNA, 24 bp, synthetic construct
  source 1..24: mol_type = other DNA
acatcaagctcacttaccatttcc

SEQ ID NO: 16678 - DNA, 20 bp, synthetic construct
  source 1..20: mol_type = other DNA
caagctcacttaccatttcc

SEQ ID NO: 16679 - DNA, 20 bp, synthetic construct
  source 1..20: mol_type = other DNA
cccacacagagagttctgtg

SEQ ID NO: 16680 - DNA, 23 bp, synthetic construct
  source 1..23: mol_type = other DNA
gttcccacacagagagttctgtg

SEQ ID NO: 16681 - DNA, 23 bp, synthetic construct
  source 1..23: mol_type = other DNA
catcaagctcacttaccatttcc

SEQ ID NO: 16682 - DNA, 20 bp, synthetic construct
  source 1..20: mol_type = other DNA
tcaagctcacttaccatttc

SEQ ID NO: 16683 - DNA, 20 bp, synthetic construct
  source 1..20: mol_type = other DNA
tcccacacagagagttctgt

SEQ ID NO: 16684 - DNA, 22 bp, synthetic construct
  source 1..22: mol_type = other DNA
catcaagctcacttaccatttc

SEQ ID NO: 16685 - DNA, 21 bp, synthetic construct
  source 1..21: mol_type = other DNA
catcaagctcacttaccattt

SEQ ID NO: 16686 - DNA, 20 bp, synthetic construct
  source 1..20: mol_type = other DNA
ttcccacacagagagttctg

SEQ ID NO: 16687 - DNA, 20 bp, synthetic construct
  source 1..20: mol_type = other DNA
atcaagctcacttaccattt

SEQ ID NO: 16688 - DNA, 23 bp, synthetic construct
  source 1..23: mol_type = other DNA
ctgttcccacacagagagttctg

SEQ ID NO: 16689 - DNA, 23 bp, synthetic construct
  source 1..23: mol_type = other DNA
aacatcaagctcacttaccattt

SEQ ID NO: 16690 - DNA, 22 bp, synthetic construct
  source 1..22: mol_type = other DNA
tgttcccacacagagagttctg

SEQ ID NO: 16691 - DNA, 24 bp, synthetic construct
  source 1..24: mol_type = other DNA
ctctgttcccacacagagagttct

SEQ ID NO: 16692 - DNA, 21 bp, synthetic construct
  source 1..21: mol_type = other DNA
acatcaagctcacttaccatt

SEQ ID NO: 16693 - DNA, 21 bp, synthetic construct
  source 1..21: mol_type = other DNA
tgttcccacacagagagttct

SEQ ID NO: 16694 - DNA, 20 bp, synthetic construct
  source 1..20: mol_type = other DNA
gttcccacacagagagttct

SEQ ID NO: 16695 - DNA, 20 bp, synthetic construct
  source 1..20: mol_type = other DNA
catcaagctcacttaccatt

SEQ ID NO: 16696 - DNA, 23 bp, synthetic construct
  source 1..23: mol_type = other DNA
tctgttcccacacagagagttct

SEQ ID NO: 16697 - DNA, 21 bp, synthetic construct
  source 1..21: mol_type = other DNA
ctgttcccacacagagagttc

SEQ ID NO: 16698 - DNA, 20 bp, synthetic construct
  source 1..20: mol_type = other DNA
tgttcccacacagagagttc

SEQ ID NO: 16699 - DNA, 20 bp, synthetic construct
  source 1..20: mol_type = other DNA
acatcaagctcacttaccat

SEQ ID NO: 16700 - DNA, 20 bp, synthetic construct
  source 1..20: mol_type = other DNA
ctgttcccacacagagagtt

SEQ ID NO: 16701 - DNA, 20 bp, synthetic construct
  source 1..20: mol_type = other DNA
aacatcaagctcacttacca

SEQ ID NO: 16702 - DNA, 23 bp, synthetic construct
  source 1..23: mol_type = other DNA
taaaacatcaagctcacttacca

SEQ ID NO: 16703 - DNA, 24 bp, synthetic construct
  source 1..24: mol_type = other DNA
aataaaacatcaagctcacttacc

SEQ ID NO: 16704 - DNA, 20 bp, synthetic construct
  source 1..20: mol_type = other DNA
tctgttcccacacagagagt

SEQ ID NO: 16705 - DNA, 20 bp, synthetic construct
  source 1..20: mol_type = other DNA
aaacatcaagctcacttacc

SEQ ID NO: 16706 - DNA, 23 bp, synthetic construct
  source 1..23: mol_type = other DNA
ataaaacatcaagctcacttacc

SEQ ID NO: 16707 - DNA, 20 bp, synthetic construct
  source 1..20: mol_type = other DNA
ctctgttcccacacagagag

SEQ ID NO: 16708 - DNA, 20 bp, synthetic construct
  source 1..20: mol_type = other DNA
aaaacatcaagctcacttac

SEQ ID NO: 16709 - DNA, 20 bp, synthetic construct
  source 1..20: mol_type = other DNA
tctctgttcccacacagaga

SEQ ID NO: 16710 - DNA, 20 bp, synthetic construct
  source 1..20: mol_type = other DNA
taaaacatcaagctcactta

SEQ ID NO: 16711 - DNA, 22 bp, synthetic construct
  source 1..22: mol_type = other DNA
aataaaacatcaagctcactta

SEQ ID NO: 16712 - DNA, 20 bp, synthetic construct
  source 1..20: mol_type = other DNA
ctctctgttcccacacagag

SEQ ID NO: 16713 - DNA, 20 bp, synthetic construct
  source 1..20: mol_type = other DNA
ataaaacatcaagctcactt

SEQ ID NO: 16714 - DNA, 23 bp, synthetic construct
  source 1..23: mol_type = other DNA
cagctctctgttcccacacagag

SEQ ID NO: 16715 - DNA, 21 bp, synthetic construct
  source 1..21: mol_type = other DNA
aataaaacatcaagctcactt

SEQ ID NO: 16716 - DNA, 24 bp, synthetic construct
  source 1..24: mol_type = other DNA
tggcaataaaacatcaagctcact

SEQ ID NO: 16717 - DNA, 20 bp, synthetic construct
  source 1..20: mol_type = other DNA
gctctctgttcccacacaga

SEQ ID NO: 16718 - DNA, 20 bp, synthetic construct
  source 1..20: mol_type = other DNA
aataaaacatcaagctcact

SEQ ID NO: 16719 - DNA, 22 bp, synthetic construct
  source 1..22: mol_type = other DNA
cagctctctgttcccacacaga

SEQ ID NO: 16720 - DNA, 21 bp, synthetic construct
  source 1..21: mol_type = other DNA
cagctctctgttcccacacag

SEQ ID NO: 16721 - DNA, 20 bp, synthetic construct
  source 1..20: mol_type = other DNA
agctctctgttcccacacag

SEQ ID NO: 16722 - DNA, 20 bp, synthetic construct
  source 1..20: mol_type = other DNA
caataaaacatcaagctcac

SEQ ID NO: 16723 - DNA, 23 bp, synthetic construct
  source 1..23: mol_type = other DNA
tggcaataaaacatcaagctcac

SEQ ID NO: 16724 - DNA, 22 bp, synthetic construct
  source 1..22: mol_type = other DNA
ggcaataaaacatcaagctcac

SEQ ID NO: 16725 - DNA, 24 bp, synthetic construct
  source 1..24: mol_type = other DNA
catggcaataaaacatcaagctca

SEQ ID NO: 16726 - DNA, 24 bp, synthetic construct
  source 1..24: mol_type = other DNA
tacccagctctctgttcccacaca

SEQ ID NO: 16727 - DNA, 23 bp, synthetic construct
  source 1..23: mol_type = other DNA
acccagctctctgttcccacaca

SEQ ID NO: 16728 - DNA, 21 bp, synthetic construct
  source 1..21: mol_type = other DNA
ccagctctctgttcccacaca

SEQ ID NO: 16729 - DNA, 20 bp, synthetic construct
  source 1..20: mol_type = other DNA
cagctctctgttcccacaca

SEQ ID NO: 16730 - DNA, 20 bp, synthetic construct
  source 1..20: mol_type = other DNA
gcaataaaacatcaagctca

SEQ ID NO: 16731 - DNA, 23 bp, synthetic construct
  source 1..23: mol_type = other DNA
atggcaataaaacatcaagctca

SEQ ID NO: 16732 - DNA, 21 bp, synthetic construct
  source 1..21: mol_type = other DNA
cccagctctctgttcccacac

SEQ ID NO: 16733 - DNA, 20 bp, synthetic construct
  source 1..20: mol_type = other DNA
ccagctctctgttcccacac

SEQ ID NO: 16734 - DNA, 20 bp, synthetic construct
  source 1..20: mol_type = other DNA
ggcaataaaacatcaagctc

SEQ ID NO: 16735 - DNA, 23 bp, synthetic construct
  source 1..23: mol_type = other DNA
gtacccagctctctgttcccaca

SEQ ID NO: 16736 - DNA, 21 bp, synthetic construct
  source 1..21: mol_type = other DNA
acccagctctctgttcccaca

SEQ ID NO: 16737 - DNA, 20 bp, synthetic construct
  source 1..20: mol_type = other DNA
cccagctctctgttcccaca

SEQ ID NO: 16738 - DNA, 20 bp, synthetic construct
  source 1..20: mol_type = other DNA
tggcaataaaacatcaagct

SEQ ID NO: 16739 - DNA, 21 bp, synthetic construct
  source 1..21: mol_type = other DNA
tacccagctctctgttcccac

SEQ ID NO: 16740 - DNA, 20 bp, synthetic construct
  source 1..20: mol_type = other DNA
acccagctctctgttcccac

SEQ ID NO: 16741 - DNA, 20 bp, synthetic construct
  source 1..20: mol_type = other DNA
atggcaataaaacatcaagc

SEQ ID NO: 16742 - DNA, 21 bp, synthetic construct
  source 1..21: mol_type = other DNA
gtacccagctctctgttccca

SEQ ID NO: 16743 - DNA, 20 bp, synthetic construct
  source 1..20: mol_type = other DNA
tacccagctctctgttccca

SEQ ID NO: 16744 - DNA, 20 bp, synthetic construct
  source 1..20: mol_type = other DNA
catggcaataaaacatcaag

SEQ ID NO: 16745 - DNA, 23 bp, synthetic construct
  source 1..23: mol_type = other DNA
tcccatggcaataaaacatcaag

SEQ ID NO: 16746 - DNA, 21 bp, synthetic construct
  source 1..21: mol_type = other DNA
ccatggcaataaaacatcaag

SEQ ID NO: 16747 - DNA, 20 bp, synthetic construct
  source 1..20: mol_type = other DNA
gtacccagctctctgttccc

SEQ ID NO: 16748 - DNA, 20 bp, synthetic construct
  source 1..20: mol_type = other DNA
ccatggcaataaaacatcaa

SEQ ID NO: 16749 - DNA, 20 bp, synthetic construct
  source 1..20: mol_type = other DNA
cccatggcaataaaacatca

SEQ ID NO: 16750 - DNA, 20 bp, synthetic construct
  source 1..20: mol_type = other DNA
ggtacccagctctctgttcc

SEQ ID NO: 16751 - DNA, 23 bp, synthetic construct
  source 1..23: mol_type = other DNA
gctggtacccagctctctgttcc

SEQ ID NO: 16752 - DNA, 23 bp, synthetic construct
  source 1..23: mol_type = other DNA
gatcccatggcaataaaacatca

SEQ ID NO: 16753 - DNA, 20 bp, synthetic construct
  source 1..20: mol_type = other DNA
tcccatggcaataaaacatc

SEQ ID NO: 16754 - DNA, 20 bp, synthetic construct
  source 1..20: mol_type = other DNA
tggtacccagctctctgttc

SEQ ID NO: 16755 - DNA, 21 bp, synthetic construct
  source 1..21: mol_type = other DNA
gatcccatggcaataaaacat

SEQ ID NO: 16756 - DNA, 20 bp, synthetic construct
  source 1..20: mol_type = other DNA
ctggtacccagctctctgtt

SEQ ID NO: 16757 - DNA, 20 bp, synthetic construct
  source 1..20: mol_type = other DNA
atcccatggcaataaaacat

SEQ ID NO: 16758 - DNA, 23 bp, synthetic construct
  source 1..23: mol_type = other DNA
ttgctggtacccagctctctgtt

SEQ ID NO: 16759 - DNA, 23 bp, synthetic construct
  source 1..23: mol_type = other DNA
tagatcccatggcaataaaacat

SEQ ID NO: 16760 - DNA, 21 bp, synthetic construct
  source 1..21: mol_type = other DNA
agatcccatggcaataaaaca

SEQ ID NO: 16761 - DNA, 20 bp, synthetic construct
  source 1..20: mol_type = other DNA
gctggtacccagctctctgt

SEQ ID NO: 16762 - DNA, 20 bp, synthetic construct
  source 1..20: mol_type = other DNA
gatcccatggcaataaaaca

SEQ ID NO: 16763 - DNA, 23 bp, synthetic construct
  source 1..23: mol_type = other DNA
cttgctggtacccagctctctgt

SEQ ID NO: 16764 - DNA, 21 bp, synthetic construct
  source 1..21: mol_type = other DNA
tagatcccatggcaataaaac

SEQ ID NO: 16765 - DNA, 20 bp, synthetic construct
  source 1..20: mol_type = other DNA
tgctggtacccagctctctg

SEQ ID NO: 16766 - DNA, 20 bp, synthetic construct
  source 1..20: mol_type = other DNA
agatcccatggcaataaaac

SEQ ID NO: 16767 - DNA, 23 bp, synthetic construct
  source 1..23: mol_type = other DNA
ccttgctggtacccagctctctg

SEQ ID NO: 16768 - DNA, 24 bp, synthetic construct
  source 1..24: mol_type = other DNA
ggccttgctggtacccagctctct

SEQ ID NO: 16769 - DNA, 20 bp, synthetic construct
  source 1..20: mol_type = other DNA
ttgctggtacccagctctct

SEQ ID NO: 16770 - DNA, 20 bp, synthetic construct
  source 1..20: mol_type = other DNA
tagatcccatggcaataaaa

SEQ ID NO: 16771 - DNA, 23 bp, synthetic construct
  source 1..23: mol_type = other DNA
gccttgctggtacccagctctct

SEQ ID NO: 16772 - DNA, 24 bp, synthetic construct
  source 1..24: mol_type = other DNA
aggccttgctggtacccagctctc

SEQ ID NO: 16773 - DNA, 20 bp, synthetic construct
  source 1..20: mol_type = other DNA
cttgctggtacccagctctc

SEQ ID NO: 16774 - DNA, 20 bp, synthetic construct
  source 1..20: mol_type = other DNA
atagatcccatggcaataaa

SEQ ID NO: 16775 - DNA, 23 bp, synthetic construct
  source 1..23: mol_type = other DNA
ggccttgctggtacccagctctc

SEQ ID NO: 16776 - DNA, 23 bp, synthetic construct
  source 1..23: mol_type = other DNA
tctatagatcccatggcaataaa

SEQ ID NO: 16777 - DNA, 20 bp, synthetic construct
  source 1..20: mol_type = other DNA
ccttgctggtacccagctct

SEQ ID NO: 16778 - DNA, 20 bp, synthetic construct
  source 1..20: mol_type = other DNA
tatagatcccatggcaataa

SEQ ID NO: 16779 - DNA, 22 bp, synthetic construct
  source 1..22: mol_type = other DNA
ggccttgctggtacccagctct

SEQ ID NO: 16780 - DNA, 20 bp, synthetic construct
  source 1..20: mol_type = other DNA
gccttgctggtacccagctc

SEQ ID NO: 16781 - DNA, 20 bp, synthetic construct
  source 1..20: mol_type = other DNA
ctatagatcccatggcaata

SEQ ID NO: 16782 - DNA, 22 bp, synthetic construct
  source 1..22: mol_type = other DNA
gtctatagatcccatggcaata

SEQ ID NO: 16783 - DNA, 21 bp, synthetic construct
  source 1..21: mol_type = other DNA
tctatagatcccatggcaata

SEQ ID NO: 16784 - DNA, 24 bp, synthetic construct
  source 1..24: mol_type = other DNA
tccaggccttgctggtacccagct

SEQ ID NO: 16785 - DNA, 20 bp, synthetic construct
  source 1..20: mol_type = other DNA
ggccttgctggtacccagct

SEQ ID NO: 16786 - DNA, 20 bp, synthetic construct
  source 1..20: mol_type = other DNA
tctatagatcccatggcaat

SEQ ID NO: 16787 - DNA, 23 bp, synthetic construct
  source 1..23: mol_type = other DNA
gtgtctatagatcccatggcaat

SEQ ID NO: 16788 - DNA, 22 bp, synthetic construct
  source 1..22: mol_type = other DNA
tgtctatagatcccatggcaat

SEQ ID NO: 16789 - DNA, 21 bp, synthetic construct
  source 1..21: mol_type = other DNA
gtctatagatcccatggcaat

SEQ ID NO: 16790 - DNA, 21 bp, synthetic construct
  source 1..21: mol_type = other DNA
tgtctatagatcccatggcaa

SEQ ID NO: 16791 - DNA, 20 bp, synthetic construct
  source 1..20: mol_type = other DNA
aggccttgctggtacccagc

SEQ ID NO: 16792 - DNA, 20 bp, synthetic construct
  source 1..20: mol_type = other DNA
gtctatagatcccatggcaa

SEQ ID NO: 16793 - DNA, 21 bp, synthetic construct
  source 1..21: mol_type = other DNA
gtgtctatagatcccatggca

SEQ ID NO: 16794 - DNA, 20 bp, synthetic construct
  source 1..20: mol_type = other DNA
caggccttgctggtacccag

SEQ ID NO: 16795 - DNA, 20 bp, synthetic construct
  source 1..20: mol_type = other DNA
tgtctatagatcccatggca

SEQ ID NO: 16796 - DNA, 23 bp, synthetic construct
  source 1..23: mol_type = other DNA
gtccaggccttgctggtacccag

SEQ ID NO: 16797 - DNA, 22 bp, synthetic construct
  source 1..22: mol_type = other DNA
ggtgtctatagatcccatggca

SEQ ID NO: 16798 - DNA, 21 bp, synthetic construct
  source 1..21: mol_type = other DNA
ggtgtctatagatcccatggc

SEQ ID NO: 16799 - DNA, 20 bp, synthetic construct
  source 1..20: mol_type = other DNA
ccaggccttgctggtaccca

SEQ ID NO: 16800 - DNA, 20 bp, synthetic construct
  source 1..20: mol_type = other DNA
gtgtctatagatcccatggc

SEQ ID NO: 16801 - DNA, 20 bp, synthetic construct
  source 1..20: mol_type = other DNA
tccaggccttgctggtaccc

SEQ ID NO: 16802 - DNA, 20 bp, synthetic construct
  source 1..20: mol_type = other DNA
ggtgtctatagatcccatgg

SEQ ID NO: 16803 - DNA, 23 bp, synthetic construct
  source 1..23: mol_type = other DNA
gcgtccaggccttgctggtaccc

SEQ ID NO: 16804 - DNA, 21 bp, synthetic construct
  source 1..21: mol_type = other DNA
gggtgtctatagatcccatgg

SEQ ID NO: 16805 - DNA, 20 bp, synthetic construct
  source 1..20: mol_type = other DNA
gtccaggccttgctggtacc

SEQ ID NO: 16806 - DNA, 20 bp, synthetic construct
  source 1..20: mol_type = other DNA
gggtgtctatagatcccatg

SEQ ID NO: 16807 - DNA, 22 bp, synthetic construct
  source 1..22: mol_type = other DNA
gcgtccaggccttgctggtacc

SEQ ID NO: 16808 - DNA, 21 bp, synthetic construct
  source 1..21: mol_type = other DNA
ccgggtgtctatagatcccat

SEQ ID NO: 16809 - DNA, 21 bp, synthetic construct
  source 1..21: mol_type = other DNA
gcgtccaggccttgctggtac

SEQ ID NO: 16810 - DNA, 20 bp, synthetic construct
  source 1..20: mol_type = other DNA
cgggtgtctatagatcccat

SEQ ID NO: 16811 - DNA, 20 bp, synthetic construct
  source 1..20: mol_type = other DNA
cgtccaggccttgctggtac

SEQ ID NO: 16812 - DNA, 23 bp, synthetic construct
  source 1..23: mol_type = other DNA
cagcgtccaggccttgctggtac

SEQ ID NO: 16813 - DNA, 21 bp, synthetic construct
  source 1..21: mol_type = other DNA
agcgtccaggccttgctggta

SEQ ID NO: 16814 - DNA, 20 bp, synthetic construct
  source 1..20: mol_type = other DNA
ccgggtgtctatagatccca

SEQ ID NO: 16815 - DNA, 20 bp, synthetic construct
  source 1..20: mol_type = other DNA
gcgtccaggccttgctggta

SEQ ID NO: 16816 - DNA, 22 bp, synthetic construct
  source 1..22: mol_type = other DNA
tgccgggtgtctatagatccca

SEQ ID NO: 16817 - DNA, 21 bp, synthetic construct
  source 1..21: mol_type = other DNA
tgccgggtgtctatagatccc

SEQ ID NO: 16818 - DNA, 20 bp, synthetic construct
  source 1..20: mol_type = other DNA
gccgggtgtctatagatccc

SEQ ID NO: 16819 - DNA, 20 bp, synthetic construct
  source 1..20: mol_type = other DNA
agcgtccaggccttgctggt

SEQ ID NO: 16820 - DNA, 23 bp, synthetic construct
  source 1..23: mol_type = other DNA
cctgccgggtgtctatagatccc

SEQ ID NO: 16821 - DNA, 21 bp, synthetic construct
  source 1..21: mol_type = other DNA
ctgccgggtgtctatagatcc

SEQ ID NO: 16822 - DNA, 20 bp, synthetic construct
  source 1..20: mol_type = other DNA
cagcgtccaggccttgctgg

SEQ ID NO: 16823 - DNA, 20 bp, synthetic construct
  source 1..20: mol_type = other DNA
tgccgggtgtctatagatcc

SEQ ID NO: 16824 - DNA, 23 bp, synthetic construct
  source 1..23: mol_type = other DNA
ccgcagcgtccaggccttgctgg

SEQ ID NO: 16825 - DNA, 24 bp, synthetic construct
  source 1..24: mol_type = other DNA
gaccgcagcgtccaggccttgctg

SEQ ID NO: 16826 - DNA, 20 bp, synthetic construct
  source 1..20: mol_type = other DNA
gcagcgtccaggccttgctg

SEQ ID NO: 16827 - DNA, 20 bp, synthetic construct
  source 1..20: mol_type = other DNA
ctgccgggtgtctatagatc

SEQ ID NO: 16828 - DNA, 23 bp, synthetic construct
  source 1..23: mol_type = other DNA
accgcagcgtccaggccttgctg

SEQ ID NO: 16829 - DNA, 24 bp, synthetic construct
  source 1..24: mol_type = other DNA
tgaccgcagcgtccaggccttgct

SEQ ID NO: 16830 - DNA, 20 bp, synthetic construct
  source 1..20: mol_type = other DNA
cgcagcgtccaggccttgct

SEQ ID NO: 16831 - DNA, 20 bp, synthetic construct
  source 1..20: mol_type = other DNA
cctgccgggtgtctatagat

SEQ ID NO: 16832 - DNA, 23 bp, synthetic construct
  source 1..23: mol_type = other DNA
gaccgcagcgtccaggccttgct

SEQ ID NO: 16833 - DNA, 20 bp, synthetic construct
  source 1..20: mol_type = other DNA
ccgcagcgtccaggccttgc

SEQ ID NO: 16834 - DNA, 20 bp, synthetic construct
  source 1..20: mol_type = other DNA
tcctgccgggtgtctataga

SEQ ID NO: 16835 - DNA, 22 bp, synthetic construct
  source 1..22: mol_type = other DNA
gaccgcagcgtccaggccttgc

SEQ ID NO: 16836 - DNA, 21 bp, synthetic construct
  source 1..21: mol_type = other DNA
gaccgcagcgtccaggccttg

SEQ ID NO: 16837 - DNA, 20 bp, synthetic construct
  source 1..20: mol_type = other DNA
accgcagcgtccaggccttg

SEQ ID NO: 16838 - DNA, 20 bp, synthetic construct
  source 1..20: mol_type = other DNA
ctcctgccgggtgtctatag

SEQ ID NO: 16839 - DNA, 23 bp, synthetic construct
  source 1..23: mol_type = other DNA
gctctcctgccgggtgtctatag

SEQ ID NO: 16840 - DNA, 24 bp, synthetic construct
  source 1..24: mol_type = other DNA
gggctctcctgccgggtgtctata

SEQ ID NO: 16841 - DNA, 21 bp, synthetic construct
  source 1..21: mol_type = other DNA
tgaccgcagcgtccaggcctt

SEQ ID NO: 16842 - DNA, 20 bp, synthetic construct
  source 1..20: mol_type = other DNA
gaccgcagcgtccaggcctt

SEQ ID NO: 16843 - DNA, 20 bp, synthetic construct
  source 1..20: mol_type = other DNA
tctcctgccgggtgtctata

SEQ ID NO: 16844 - DNA, 23 bp, synthetic construct
  source 1..23: mol_type = other DNA
ggctctcctgccgggtgtctata

SEQ ID NO: 16845 - DNA, 23 bp, synthetic construct
  source 1..23: mol_type = other DNA
agtgaccgcagcgtccaggcctt

SEQ ID NO: 16846 - DNA, 24 bp, synthetic construct
  source 1..24: mol_type = other DNA
agggctctcctgccgggtgtctat

SEQ ID NO: 16847 - DNA, 20 bp, synthetic construct
  source 1..20: mol_type = other DNA
tgaccgcagcgtccaggcct

SEQ ID NO: 16848 - DNA, 20 bp, synthetic construct
  source 1..20: mol_type = other DNA
ctctcctgccgggtgtctat

SEQ ID NO: 16849 - DNA, 23 bp, synthetic construct
  source 1..23: mol_type = other DNA
gggctctcctgccgggtgtctat

SEQ ID NO: 16850 - DNA, 22 bp, synthetic construct
  source 1..22: mol_type = other DNA
ggctctcctgccgggtgtctat

SEQ ID NO: 16851 - DNA, 20 bp, synthetic construct
  source 1..20: mol_type = other DNA
gtgaccgcagcgtccaggcc

SEQ ID NO: 16852 - DNA, 20 bp, synthetic construct
  source 1..20: mol_type = other DNA
gctctcctgccgggtgtcta

SEQ ID NO: 16853 - DNA, 22 bp, synthetic construct
  source 1..22: mol_type = other DNA
gggctctcctgccgggtgtcta

SEQ ID NO: 16854 - DNA, 21 bp, synthetic construct
  source 1..21: mol_type = other DNA
gggctctcctgccgggtgtct

SEQ ID NO: 16855 - DNA, 20 bp, synthetic construct
  source 1..20: mol_type = other DNA
agtgaccgcagcgtccaggc

SEQ ID NO: 16856 - DNA, 20 bp, synthetic construct
  source 1..20: mol_type = other DNA
ggctctcctgccgggtgtct

SEQ ID NO: 16857 - DNA, 23 bp, synthetic construct
  source 1..23: mol_type = other DNA
gtgagtgaccgcagcgtccaggc

SEQ ID NO: 16858 - DNA, 21 bp, synthetic construct
  source 1..21: mol_type = other DNA
agggctctcctgccgggtgtc

SEQ ID NO: 16859 - DNA, 20 bp, synthetic construct
  source 1..20: mol_type = other DNA
gagtgaccgcagcgtccagg

SEQ ID NO: 16860 - DNA, 20 bp, synthetic construct
  source 1..20: mol_type = other DNA
gggctctcctgccgggtgtc

SEQ ID NO: 16861 - DNA, 20 bp, synthetic construct
  source 1..20: mol_type = other DNA
tgagtgaccgcagcgtccag

SEQ ID NO: 16862 - DNA, 20 bp, synthetic construct
  source 1..20: mol_type = other DNA
agggctctcctgccgggtgt

SEQ ID NO: 16863 - DNA, 20 bp, synthetic construct
  source 1..20: mol_type = other DNA
gtgagtgaccgcagcgtcca

SEQ ID NO: 16864 - DNA, 20 bp, synthetic construct
  source 1..20: mol_type = other DNA
aagggctctcctgccgggtg

SEQ ID NO: 16865 - DNA, 20 bp, synthetic construct
  source 1..20: mol_type = other DNA
tgtgagtgaccgcagcgtcc

SEQ ID NO: 16866 - DNA, 20 bp, synthetic construct
  source 1..20: mol_type = other DNA
aaagggctctcctgccgggt

SEQ ID NO: 16867 - DNA, 23 bp, synthetic construct
  source 1..23: mol_type = other DNA
gactgtgagtgaccgcagcgtcc

SEQ ID NO: 16868 - DNA, 22 bp, synthetic construct
  source 1..22: mol_type = other DNA
actgtgagtgaccgcagcgtcc

SEQ ID NO: 16869 - DNA, 24 bp, synthetic construct
  source 1..24: mol_type = other DNA
atgactgtgagtgaccgcagcgtc

SEQ ID NO: 16870 - DNA, 21 bp, synthetic construct
  source 1..21: mol_type = other DNA
actgtgagtgaccgcagcgtc

SEQ ID NO: 16871 - DNA, 20 bp, synthetic construct
  source 1..20: mol_type = other DNA
ctgtgagtgaccgcagcgtc

SEQ ID NO: 16872 - DNA, 20 bp, synthetic construct
  source 1..20: mol_type = other DNA
caaagggctctcctgccggg

SEQ ID NO: 16873 - DNA, 23 bp, synthetic construct
  source 1..23: mol_type = other DNA
tgactgtgagtgaccgcagcgtc

SEQ ID NO: 16874 - DNA, 21 bp, synthetic construct
  source 1..21: mol_type = other DNA
gactgtgagtgaccgcagcgt

SEQ ID NO: 16875 - DNA, 20 bp, synthetic construct
  source 1..20: mol_type = other DNA
ccaaagggctctcctgccgg

SEQ ID NO: 16876 - DNA, 20 bp, synthetic construct
  source 1..20: mol_type = other DNA
actgtgagtgaccgcagcgt

SEQ ID NO: 16877 - DNA, 23 bp, synthetic construct
  source 1..23: mol_type = other DNA
atcccaaagggctctcctgccgg

SEQ ID NO: 16878 - DNA, 21 bp, synthetic construct
  source 1..21: mol_type = other DNA
tgactgtgagtgaccgcagcg

SEQ ID NO: 16879 - DNA, 20 bp, synthetic construct
  source 1..20: mol_type = other DNA
gactgtgagtgaccgcagcg

SEQ ID NO: 16880 - DNA, 51 bp, synthetic construct
  source 1..51: mol_type = other DNA
cctctcgggccattccttgggaagagttttgggaccactgtctctccgtgg

SEQ ID NO: 16881 - DNA, 52 bp, synthetic construct
  source 1..52: mol_type = other DNA
cctctcgggccattccttgggaagagttttgggaccactgtctctccgtggg

SEQ ID NO: 16882 - DNA, 52 bp, synthetic construct
  source 1..52: mol_type = other DNA
tgcttcgggttgggcacagcaaagggcatgagagcatccatgggcaccaccc

SEQ ID NO: 16883 - DNA, 53 bp, synthetic construct
  source 1..53: mol_type = other DNA
cctctcgggccattccttgggaagagttttgggaccactgtctctccgtgggt

SEQ ID NO: 16884 - DNA, 53 bp, synthetic construct
  source 1..53: mol_type = other DNA
tgcttcgggttgggcacagcaaagggcatgagagcatccatgggcaccaccca

SEQ ID NO: 16885 - DNA, 54 bp, synthetic construct
  source 1..54: mol_type = other DNA
tgcttcgggttgggcacagcaaagggcatgagagcatccatgggcaccacccac

SEQ ID NO: 16886 - DNA, 54 bp, synthetic construct
  source 1..54: mol_type = other DNA
cctctcgggccattccttgggaagagttttgggaccactgtctctccgtgggtg

SEQ ID NO: 16887 - DNA, 55 bp, synthetic construct
  source 1..55: mol_type = other DNA
tgcttcgggttgggcacagcaaagggcatgagagcatccatgggcaccacccacg

SEQ ID NO: 16888 - DNA, 55 bp, synthetic construct
  source 1..55: mol_type = other DNA
cctctcgggccattccttgggaagagttttgggaccactgtctctccgtgggtgg

SEQ ID NO: 16889 - DNA, 56 bp, synthetic construct
  source 1..56: mol_type = other DNA
tgcttcgggttgggcacagcaaagggcatgagagcatccatgggcaccacccacgg

SEQ ID NO: 16890 - DNA, 56 bp, synthetic construct
  source 1..56: mol_type = other DNA
cctctcgggccattccttgggaagagttttgggaccactgtctctccgtgggtggt

SEQ ID NO: 16891 - DNA, 57 bp, synthetic construct
  source 1..57: mol_type = other DNA
tgcttcgggttgggcacagcaaagggcatgagagcatccatgggcaccacccacgga

SEQ ID NO: 16892 - DNA, 57 bp, synthetic construct
  source 1..57: mol_type = other DNA
cctctcgggccattccttgggaagagttttgggaccactgtctctccgtgggtggtg

SEQ ID NO: 16893 - DNA, 58 bp, synthetic construct
  source 1..58: mol_type = other DNA
tgcttcgggttgggcacagcaaagggcatgagagcatccatgggcaccacccacggag

SEQ ID NO: 16894 - DNA, 58 bp, synthetic construct
  source 1..58: mol_type = other DNA
cctctcgggccattccttgggaagagttttgggaccactgtctctccgtgggtggtgc

SEQ ID NO: 16895 - DNA, 59 bp, synthetic construct
  source 1..59: mol_type = other DNA
tgcttcgggttgggcacagcaaagggcatgagagcatccatgggcaccacccacggaga

SEQ ID NO: 16896 - DNA, 59 bp, synthetic construct
  source 1..59: mol_type = other DNA
cctctcgggccattccttgggaagagttttgggaccactgtctctccgtgggtggtgcc

SEQ ID NO: 16897 - DNA, 60 bp, synthetic construct
  source 1..60: mol_type = other DNA
tgcttcgggttgggcacagcaaagggcatgagagcatccatgggcaccacccacggagag

SEQ ID NO: 16898 - DNA, 60 bp, synthetic construct
  source 1..60: mol_type = other DNA
cctctcgggccattccttgggaagagttttgggaccactgtctctccgtgggtggtgccc

SEQ ID NO: 16899 - DNA, 61 bp, synthetic construct
  source 1..61: mol_type = other DNA
tgcttcgggttgggcacagcaaagggcatgagagcatccatgggcaccacccacggagaga

SEQ ID NO: 16900 - DNA, 61 bp, synthetic construct
  source 1..61: mol_type = other DNA
cctctcgggccattccttgggaagagttttgggaccactgtctctccgtgggtggtgccca

SEQ ID NO: 16901 - DNA, 62 bp, synthetic construct
  source 1..62: mol_type = other DNA
cctctcgggccattccttgggaagagttttgggaccactgtctctccgtgggtggtgcccat

SEQ ID NO: 16902 - DNA, 62 bp, synthetic construct
  source 1..62: mol_type = other DNA
tgcttcgggttgggcacagcaaagggcatgagagcatccatgggcaccacccacggagagac

SEQ ID NO: 16903 - DNA, 63 bp, synthetic construct
  source 1..63: mol_type = other DNA
tgcttcgggttgggcacagcaaagggcatgagagcatccatgggcaccacccacggagagaca

SEQ ID NO: 16904 - DNA, 63 bp, synthetic construct
  source 1..63: mol_type = other DNA
cctctcgggccattccttgggaagagttttgggaccactgtctctccgtgggtggtgcccatg

SEQ ID NO: 16905 - DNA, 64 bp, synthetic construct
  source 1..64: mol_type = other DNA
cctctcgggccattccttgggaagagttttgggaccactgtctctccgtgggtggtgcccatgg

SEQ ID NO: 16906 - DNA, 64 bp, synthetic construct
  source 1..64: mol_type = other DNA
tgcttcgggttgggcacagcaaagggcatgagagcatccatgggcaccacccacggagagacag

SEQ ID NO: 16907 - DNA, 65 bp, synthetic construct
  source 1..65: mol_type = other DNA
cctctcgggccattccttgggaagagttttgggaccactgtctctccgtgggtggtgcccatgga

SEQ ID NO: 16908 - DNA, 65 bp, synthetic construct
  source 1..65: mol_type = other DNA
tgcttcgggttgggcacagcaaagggcatgagagcatccatgggcaccacccacggagagacagt

SEQ ID NO: 16909 - DNA, 66 bp, synthetic construct
  source 1..66: mol_type = other DNA
cctctcgggccattccttgggaagagttttgggaccactgtctctccgtgggtggtgcccatggat

SEQ ID NO: 16910 - DNA, 66 bp, synthetic construct
  source 1..66: mol_type = other DNA
tgcttcgggttgggcacagcaaagggcatgagagcatccatgggcaccacccacggagagacagtg

SEQ ID NO: 16911 - DNA, 67 bp, synthetic construct
  source 1..67: mol_type = other DNA
tgcttcgggttgggcacagcaaagggcatgagagcatccatgggcaccacccacggagagacagtgg

SEQ ID NO: 16912 - DNA, 67 bp, synthetic construct
  source 1..67: mol_type = other DNA
cctctcgggccattccttgggaagagttttgggaccactgtctctccgtgggtggtgcccatggatg

SEQ ID NO: 16913 - DNA, 68 bp, synthetic construct
  source 1..68: mol_type = other DNA
tgcttcgggttgggcacagcaaagggcatgagagcatccatgggcaccacccacggagagacagtggt

SEQ ID NO: 16914 - DNA, 68 bp, synthetic construct
  source 1..68: mol_type = other DNA
cctctcgggccattccttgggaagagttttgggaccactgtctctccgtgggtggtgcccatggatgc

SEQ ID NO: 16915 - DNA, 69 bp, synthetic construct
  source 1..69: mol_type = other DNA
tgcttcgggttgggcacagcaaagggcatgagagcatccatgggcaccacccacggagagacagtggtc

SEQ ID NO: 16916 - DNA, 69 bp, synthetic construct
  source 1..69: mol_type = other DNA
cctctcgggccattccttgggaagagttttgggaccactgtctctccgtgggtggtgcccatggatgct

SEQ ID NO: 16917 - DNA, 70 bp, synthetic construct
  source 1..70: mol_type = other DNA
tgcttcgggttgggcacagcaaagggcatgagagcatccatgggcaccacccacggagagacagtggtcc

SEQ ID NO: 16918 - DNA, 70 bp, synthetic construct
  source 1..70: mol_type = other DNA
cctctcgggccattccttgggaagagttttgggaccactgtctctccgtgggtggtgcccatggatgctc

SEQ ID NO: 16919 - DNA, 71 bp, synthetic construct
  source 1..71: mol_type = other DNA
cctctcgggccattccttgggaagagttttgggaccactgtctctccgtgggtggtgcccatggatgctct

SEQ ID NO: 16920 - DNA, 71 bp, synthetic construct
  source 1..71: mol_type = other DNA
tgcttcgggttgggcacagcaaagggcatgagagcatccatgggcaccacccacggagagacagtggtccc

SEQ ID NO: 16921 - DNA, 72 bp, synthetic construct
  source 1..72: mol_type = other DNA
cctctcgggccattccttgggaagagttttgggaccactgtctctccgtgggtggtgcccatggatgctctc

SEQ ID NO: 16922 - DNA, 72 bp, synthetic construct
  source 1..72: mol_type = other DNA
tgcttcgggttgggcacagcaaagggcatgagagcatccatgggcaccacccacggagagacagtggtccca

SEQ ID NO: 16923 - DNA, 73 bp, synthetic construct
  source 1..73: mol_type = other DNA
cctctcgggccattccttgggaagagttttgggaccactgtctctccgtgggtggtgcccatggatgctctca

SEQ ID NO: 16924 - DNA, 73 bp, synthetic construct
  source 1..73: mol_type = other DNA
tgcttcgggttgggcacagcaaagggcatgagagcatccatgggcaccacccacggagagacagtggtcccaa

SEQ ID NO: 16925 - DNA, 74 bp, synthetic construct
  source 1..74: mol_type = other DNA
tgcttcgggttgggcacagcaaagggcatgagagcatccatgggcaccacccacggagagacagtggtcccaaa

SEQ ID NO: 16926 - DNA, 74 bp, synthetic construct
  source 1..74: mol_type = other DNA
cctctcgggccattccttgggaagagttttgggaccactgtctctccgtgggtggtgcccatggatgctctcat

SEQ ID NO: 16927 - DNA, 75 bp, synthetic construct
  source 1..75: mol_type = other DNA
tgcttcgggttgggcacagcaaagggcatgagagcatccatgggcaccacccacggagagacagtggtcccaaaa

SEQ ID NO: 16928 - DNA, 75 bp, synthetic construct
  source 1..75: mol_type = other DNA
cctctcgggccattccttgggaagagttttgggaccactgtctctccgtgggtggtgcccatggatgctctcatg

SEQ ID NO: 16929 - DNA, 76 bp, synthetic construct
  source 1..76: mol_type = other DNA
tgcttcgggttgggcacagcaaagggcatgagagcatccatgggcaccacccacggagagacagtggtcccaaaac

SEQ ID NO: 16930 - DNA, 76 bp, synthetic construct
  source 1..76: mol_type = other DNA
cctctcgggccattccttgggaagagttttgggaccactgtctctccgtgggtggtgcccatggatgctctcatgc

SEQ ID NO: 16931 - DNA, 77 bp, synthetic construct
  source 1..77: mol_type = other DNA
cctctcgggccattccttgggaagagttttgggaccactgtctctccgtgggtggtgcccatggatgctctcatgcc

SEQ ID NO: 16932 - DNA, 77 bp, synthetic construct
  source 1..77: mol_type = other DNA
tgcttcgggttgggcacagcaaagggcatgagagcatccatgggcaccacccacggagagacagtggtcccaaaact

SEQ ID NO: 16933 - DNA, 78 bp, synthetic construct
  source 1..78: mol_type = other DNA
cctctcgggccattccttgggaagagttttgggaccactgtctctccgtgggtggtgcccatggatgctctcatgccc

SEQ ID NO: 16934 - DNA, 78 bp, synthetic construct
  source 1..78: mol_type = other DNA
tgcttcgggttgggcacagcaaagggcatgagagcatccatgggcaccacccacggagagacagtggtcccaaaactc

SEQ ID NO: 16935 - DNA, 79 bp, synthetic construct
  source 1..79: mol_type = other DNA
tgcttcgggttgggcacagcaaagggcatgagagcatccatgggcaccacccacggagagacagtggtcccaaaactct

SEQ ID NO: 16936 - DNA, 79 bp, synthetic construct
  source 1..79: mol_type = other DNA
cctctcgggccattccttgggaagagttttgggaccactgtctctccgtgggtggtgcccatggatgctctcatgccct

SEQ ID NO: 16937 - DNA, 80 bp, synthetic construct
  source 1..80: mol_type = other DNA
tgcttcgggttgggcacagcaaagggcatgagagcatccatgggcaccacccacggagagacagtggtcccaaaactctt

SEQ ID NO: 16938 - DNA, 80 bp, synthetic construct
  source 1..80: mol_type = other DNA
cctctcgggccattccttgggaagagttttgggaccactgtctctccgtgggtggtgcccatggatgctctcatgccctt

SEQ ID NO: 16939 - DNA, 81 bp, synthetic construct
  source 1..81: mol_type = other DNA
tgcttcgggttgggcacagcaaagggcatgagagcatccatgggcaccacccacggagagacagtggtcccaaaactcttc

SEQ ID NO: 16940 - DNA, 81 bp, synthetic construct
  source 1..81: mol_type = other DNA
cctctcgggccattccttgggaagagttttgggaccactgtctctccgtgggtggtgcccatggatgctctcatgcccttt

SEQ ID NO: 16941 - DNA, 17 bp, synthetic construct
  source 1..17: mol_type = other DNA
gtggtgcccatggatgc

SEQ ID NO: 16942 - DNA, 17 bp, synthetic construct
  source 1..17: mol_type = other DNA
tggtgcccatggatgct

SEQ ID NO: 16943 - DNA, 17 bp, synthetic construct
  source 1..17: mol_type = other DNA
acggagagacagtggtc

SEQ ID NO: 16944 - DNA, 17 bp, synthetic construct
  source 1..17: mol_type = other DNA
ggtgcccatggatgctc

SEQ ID NO: 16945 - DNA, 17 bp, synthetic construct
  source 1..17: mol_type = other DNA
cggagagacagtggtcc

SEQ ID NO: 16946 - DNA, 17 bp, synthetic construct
  source 1..17: mol_type = other DNA
ggagagacagtggtccc

SEQ ID NO: 16947 - DNA, 17 bp, synthetic construct
  source 1..17: mol_type = other DNA
gtgcccatggatgctct

SEQ ID NO: 16948 - DNA, 17 bp, synthetic construct
  source 1..17: mol_type = other DNA
gagagacagtggtccca

SEQ ID NO: 16949 - DNA, 17 bp, synthetic construct
  source 1..17: mol_type = other DNA
tgcccatggatgctctc

SEQ ID NO: 16950 - DNA, 17 bp, synthetic construct
  source 1..17: mol_type = other DNA
agagacagtggtcccaa

SEQ ID NO: 16951 - DNA, 17 bp, synthetic construct
  source 1..17: mol_type = other DNA
gcccatggatgctctca

SEQ ID NO: 16952 - DNA, 17 bp, synthetic construct
  source 1..17: mol_type = other DNA
gagacagtggtcccaaa

SEQ ID NO: 16953 - DNA, 17 bp, synthetic construct
  source 1..17: mol_type = other DNA
cccatggatgctctcat

SEQ ID NO: 16954 - DNA, 17 bp, synthetic construct
  source 1..17: mol_type = other DNA
agacagtggtcccaaaa

SEQ ID NO: 16955 - DNA, 17 bp, synthetic construct
  source 1..17: mol_type = other DNA
ccatggatgctctcatg

SEQ ID NO: 16956 - DNA, 17 bp, synthetic construct
  source 1..17: mol_type = other DNA
gacagtggtcccaaaac

SEQ ID NO: 16957 - DNA, 17 bp, synthetic construct
  source 1..17: mol_type = other DNA
catggatgctctcatgc

SEQ ID NO: 16958 - DNA, 17 bp, synthetic construct
  source 1..17: mol_type = other DNA
acagtggtcccaaaact

SEQ ID NO: 16959 - DNA, 17 bp, synthetic construct
  source 1..17: mol_type = other DNA
atggatgctctcatgcc

SEQ ID NO: 16960 - DNA, 17 bp, synthetic construct
  source 1..17: mol_type = other DNA
cagtggtcccaaaactc

SEQ ID NO: 16961 - DNA, 17 bp, synthetic construct
  source 1..17: mol_type = other DNA
tggatgctctcatgccc

SEQ ID NO: 16962 - DNA, 17 bp, synthetic construct
  source 1..17: mol_type = other DNA
ggatgctctcatgccct

SEQ ID NO: 16963 - DNA, 17 bp, synthetic construct
  source 1..17: mol_type = other DNA
agtggtcccaaaactct

SEQ ID NO: 16964 - DNA, 17 bp, synthetic construct
  source 1..17: mol_type = other DNA
gtggtcccaaaactctt

SEQ ID NO: 16965 - DNA, 17 bp, synthetic construct
  source 1..17: mol_type = other DNA
gatgctctcatgccctt

SEQ ID NO: 16966 - DNA, 17 bp, synthetic construct
  source 1..17: mol_type = other DNA
atgctctcatgcccttt

SEQ ID NO: 16967 - DNA, 17 bp, synthetic construct
  source 1..17: mol_type = other DNA
tggtcccaaaactcttc

SEQ ID NO: 16968 - DNA, 17 bp, synthetic construct
  source 1..17: mol_type = other DNA
tgctctcatgccctttg

SEQ ID NO: 16969 - DNA, 17 bp, synthetic construct
  source 1..17: mol_type = other DNA
ggtcccaaaactcttcc

SEQ ID NO: 16970 - DNA, 17 bp, synthetic construct
  source 1..17: mol_type = other DNA
gctctcatgccctttgc

SEQ ID NO: 16971 - DNA, 17 bp, synthetic construct
  source 1..17: mol_type = other DNA
gtcccaaaactcttccc

SEQ ID NO: 16972 - DNA, 17 bp, synthetic construct
  source 1..17: mol_type = other DNA
tcccaaaactcttccca

SEQ ID NO: 16973 - DNA, 17 bp, synthetic construct
  source 1..17: mol_type = other DNA
ctctcatgccctttgct

SEQ ID NO: 16974 - DNA, 17 bp, synthetic construct
  source 1..17: mol_type = other DNA
cccaaaactcttcccaa

SEQ ID NO: 16975 - DNA, 17 bp, synthetic construct
  source 1..17: mol_type = other DNA
tctcatgccctttgctg

SEQ ID NO: 16976 - DNA, 17 bp, synthetic construct
  source 1..17: mol_type = other DNA
ccaaaactcttcccaag

SEQ ID NO: 16977 - DNA, 17 bp, synthetic construct
  source 1..17: mol_type = other DNA
ctcatgccctttgctgt

SEQ ID NO: 16978 - DNA, 17 bp, synthetic construct
  source 1..17: mol_type = other DNA
caaaactcttcccaagg

SEQ ID NO: 16979 - DNA, 17 bp, synthetic construct
  source 1..17: mol_type = other DNA
tcatgccctttgctgtg

SEQ ID NO: 16980 - DNA, 17 bp, synthetic construct
  source 1..17: mol_type = other DNA
catgccctttgctgtgc

SEQ ID NO: 16981 - DNA, 17 bp, synthetic construct
  source 1..17: mol_type = other DNA
aaaactcttcccaagga

SEQ ID NO: 16982 - DNA, 17 bp, synthetic construct
  source 1..17: mol_type = other DNA
atgccctttgctgtgcc

SEQ ID NO: 16983 - DNA, 17 bp, synthetic construct
  source 1..17: mol_type = other DNA
aaactcttcccaaggaa

SEQ ID NO: 16984 - DNA, 17 bp, synthetic construct
  source 1..17: mol_type = other DNA
tgccctttgctgtgccc

SEQ ID NO: 16985 - DNA, 17 bp, synthetic construct
  source 1..17: mol_type = other DNA
aactcttcccaaggaat

SEQ ID NO: 16986 - DNA, 17 bp, synthetic construct
  source 1..17: mol_type = other DNA
actcttcccaaggaatg

SEQ ID NO: 16987 - DNA, 17 bp, synthetic construct
  source 1..17: mol_type = other DNA
gccctttgctgtgccca

SEQ ID NO: 16988 - DNA, 17 bp, synthetic construct
  source 1..17: mol_type = other DNA
ctcttcccaaggaatgg

SEQ ID NO: 16989 - DNA, 17 bp, synthetic construct
  source 1..17: mol_type = other DNA
ccctttgctgtgcccaa

SEQ ID NO: 16990 - DNA, 17 bp, synthetic construct
  source 1..17: mol_type = other DNA
tcttcccaaggaatggc

SEQ ID NO: 16991 - DNA, 17 bp, synthetic construct
  source 1..17: mol_type = other DNA
cctttgctgtgcccaac

SEQ ID NO: 16992 - DNA, 17 bp, synthetic construct
  source 1..17: mol_type = other DNA
ctttgctgtgcccaacc

SEQ ID NO: 16993 - DNA, 17 bp, synthetic construct
  source 1..17: mol_type = other DNA
cttcccaaggaatggcc

SEQ ID NO: 16994 - DNA, 17 bp, synthetic construct
  source 1..17: mol_type = other DNA
tttgctgtgcccaaccc

SEQ ID NO: 16995 - DNA, 17 bp, synthetic construct
  source 1..17: mol_type = other DNA
ttcccaaggaatggccc

SEQ ID NO: 16996 - DNA, 17 bp, synthetic construct
  source 1..17: mol_type = other DNA
tcccaaggaatggcccg

SEQ ID NO: 16997 - DNA, 17 bp, synthetic construct
  source 1..17: mol_type = other DNA
ttgctgtgcccaacccg

SEQ ID NO: 16998 - DNA, 17 bp, synthetic construct
  source 1..17: mol_type = other DNA
cccaaggaatggcccga

SEQ ID NO: 16999 - DNA, 17 bp, synthetic construct
  source 1..17: mol_type = other DNA
tgctgtgcccaacccga

SEQ ID NO: 17000 - DNA, 17 bp, synthetic construct
  source 1..17: mol_type = other DNA
ccaaggaatggcccgag

SEQ ID NO: 17001 - DNA, 17 bp, synthetic construct
  source 1..17: mol_type = other DNA
gctgtgcccaacccgaa

SEQ ID NO: 17002 - DNA, 51 bp, synthetic construct
  source 1..51: mol_type = other DNA
cctgcggccgggggacctcctggcttctgggaccatcagcgggccggtgag

SEQ ID NO: 17003 - DNA, 52 bp, synthetic construct
  source 1..52: mol_type = other DNA
tgtggggagcagggatgctctgcgtgggcagccctcagtgcagccagatact

SEQ ID NO: 17004 - DNA, 52 bp, synthetic construct
  source 1..52: mol_type = other DNA
cctgcggccgggggacctcctggcttctgggaccatcagcgggccggtgagt

SEQ ID NO: 17005 - DNA, 53 bp, synthetic construct
  source 1..53: mol_type = other DNA
tgtggggagcagggatgctctgcgtgggcagccctcagtgcagccagatactc

SEQ ID NO: 17006 - DNA, 53 bp, synthetic construct
  source 1..53: mol_type = other DNA
cctgcggccgggggacctcctggcttctgggaccatcagcgggccggtgagta

SEQ ID NO: 17007 - DNA, 54 bp, synthetic construct
  source 1..54: mol_type = other DNA
cctgcggccgggggacctcctggcttctgggaccatcagcgggccggtgagtat

SEQ ID NO: 17008 - DNA, 54 bp, synthetic construct
  source 1..54: mol_type = other DNA
tgtggggagcagggatgctctgcgtgggcagccctcagtgcagccagatactca

SEQ ID NO: 17009 - DNA, 55 bp, synthetic construct
  source 1..55: mol_type = other DNA
tgtggggagcagggatgctctgcgtgggcagccctcagtgcagccagatactcac

SEQ ID NO: 17010 - DNA, 55 bp, synthetic construct
  source 1..55: mol_type = other DNA
cctgcggccgggggacctcctggcttctgggaccatcagcgggccggtgagtatc

SEQ ID NO: 17011 - DNA, 56 bp, synthetic construct
  source 1..56: mol_type = other DNA
tgtggggagcagggatgctctgcgtgggcagccctcagtgcagccagatactcacc

SEQ ID NO: 17012 - DNA, 56 bp, synthetic construct
  source 1..56: mol_type = other DNA
cctgcggccgggggacctcctggcttctgggaccatcagcgggccggtgagtatct

SEQ ID NO: 17013 - DNA, 57 bp, synthetic construct
  source 1..57: mol_type = other DNA
tgtggggagcagggatgctctgcgtgggcagccctcagtgcagccagatactcaccg

SEQ ID NO: 17014 - DNA, 57 bp, synthetic construct
  source 1..57: mol_type = other DNA
cctgcggccgggggacctcctggcttctgggaccatcagcgggccggtgagtatctg

SEQ ID NO: 17015 - DNA, 58 bp, synthetic construct
  source 1..58: mol_type = other DNA
tgtggggagcagggatgctctgcgtgggcagccctcagtgcagccagatactcaccgg

SEQ ID NO: 17016 - DNA, 58 bp, synthetic construct
  source 1..58: mol_type = other DNA
cctgcggccgggggacctcctggcttctgggaccatcagcgggccggtgagtatctgg

SEQ ID NO: 17017 - DNA, 59 bp, synthetic construct
  source 1..59: mol_type = other DNA
cctgcggccgggggacctcctggcttctgggaccatcagcgggccggtgagtatctggc

SEQ ID NO: 17018 - DNA, 59 bp, synthetic construct
  source 1..59: mol_type = other DNA
tgtggggagcagggatgctctgcgtgggcagccctcagtgcagccagatactcaccggc

SEQ ID NO: 17019 - DNA, 60 bp, synthetic construct
  source 1..60: mol_type = other DNA
tgtggggagcagggatgctctgcgtgggcagccctcagtgcagccagatactcaccggcc

SEQ ID NO: 17020 - DNA, 60 bp, synthetic construct
  source 1..60: mol_type = other DNA
cctgcggccgggggacctcctggcttctgggaccatcagcgggccggtgagtatctggct

SEQ ID NO: 17021 - DNA, 61 bp, synthetic construct
  source 1..61: mol_type = other DNA
cctgcggccgggggacctcctggcttctgggaccatcagcgggccggtgagtatctggctg

SEQ ID NO: 17022 - DNA, 61 bp, synthetic construct
  source 1..61: mol_type = other DNA
tgtggggagcagggatgctctgcgtgggcagccctcagtgcagccagatactcaccggccc

SEQ ID NO: 17023 - DNA, 62 bp, synthetic construct
  source 1..62: mol_type = other DNA
tgtggggagcagggatgctctgcgtgggcagccctcagtgcagccagatactcaccggcccg

SEQ ID NO: 17024 - DNA, 62 bp, synthetic construct
  source 1..62: mol_type = other DNA
cctgcggccgggggacctcctggcttctgggaccatcagcgggccggtgagtatctggctgc

SEQ ID NO: 17025 - DNA, 63 bp, synthetic construct
  source 1..63: mol_type = other DNA
tgtggggagcagggatgctctgcgtgggcagccctcagtgcagccagatactcaccggcccgc

SEQ ID NO: 17026 - DNA, 63 bp, synthetic construct
  source 1..63: mol_type = other DNA
cctgcggccgggggacctcctggcttctgggaccatcagcgggccggtgagtatctggctgca

SEQ ID NO: 17027 - DNA, 64 bp, synthetic construct
  source 1..64: mol_type = other DNA
tgtggggagcagggatgctctgcgtgggcagccctcagtgcagccagatactcaccggcccgct

SEQ ID NO: 17028 - DNA, 64 bp, synthetic construct
  source 1..64: mol_type = other DNA
cctgcggccgggggacctcctggcttctgggaccatcagcgggccggtgagtatctggctgcac

SEQ ID NO: 17029 - DNA, 65 bp, synthetic construct
  source 1..65: mol_type = other DNA
tgtggggagcagggatgctctgcgtgggcagccctcagtgcagccagatactcaccggcccgctg

SEQ ID NO: 17030 - DNA, 65 bp, synthetic construct
  source 1..65: mol_type = other DNA
cctgcggccgggggacctcctggcttctgggaccatcagcgggccggtgagtatctggctgcact

SEQ ID NO: 17031 - DNA, 66 bp, synthetic construct
  source 1..66: mol_type = other DNA
tgtggggagcagggatgctctgcgtgggcagccctcagtgcagccagatactcaccggcccgctga

SEQ ID NO: 17032 - DNA, 66 bp, synthetic construct
  source 1..66: mol_type = other DNA
cctgcggccgggggacctcctggcttctgggaccatcagcgggccggtgagtatctggctgcactg

SEQ ID NO: 17033 - DNA, 67 bp, synthetic construct
  source 1..67: mol_type = other DNA
tgtggggagcagggatgctctgcgtgggcagccctcagtgcagccagatactcaccggcccgctgat

SEQ ID NO: 17034 - DNA, 67 bp, synthetic construct
  source 1..67: mol_type = other DNA
cctgcggccgggggacctcctggcttctgggaccatcagcgggccggtgagtatctggctgcactga

SEQ ID NO: 17035 - DNA, 68 bp, synthetic construct
  source 1..68: mol_type = other DNA
tgtggggagcagggatgctctgcgtgggcagccctcagtgcagccagatactcaccggcccgctgatg

SEQ ID NO: 17036 - DNA, 68 bp, synthetic construct
  source 1..68: mol_type = other DNA
cctgcggccgggggacctcctggcttctgggaccatcagcgggccggtgagtatctggctgcactgag

SEQ ID NO: 17037 - DNA, 69 bp, synthetic construct
  source 1..69: mol_type = other DNA
tgtggggagcagggatgctctgcgtgggcagccctcagtgcagccagatactcaccggcccgctgatgg

SEQ ID NO: 17038 - DNA, 69 bp, synthetic construct
  source 1..69: mol_type = other DNA
cctgcggccgggggacctcctggcttctgggaccatcagcgggccggtgagtatctggctgcactgagg

SEQ ID NO: 17039 - DNA, 70 bp, synthetic construct
  source 1..70: mol_type = other DNA
tgtggggagcagggatgctctgcgtgggcagccctcagtgcagccagatactcaccggcccgctgatggt

SEQ ID NO: 17040 - DNA, 70 bp, synthetic construct
  source 1..70: mol_type = other DNA
cctgcggccgggggacctcctggcttctgggaccatcagcgggccggtgagtatctggctgcactgaggg

SEQ ID NO: 17041 - DNA, 71 bp, synthetic construct
  source 1..71: mol_type = other DNA
cctgcggccgggggacctcctggcttctgggaccatcagcgggccggtgagtatctggctgcactgagggc

SEQ ID NO: 17042 - DNA, 71 bp, synthetic construct
  source 1..71: mol_type = other DNA
tgtggggagcagggatgctctgcgtgggcagccctcagtgcagccagatactcaccggcccgctgatggtc

SEQ ID NO: 17043 - DNA, 72 bp, synthetic construct
  source 1..72: mol_type = other DNA
tgtggggagcagggatgctctgcgtgggcagccctcagtgcagccagatactcaccggcccgctgatggtcc

SEQ ID NO: 17044 - DNA, 72 bp, synthetic construct
  source 1..72: mol_type = other DNA
cctgcggccgggggacctcctggcttctgggaccatcagcgggccggtgagtatctggctgcactgagggct

SEQ ID NO: 17045 - DNA, 73 bp, synthetic construct
  source 1..73: mol_type = other DNA
tgtggggagcagggatgctctgcgtgggcagccctcagtgcagccagatactcaccggcccgctgatggtccc

SEQ ID NO: 17046 - DNA, 73 bp, synthetic construct
  source 1..73: mol_type = other DNA
cctgcggccgggggacctcctggcttctgggaccatcagcgggccggtgagtatctggctgcactgagggctg

SEQ ID NO: 17047 - DNA, 74 bp, synthetic construct
  source 1..74: mol_type = other DNA
tgtggggagcagggatgctctgcgtgggcagccctcagtgcagccagatactcaccggcccgctgatggtccca

SEQ ID NO: 17048 - DNA, 74 bp, synthetic construct
  source 1..74: mol_type = other DNA
cctgcggccgggggacctcctggcttctgggaccatcagcgggccggtgagtatctggctgcactgagggctgc

SEQ ID NO: 17049 - DNA, 75 bp, synthetic construct
  source 1..75: mol_type = other DNA
tgtggggagcagggatgctctgcgtgggcagccctcagtgcagccagatactcaccggcccgctgatggtcccag

SEQ ID NO: 17050 - DNA, 75 bp, synthetic construct
  source 1..75: mol_type = other DNA
cctgcggccgggggacctcctggcttctgggaccatcagcgggccggtgagtatctggctgcactgagggctgcc

SEQ ID NO: 17051 - DNA, 76 bp, synthetic construct
  source 1..76: mol_type = other DNA
tgtggggagcagggatgctctgcgtgggcagccctcagtgcagccagatactcaccggcccgctgatggtcccaga

SEQ ID NO: 17052 - DNA, 76 bp, synthetic construct
  source 1..76: mol_type = other DNA
cctgcggccgggggacctcctggcttctgggaccatcagcgggccggtgagtatctggctgcactgagggctgccc

SEQ ID NO: 17053 - DNA, 77 bp, synthetic construct
  source 1..77: mol_type = other DNA
cctgcggccgggggacctcctggcttctgggaccatcagcgggccggtgagtatctggctgcactgagggctgccca

SEQ ID NO: 17054 - DNA, 77 bp, synthetic construct
  source 1..77: mol_type = other DNA
tgtggggagcagggatgctctgcgtgggcagccctcagtgcagccagatactcaccggcccgctgatggtcccagaa

SEQ ID NO: 17055 - DNA, 78 bp, synthetic construct
  source 1..78: mol_type = other DNA
tgtggggagcagggatgctctgcgtgggcagccctcagtgcagccagatactcaccggcccgctgatggtcccagaag

SEQ ID NO: 17056 - DNA, 78 bp, synthetic construct
  source 1..78: mol_type = other DNA
cctgcggccgggggacctcctggcttctgggaccatcagcgggccggtgagtatctggctgcactgagggctgcccac

SEQ ID NO: 17057 - DNA, 79 bp, synthetic construct
  source 1..79: mol_type = other DNA
tgtggggagcagggatgctctgcgtgggcagccctcagtgcagccagatactcaccggcccgctgatggtcccagaagc

SEQ ID NO: 17058 - DNA, 79 bp, synthetic construct
  source 1..79: mol_type = other DNA
cctgcggccgggggacctcctggcttctgggaccatcagcgggccggtgagtatctggctgcactgagggctgcccacg

SEQ ID NO: 17059 - DNA, 80 bp, synthetic construct
  source 1..80: mol_type = other DNA
cctgcggccgggggacctcctggcttctgggaccatcagcgggccggtgagtatctggctgcactgagggctgcccacgc

SEQ ID NO: 17060 - DNA, 80 bp, synthetic construct
  source 1..80: mol_type = other DNA
tgtggggagcagggatgctctgcgtgggcagccctcagtgcagccagatactcaccggcccgctgatggtcccagaagcc

SEQ ID NO: 17061 - DNA, 81 bp, synthetic construct
  source 1..81: mol_type = other DNA
cctgcggccgggggacctcctggcttctgggaccatcagcgggccggtgagtatctggctgcactgagggctgcccacgca

SEQ ID NO: 17062 - DNA, 81 bp, synthetic construct
  source 1..81: mol_type = other DNA
tgtggggagcagggatgctctgcgtgggcagccctcagtgcagccagatactcaccggcccgctgatggtcccagaagcca

SEQ ID NO: 17063 - DNA, 17 bp, synthetic construct
  source 1..17: mol_type = other DNA
tatctggctgcactgag

SEQ ID NO: 17064 - DNA, 17 bp, synthetic construct
  source 1..17: mol_type = other DNA
caccggcccgctgatgg

SEQ ID NO: 17065 - DNA, 17 bp, synthetic construct
  source 1..17: mol_type = other DNA
atctggctgcactgagg

SEQ ID NO: 17066 - DNA, 17 bp, synthetic construct
  source 1..17: mol_type = other DNA
accggcccgctgatggt

SEQ ID NO: 17067 - DNA, 17 bp, synthetic construct
  source 1..17: mol_type = other DNA
tctggctgcactgaggg

SEQ ID NO: 17068 - DNA, 17 bp, synthetic construct
  source 1..17: mol_type = other DNA
ctggctgcactgagggc

SEQ ID NO: 17069 - DNA, 17 bp, synthetic construct
  source 1..17: mol_type = other DNA
ccggcccgctgatggtc

SEQ ID NO: 17070 - DNA, 17 bp, synthetic construct
  source 1..17: mol_type = other DNA
cggcccgctgatggtcc

SEQ ID NO: 17071 - DNA, 17 bp, synthetic construct
  source 1..17: mol_type = other DNA
tggctgcactgagggct

SEQ ID NO: 17072 - DNA, 17 bp, synthetic construct
  source 1..17: mol_type = other DNA
ggcccgctgatggtccc

SEQ ID NO: 17073 - DNA, 17 bp, synthetic construct
  source 1..17: mol_type = other DNA
ggctgcactgagggctg

SEQ ID NO: 17074 - DNA, 17 bp, synthetic construct
  source 1..17: mol_type = other DNA
gcccgctgatggtccca

SEQ ID NO: 17075 - DNA, 17 bp, synthetic construct
  source 1..17: mol_type = other DNA
gctgcactgagggctgc

SEQ ID NO: 17076 - DNA, 17 bp, synthetic construct
  source 1..17: mol_type = other DNA
cccgctgatggtcccag

SEQ ID NO: 17077 - DNA, 17 bp, synthetic construct
  source 1..17: mol_type = other DNA
ctgcactgagggctgcc

SEQ ID NO: 17078 - DNA, 17 bp, synthetic construct
  source 1..17: mol_type = other DNA
tgcactgagggctgccc

SEQ ID NO: 17079 - DNA, 17 bp, synthetic construct
  source 1..17: mol_type = other DNA
ccgctgatggtcccaga

SEQ ID NO: 17080 - DNA, 17 bp, synthetic construct
  source 1..17: mol_type = other DNA
cgctgatggtcccagaa

SEQ ID NO: 17081 - DNA, 17 bp, synthetic construct
  source 1..17: mol_type = other DNA
gcactgagggctgccca

SEQ ID NO: 17082 - DNA, 17 bp, synthetic construct
  source 1..17: mol_type = other DNA
cactgagggctgcccac

SEQ ID NO: 17083 - DNA, 17 bp, synthetic construct
  source 1..17: mol_type = other DNA
gctgatggtcccagaag

SEQ ID NO: 17084 - DNA, 17 bp, synthetic construct
  source 1..17: mol_type = other DNA
ctgatggtcccagaagc

SEQ ID NO: 17085 - DNA, 17 bp, synthetic construct
  source 1..17: mol_type = other DNA
actgagggctgcccacg

SEQ ID NO: 17086 - DNA, 17 bp, synthetic construct
  source 1..17: mol_type = other DNA
tgatggtcccagaagcc

SEQ ID NO: 17087 - DNA, 17 bp, synthetic construct
  source 1..17: mol_type = other DNA
ctgagggctgcccacgc

SEQ ID NO: 17088 - DNA, 17 bp, synthetic construct
  source 1..17: mol_type = other DNA
gatggtcccagaagcca

SEQ ID NO: 17089 - DNA, 17 bp, synthetic construct
  source 1..17: mol_type = other DNA
tgagggctgcccacgca

SEQ ID NO: 17090 - DNA, 17 bp, synthetic construct
  source 1..17: mol_type = other DNA
atggtcccagaagccag

SEQ ID NO: 17091 - DNA, 17 bp, synthetic construct
  source 1..17: mol_type = other DNA
gagggctgcccacgcag

SEQ ID NO: 17092 - DNA, 17 bp, synthetic construct
  source 1..17: mol_type = other DNA
tggtcccagaagccagg

SEQ ID NO: 17093 - DNA, 17 bp, synthetic construct
  source 1..17: mol_type = other DNA
agggctgcccacgcaga

SEQ ID NO: 17094 - DNA, 17 bp, synthetic construct
  source 1..17: mol_type = other DNA
ggtcccagaagccagga

SEQ ID NO: 17095 - DNA, 17 bp, synthetic construct
  source 1..17: mol_type = other DNA
gggctgcccacgcagag

SEQ ID NO: 17096 - DNA, 17 bp, synthetic construct
  source 1..17: mol_type = other DNA
gtcccagaagccaggag

SEQ ID NO: 17097 - DNA, 17 bp, synthetic construct
  source 1..17: mol_type = other DNA
ggctgcccacgcagagc

SEQ ID NO: 17098 - DNA, 17 bp, synthetic construct
  source 1..17: mol_type = other DNA
tcccagaagccaggagg

SEQ ID NO: 17099 - DNA, 17 bp, synthetic construct
  source 1..17: mol_type = other DNA
gctgcccacgcagagca

SEQ ID NO: 17100 - DNA, 17 bp, synthetic construct
  source 1..17: mol_type = other DNA
cccagaagccaggaggt

SEQ ID NO: 17101 - DNA, 17 bp, synthetic construct
  source 1..17: mol_type = other DNA
ctgcccacgcagagcat

SEQ ID NO: 17102 - DNA, 17 bp, synthetic construct
  source 1..17: mol_type = other DNA
tgcccacgcagagcatc

SEQ ID NO: 17103 - DNA, 17 bp, synthetic construct
  source 1..17: mol_type = other DNA
ccagaagccaggaggtc

SEQ ID NO: 17104 - DNA, 17 bp, synthetic construct
  source 1..17: mol_type = other DNA
cagaagccaggaggtcc

SEQ ID NO: 17105 - DNA, 17 bp, synthetic construct
  source 1..17: mol_type = other DNA
gcccacgcagagcatcc

SEQ ID NO: 17106 - DNA, 17 bp, synthetic construct
  source 1..17: mol_type = other DNA
agaagccaggaggtccc

SEQ ID NO: 17107 - DNA, 17 bp, synthetic construct
  source 1..17: mol_type = other DNA
cccacgcagagcatccc

SEQ ID NO: 17108 - DNA, 17 bp, synthetic construct
  source 1..17: mol_type = other DNA
gaagccaggaggtcccc

SEQ ID NO: 17109 - DNA, 17 bp, synthetic construct
  source 1..17: mol_type = other DNA
ccacgcagagcatccct

SEQ ID NO: 17110 - DNA, 17 bp, synthetic construct
  source 1..17: mol_type = other DNA
aagccaggaggtccccc

SEQ ID NO: 17111 - DNA, 17 bp, synthetic construct
  source 1..17: mol_type = other DNA
cacgcagagcatccctg

SEQ ID NO: 17112 - DNA, 17 bp, synthetic construct
  source 1..17: mol_type = other DNA
agccaggaggtcccccg

SEQ ID NO: 17113 - DNA, 17 bp, synthetic construct
  source 1..17: mol_type = other DNA
acgcagagcatccctgc

SEQ ID NO: 17114 - DNA, 17 bp, synthetic construct
  source 1..17: mol_type = other DNA
cgcagagcatccctgct

SEQ ID NO: 17115 - DNA, 17 bp, synthetic construct
  source 1..17: mol_type = other DNA
gccaggaggtcccccgg

SEQ ID NO: 17116 - DNA, 17 bp, synthetic construct
  source 1..17: mol_type = other DNA
ccaggaggtcccccggc

SEQ ID NO: 17117 - DNA, 17 bp, synthetic construct
  source 1..17: mol_type = other DNA
gcagagcatccctgctc

SEQ ID NO: 17118 - DNA, 17 bp, synthetic construct
  source 1..17: mol_type = other DNA
caggaggtcccccggcc

SEQ ID NO: 17119 - DNA, 17 bp, synthetic construct
  source 1..17: mol_type = other DNA
cagagcatccctgctcc

SEQ ID NO: 17120 - DNA, 17 bp, synthetic construct
  source 1..17: mol_type = other DNA
agagcatccctgctccc

SEQ ID NO: 17121 - DNA, 17 bp, synthetic construct
  source 1..17: mol_type = other DNA
aggaggtcccccggccg

SEQ ID NO: 17122 - DNA, 17 bp, synthetic construct
  source 1..17: mol_type = other DNA
gagcatccctgctcccc

SEQ ID NO: 17123 - DNA, 17 bp, synthetic construct
  source 1..17: mol_type = other DNA
ggaggtcccccggccgc

SEQ ID NO: 17124 - DNA, 51 bp, synthetic construct
  source 1..51: mol_type = other DNA
tgtggcctcactcacagcaccgttttttttttttttctggtgttattccag

SEQ ID NO: 17125 - DNA, 52 bp, synthetic construct
  source 1..52: mol_type = other DNA
ttccagctccatgtccaagagcttgcaggcaccatatacgggaggcttagct

SEQ ID NO: 17126 - DNA, 52 bp, synthetic construct
  source 1..52: mol_type = other DNA
tgtggcctcactcacagcaccgttttttttttttttctggtgttattccagc

SEQ ID NO: 17127 - DNA, 53 bp, synthetic construct
  source 1..53: mol_type = other DNA
tgtggcctcactcacagcaccgttttttttttttttctggtgttattccagct

SEQ ID NO: 17128 - DNA, 53 bp, synthetic construct
  source 1..53: mol_type = other DNA
ttccagctccatgtccaagagcttgcaggcaccatatacgggaggcttagctg

SEQ ID NO: 17129 - DNA, 54 bp, synthetic construct
  source 1..54: mol_type = other DNA
tgtggcctcactcacagcaccgttttttttttttttctggtgttattccagcta

SEQ ID NO: 17130 - DNA, 54 bp, synthetic construct
  source 1..54: mol_type = other DNA
ttccagctccatgtccaagagcttgcaggcaccatatacgggaggcttagctgg

SEQ ID NO: 17131 - DNA, 55 bp, synthetic construct
  source 1..55: mol_type = other DNA
tgtggcctcactcacagcaccgttttttttttttttctggtgttattccagctaa

SEQ ID NO: 17132 - DNA, 55 bp, synthetic construct
  source 1..55: mol_type = other DNA
ttccagctccatgtccaagagcttgcaggcaccatatacgggaggcttagctgga

SEQ ID NO: 17133 - DNA, 56 bp, synthetic construct
  source 1..56: mol_type = other DNA
tgtggcctcactcacagcaccgttttttttttttttctggtgttattccagctaag

SEQ ID NO: 17134 - DNA, 56 bp, synthetic construct
  source 1..56: mol_type = other DNA
ttccagctccatgtccaagagcttgcaggcaccatatacgggaggcttagctggaa

SEQ ID NO: 17135 - DNA, 57 bp, synthetic construct
  source 1..57: mol_type = other DNA
tgtggcctcactcacagcaccgttttttttttttttctggtgttattccagctaagc

SEQ ID NO: 17136 - DNA, 57 bp, synthetic construct
  source 1..57: mol_type = other DNA
ttccagctccatgtccaagagcttgcaggcaccatatacgggaggcttagctggaat

SEQ ID NO: 17137 - DNA, 58 bp, synthetic construct
  source 1..58: mol_type = other DNA
tgtggcctcactcacagcaccgttttttttttttttctggtgttattccagctaagcc

SEQ ID NO: 17138 - DNA, 58 bp, synthetic construct
  source 1..58: mol_type = other DNA
ttccagctccatgtccaagagcttgcaggcaccatatacgggaggcttagctggaata

SEQ ID NO: 17139 - DNA, 59 bp, synthetic construct
  source 1..59: mol_type = other DNA
tgtggcctcactcacagcaccgttttttttttttttctggtgttattccagctaagcct

SEQ ID NO: 17140 - DNA, 59 bp, synthetic construct
  source 1..59: mol_type = other DNA
ttccagctccatgtccaagagcttgcaggcaccatatacgggaggcttagctggaataa

SEQ ID NO: 17141 - DNA, 60 bp, synthetic construct
  source 1..60: mol_type = other DNA
ttccagctccatgtccaagagcttgcaggcaccatatacgggaggcttagctggaataac

SEQ ID NO: 17142 - DNA, 60 bp, synthetic construct
  source 1..60: mol_type = other DNA
tgtggcctcactcacagcaccgttttttttttttttctggtgttattccagctaagcctc

SEQ ID NO: 17143 - DNA, 61 bp, synthetic construct
  source 1..61: mol_type = other DNA
ttccagctccatgtccaagagcttgcaggcaccatatacgggaggcttagctggaataaca

SEQ ID NO: 17144 - DNA, 61 bp, synthetic construct
  source 1..61: mol_type = other DNA
tgtggcctcactcacagcaccgttttttttttttttctggtgttattccagctaagcctcc

SEQ ID NO: 17145 - DNA, 62 bp, synthetic construct
  source 1..62: mol_type = other DNA
tgtggcctcactcacagcaccgttttttttttttttctggtgttattccagctaagcctccc

SEQ ID NO: 17146 - DNA, 62 bp, synthetic construct
  source 1..62: mol_type = other DNA
ttccagctccatgtccaagagcttgcaggcaccatatacgggaggcttagctggaataacac

SEQ ID NO: 17147 - DNA, 63 bp, synthetic construct
  source 1..63: mol_type = other DNA
tgtggcctcactcacagcaccgttttttttttttttctggtgttattccagctaagcctcccg

SEQ ID NO: 17148 - DNA, 63 bp, synthetic construct
  source 1..63: mol_type = other DNA
ttccagctccatgtccaagagcttgcaggcaccatatacgggaggcttagctggaataacacc

SEQ ID NO: 17149 - DNA, 64 bp, synthetic construct
  source 1..64: mol_type = other DNA
ttccagctccatgtccaagagcttgcaggcaccatatacgggaggcttagctggaataacacca

SEQ ID NO: 17150 - DNA, 64 bp, synthetic construct
  source 1..64: mol_type = other DNA
tgtggcctcactcacagcaccgttttttttttttttctggtgttattccagctaagcctcccgt

SEQ ID NO: 17151 - DNA, 65 bp, synthetic construct
  source 1..65: mol_type = other DNA
tgtggcctcactcacagcaccgttttttttttttttctggtgttattccagctaagcctcccgta

SEQ ID NO: 17152 - DNA, 65 bp, synthetic construct
  source 1..65: mol_type = other DNA
ttccagctccatgtccaagagcttgcaggcaccatatacgggaggcttagctggaataacaccag

SEQ ID NO: 17153 - DNA, 66 bp, synthetic construct
  source 1..66: mol_type = other DNA
tgtggcctcactcacagcaccgttttttttttttttctggtgttattccagctaagcctcccgtat

SEQ ID NO: 17154 - DNA, 66 bp, synthetic construct
  source 1..66: mol_type = other DNA
ttccagctccatgtccaagagcttgcaggcaccatatacgggaggcttagctggaataacaccaga

SEQ ID NO: 17155 - DNA, 67 bp, synthetic construct
  source 1..67: mol_type = other DNA
ttccagctccatgtccaagagcttgcaggcaccatatacgggaggcttagctggaataacaccagaa

SEQ ID NO: 17156 - DNA, 67 bp, synthetic construct
  source 1..67: mol_type = other DNA
tgtggcctcactcacagcaccgttttttttttttttctggtgttattccagctaagcctcccgtata

SEQ ID NO: 17157 - DNA, 68 bp, synthetic construct
  source 1..68: mol_type = other DNA
tgtggcctcactcacagcaccgttttttttttttttctggtgttattccagctaagcctcccgtatat

SEQ ID NO: 17158 - DNA, 68 bp, synthetic construct
  source 1..68: mol_type = other DNA
ttccagctccatgtccaagagcttgcaggcaccatatacgggaggcttagctggaataacaccagaaa

SEQ ID NO: 17159 - DNA, 69 bp, synthetic construct
  source 1..69: mol_type = other DNA
ttccagctccatgtccaagagcttgcaggcaccatatacgggaggcttagctggaataacaccagaaaa

SEQ ID NO: 17160 - DNA, 69 bp, synthetic construct
  source 1..69: mol_type = other DNA
tgtggcctcactcacagcaccgttttttttttttttctggtgttattccagctaagcctcccgtatatg

SEQ ID NO: 17161 - DNA, 70 bp, synthetic construct
  source 1..70: mol_type = other DNA
ttccagctccatgtccaagagcttgcaggcaccatatacgggaggcttagctggaataacaccagaaaaa

SEQ ID NO: 17162 - DNA, 70 bp, synthetic construct
  source 1..70: mol_type = other DNA
tgtggcctcactcacagcaccgttttttttttttttctggtgttattccagctaagcctcccgtatatgg

SEQ ID NO: 17163 - DNA, 71 bp, synthetic construct
  source 1..71: mol_type = other DNA
ttccagctccatgtccaagagcttgcaggcaccatatacgggaggcttagctggaataacaccagaaaaaa

SEQ ID NO: 17164 - DNA, 71 bp, synthetic construct
  source 1..71: mol_type = other DNA
tgtggcctcactcacagcaccgttttttttttttttctggtgttattccagctaagcctcccgtatatggt

SEQ ID NO: 17165 - DNA, 72 bp, synthetic construct
  source 1..72: mol_type = other DNA
ttccagctccatgtccaagagcttgcaggcaccatatacgggaggcttagctggaataacaccagaaaaaaa

SEQ ID NO: 17166 - DNA, 72 bp, synthetic construct
  source 1..72: mol_type = other DNA
tgtggcctcactcacagcaccgttttttttttttttctggtgttattccagctaagcctcccgtatatggtg

SEQ ID NO: 17167 - DNA, 73 bp, synthetic construct
  source 1..73: mol_type = other DNA
ttccagctccatgtccaagagcttgcaggcaccatatacgggaggcttagctggaataacaccagaaaaaaaa

SEQ ID NO: 17168 - DNA, 73 bp, synthetic construct
  source 1..73: mol_type = other DNA
tgtggcctcactcacagcaccgttttttttttttttctggtgttattccagctaagcctcccgtatatggtgc

SEQ ID NO: 17169 - DNA, 74 bp, synthetic construct
  source 1..74: mol_type = other DNA
ttccagctccatgtccaagagcttgcaggcaccatatacgggaggcttagctggaataacaccagaaaaaaaaa

SEQ ID NO: 17170 - DNA, 74 bp, synthetic construct
  source 1..74: mol_type = other DNA
tgtggcctcactcacagcaccgttttttttttttttctggtgttattccagctaagcctcccgtatatggtgcc

SEQ ID NO: 17171 - DNA, 75 bp, synthetic construct
  source 1..75: mol_type = other DNA
ttccagctccatgtccaagagcttgcaggcaccatatacgggaggcttagctggaataacaccagaaaaaaaaaa

SEQ ID NO: 17172 - DNA, 75 bp, synthetic construct
  source 1..75: mol_type = other DNA
tgtggcctcactcacagcaccgttttttttttttttctggtgttattccagctaagcctcccgtatatggtgcct

SEQ ID NO: 17173 - DNA, 76 bp, synthetic construct
  source 1..76: mol_type = other DNA
ttccagctccatgtccaagagcttgcaggcaccatatacgggaggcttagctggaataacaccagaaaaaaaaaaa

SEQ ID NO: 17174 - DNA, 76 bp, synthetic construct
  source 1..76: mol_type = other DNA
tgtggcctcactcacagcaccgttttttttttttttctggtgttattccagctaagcctcccgtatatggtgcctg

SEQ ID NO: 17175 - DNA, 77 bp, synthetic construct
  source 1..77: mol_type = other DNA
tgtggcctcactcacagcaccgttttttttttttttctggtgttattccagctaagcctcccgtatatggtgcctgc

SEQ ID NO: 17176 - DNA, 77 bp, synthetic construct
  source 1..77: mol_type = other DNA
ttccagctccatgtccaagagcttgcaggcaccatatacgggaggcttagctggaataacaccagaaaaaaaaaaaa

SEQ ID NO: 17177 - DNA, 78 bp, synthetic construct
  source 1..78: mol_type = other DNA
tgtggcctcactcacagcaccgttttttttttttttctggtgttattccagctaagcctcccgtatatggtgcctgca

SEQ ID NO: 17178 - DNA, 78 bp, synthetic construct
  source 1..78: mol_type = other DNA
ttccagctccatgtccaagagcttgcaggcaccatatacgggaggcttagctggaataacaccagaaaaaaaaaaaaa

SEQ ID NO: 17179 - DNA, 79 bp, synthetic construct
  source 1..79: mol_type = other DNA
tgtggcctcactcacagcaccgttttttttttttttctggtgttattccagctaagcctcccgtatatggtgcctgcaa

SEQ ID NO: 17180 - DNA, 79 bp, synthetic construct
  source 1..79: mol_type = other DNA
ttccagctccatgtccaagagcttgcaggcaccatatacgggaggcttagctggaataacaccagaaaaaaaaaaaaaa

SEQ ID NO: 17181 - DNA, 80 bp, synthetic construct
  source 1..80: mol_type = other DNA
tgtggcctcactcacagcaccgttttttttttttttctggtgttattccagctaagcctcccgtatatggtgcctgcaag

SEQ ID NO: 17182 - DNA, 80 bp, synthetic construct
  source 1..80: mol_type = other DNA
ttccagctccatgtccaagagcttgcaggcaccatatacgggaggcttagctggaataacaccagaaaaaaaaaaaaaac

SEQ ID NO: 17183 - DNA, 81 bp, synthetic construct
  source 1..81: mol_type = other DNA
tgtggcctcactcacagcaccgttttttttttttttctggtgttattccagctaagcctcccgtatatggtgcctgcaagc

SEQ ID NO: 17184 - DNA, 81 bp, synthetic construct
  source 1..81: mol_type = other DNA
ttccagctccatgtccaagagcttgcaggcaccatatacgggaggcttagctggaataacaccagaaaaaaaaaaaaaacg

SEQ ID NO: 17185 - DNA, 17 bp, synthetic construct
  source 1..17: mol_type = other DNA
ctaagcctcccgtatat

SEQ ID NO: 17186 - DNA, 17 bp, synthetic construct
  source 1..17: mol_type = other DNA
ggaataacaccagaaaa

SEQ ID NO: 17187 - DNA, 17 bp, synthetic construct
  source 1..17: mol_type = other DNA
taagcctcccgtatatg

SEQ ID NO: 17188 - DNA, 17 bp, synthetic construct
  source 1..17: mol_type = other DNA
aagcctcccgtatatgg

SEQ ID NO: 17189 - DNA, 17 bp, synthetic construct
  source 1..17: mol_type = other DNA
gaataacaccagaaaaa

SEQ ID NO: 17190 - DNA, 17 bp, synthetic construct
  source 1..17: mol_type = other DNA
agcctcccgtatatggt

SEQ ID NO: 17191 - DNA, 17 bp, synthetic construct
  source 1..17: mol_type = other DNA
aataacaccagaaaaaa

SEQ ID NO: 17192 - DNA, 17 bp, synthetic construct
  source 1..17: mol_type = other DNA
gcctcccgtatatggtg

SEQ ID NO: 17193 - DNA, 17 bp, synthetic construct
  source 1..17: mol_type = other DNA
ataacaccagaaaaaaa

SEQ ID NO: 17194 - DNA, 17 bp, synthetic construct
  source 1..17: mol_type = other DNA
cctcccgtatatggtgc

SEQ ID NO: 17195 - DNA, 17 bp, synthetic construct
  source 1..17: mol_type = other DNA
taacaccagaaaaaaaa

SEQ ID NO: 17196 - DNA, 17 bp, synthetic construct
  source 1..17: mol_type = other DNA
ctcccgtatatggtgcc

SEQ ID NO: 17197 - DNA, 17 bp, synthetic construct
  source 1..17: mol_type = other DNA
aacaccagaaaaaaaaa

SEQ ID NO: 17198 - DNA, 17 bp, synthetic construct
  source 1..17: mol_type = other DNA
tcccgtatatggtgcct

SEQ ID NO: 17199 - DNA, 17 bp, synthetic construct
  source 1..17: mol_type = other DNA
acaccagaaaaaaaaaa

SEQ ID NO: 17200 - DNA, 17 bp, synthetic construct
  source 1..17: mol_type = other DNA
cccgtatatggtgcctg

SEQ ID NO: 17201 - DNA, 17 bp, synthetic construct
  source 1..17: mol_type = other DNA
caccagaaaaaaaaaaa

SEQ ID NO: 17202 - DNA, 17 bp, synthetic construct
  source 1..17: mol_type = other DNA
accagaaaaaaaaaaaa

SEQ ID NO: 17203 - DNA, 17 bp, synthetic construct
  source 1..17: mol_type = other DNA
ccgtatatggtgcctgc

SEQ ID NO: 17204 - DNA, 17 bp, synthetic construct
  source 1..17: mol_type = other DNA
ccagaaaaaaaaaaaaa

SEQ ID NO: 17205 - DNA, 17 bp, synthetic construct
  source 1..17: mol_type = other DNA
cgtatatggtgcctgca

SEQ ID NO: 17206 - DNA, 17 bp, synthetic construct
  source 1..17: mol_type = other DNA
gtatatggtgcctgcaa

SEQ ID NO: 17207 - DNA, 17 bp, synthetic construct
  source 1..17: mol_type = other DNA
cagaaaaaaaaaaaaaa

SEQ ID NO: 17208 - DNA, 17 bp, synthetic construct
  source 1..17: mol_type = other DNA
tatatggtgcctgcaag

SEQ ID NO: 17209 - DNA, 17 bp, synthetic construct
  source 1..17: mol_type = other DNA
agaaaaaaaaaaaaaac

SEQ ID NO: 17210 - DNA, 17 bp, synthetic construct
  source 1..17: mol_type = other DNA
gaaaaaaaaaaaaaacg

SEQ ID NO: 17211 - DNA, 17 bp, synthetic construct
  source 1..17: mol_type = other DNA
atatggtgcctgcaagc

SEQ ID NO: 17212 - DNA, 17 bp, synthetic construct
  source 1..17: mol_type = other DNA
tatggtgcctgcaagct

SEQ ID NO: 17213 - DNA, 17 bp, synthetic construct
  source 1..17: mol_type = other DNA
aaaaaaaaaaaaaacgg

SEQ ID NO: 17214 - DNA, 17 bp, synthetic construct
  source 1..17: mol_type = other DNA
atggtgcctgcaagctc

SEQ ID NO: 17215 - DNA, 17 bp, synthetic construct
  source 1..17: mol_type = other DNA
aaaaaaaaaaaaacggt

SEQ ID NO: 17216 - DNA, 17 bp, synthetic construct
  source 1..17: mol_type = other DNA
aaaaaaaaaaaacggtg

SEQ ID NO: 17217 - DNA, 17 bp, synthetic construct
  source 1..17: mol_type = other DNA
tggtgcctgcaagctct

SEQ ID NO: 17218 - DNA, 17 bp, synthetic construct
  source 1..17: mol_type = other DNA
ggtgcctgcaagctctt

SEQ ID NO: 17219 - DNA, 17 bp, synthetic construct
  source 1..17: mol_type = other DNA
aaaaaaaaaaacggtgc

SEQ ID NO: 17220 - DNA, 17 bp, synthetic construct
  source 1..17: mol_type = other DNA
aaaaaaaaaacggtgct

SEQ ID NO: 17221 - DNA, 17 bp, synthetic construct
  source 1..17: mol_type = other DNA
gtgcctgcaagctcttg

SEQ ID NO: 17222 - DNA, 17 bp, synthetic construct
  source 1..17: mol_type = other DNA
aaaaaaaaacggtgctg

SEQ ID NO: 17223 - DNA, 17 bp, synthetic construct
  source 1..17: mol_type = other DNA
tgcctgcaagctcttgg

SEQ ID NO: 17224 - DNA, 17 bp, synthetic construct
  source 1..17: mol_type = other DNA
aaaaaaaacggtgctgt

SEQ ID NO: 17225 - DNA, 17 bp, synthetic construct
  source 1..17: mol_type = other DNA
gcctgcaagctcttgga

SEQ ID NO: 17226 - DNA, 17 bp, synthetic construct
  source 1..17: mol_type = other DNA
aaaaaaacggtgctgtg

SEQ ID NO: 17227 - DNA, 17 bp, synthetic construct
  source 1..17: mol_type = other DNA
cctgcaagctcttggac

SEQ ID NO: 17228 - DNA, 17 bp, synthetic construct
  source 1..17: mol_type = other DNA
aaaaaacggtgctgtga

SEQ ID NO: 17229 - DNA, 17 bp, synthetic construct
  source 1..17: mol_type = other DNA
ctgcaagctcttggaca

SEQ ID NO: 17230 - DNA, 17 bp, synthetic construct
  source 1..17: mol_type = other DNA
aaaaacggtgctgtgag

SEQ ID NO: 17231 - DNA, 17 bp, synthetic construct
  source 1..17: mol_type = other DNA
tgcaagctcttggacat

SEQ ID NO: 17232 - DNA, 17 bp, synthetic construct
  source 1..17: mol_type = other DNA
aaaacggtgctgtgagt

SEQ ID NO: 17233 - DNA, 17 bp, synthetic construct
  source 1..17: mol_type = other DNA
gcaagctcttggacatg

SEQ ID NO: 17234 - DNA, 17 bp, synthetic construct
  source 1..17: mol_type = other DNA
aaacggtgctgtgagtg

SEQ ID NO: 17235 - DNA, 17 bp, synthetic construct
  source 1..17: mol_type = other DNA
caagctcttggacatgg

SEQ ID NO: 17236 - DNA, 17 bp, synthetic construct
  source 1..17: mol_type = other DNA
aagctcttggacatgga

SEQ ID NO: 17237 - DNA, 17 bp, synthetic construct
  source 1..17: mol_type = other DNA
aacggtgctgtgagtga

SEQ ID NO: 17238 - DNA, 17 bp, synthetic construct
  source 1..17: mol_type = other DNA
agctcttggacatggag

SEQ ID NO: 17239 - DNA, 17 bp, synthetic construct
  source 1..17: mol_type = other DNA
acggtgctgtgagtgag

SEQ ID NO: 17240 - DNA, 17 bp, synthetic construct
  source 1..17: mol_type = other DNA
gctcttggacatggagc

SEQ ID NO: 17241 - DNA, 17 bp, synthetic construct
  source 1..17: mol_type = other DNA
cggtgctgtgagtgagg

SEQ ID NO: 17242 - DNA, 17 bp, synthetic construct
  source 1..17: mol_type = other DNA
ctcttggacatggagct

SEQ ID NO: 17243 - DNA, 17 bp, synthetic construct
  source 1..17: mol_type = other DNA
ggtgctgtgagtgaggc

SEQ ID NO: 17244 - DNA, 17 bp, synthetic construct
  source 1..17: mol_type = other DNA
tcttggacatggagctg

SEQ ID NO: 17245 - DNA, 17 bp, synthetic construct
  source 1..17: mol_type = other DNA
gtgctgtgagtgaggcc

SEQ ID NO: 17246 - DNA, 21 bp, synthetic construct
  source 1..21: mol_type = other DNA
ccctgatcagcctttgtaagt

SEQ ID NO: 17247 - DNA, 20 bp, synthetic construct
  source 1..20: mol_type = other DNA
tgatcagcctttgtaagtcc

SEQ ID NO: 17248 - DNA, 21 bp, synthetic construct
  source 1..21: mol_type = other DNA
cctgatcagcctttgtaagtc

SEQ ID NO: 17249 - DNA, 20 bp, synthetic construct
  source 1..20: mol_type = other DNA
tgcagaagaagggcacagcc

SEQ ID NO: 17250 - DNA, 20 bp, synthetic construct
  source 1..20: mol_type = other DNA
gcagaagaagggcacagcca

SEQ ID NO: 17251 - DNA, 20 bp, synthetic construct
  source 1..20: mol_type = other DNA
gaagaagggcacagccagga

SEQ ID NO: 17252 - DNA, 21 bp, synthetic construct
  source 1..21: mol_type = other DNA
agggcacagccaggacttaca

SEQ ID NO: 17253 - DNA, 21 bp, synthetic construct
  source 1..21: mol_type = other DNA
aagggcacagccaggacttac

SEQ ID NO: 17254 - DNA, 20 bp, synthetic construct
  source 1..20: mol_type = other DNA
gggcacagccaggacttaca

SEQ ID NO: 17255 - DNA, 20 bp, synthetic construct
  source 1..20: mol_type = other DNA
aagaagggcacagccaggac

SEQ ID NO: 17256 - DNA, 21 bp, synthetic construct
  source 1..21: mol_type = other DNA
aagaagggcacagccaggact

SEQ ID NO: 17257 - DNA, 20 bp, synthetic construct
  source 1..20: mol_type = other DNA
ggcacagccaggacttacaa

SEQ ID NO: 17258 - DNA, 20 bp, synthetic construct
  source 1..20: mol_type = other DNA
agaagggcacagccaggact

SEQ ID NO: 17259 - DNA, 20 bp, synthetic construct
  source 1..20: mol_type = other DNA
gaagggcacagccaggactt

SEQ ID NO: 17260 - DNA, 20 bp, synthetic construct
  source 1..20: mol_type = other DNA
aagggcacagccaggactta

SEQ ID NO: 17261 - DNA, 23 bp, synthetic construct
  source 1..23: mol_type = other DNA
gtgctgcagaagaagggcacagc

SEQ ID NO: 17262 - DNA, 20 bp, synthetic construct
  source 1..20: mol_type = other DNA
agggcacagccaggacttac

SEQ ID NO: 17263 - DNA, 20 bp, synthetic construct
  source 1..20: mol_type = other DNA
gcacagccaggacttacaaa

SEQ ID NO: 17264 - DNA, 20 bp, synthetic construct
  source 1..20: mol_type = other DNA
cacagccaggacttacaaag

SEQ ID NO: 17265 - DNA, 20 bp, synthetic construct
  source 1..20: mol_type = other DNA
acagccaggacttacaaagg

SEQ ID NO: 17266 - DNA, 23 bp, synthetic construct
  source 1..23: mol_type = other DNA
gcacagccaggacttacaaaggc

SEQ ID NO: 17267 - DNA, 24 bp, synthetic construct
  source 1..24: mol_type = other DNA
ggacttacaaaggctgatcagggc

SEQ ID NO: 17268 - DNA, 20 bp, synthetic construct
  source 1..20: mol_type = other DNA
cagccaggacttacaaaggc

SEQ ID NO: 17269 - DNA, 20 bp, synthetic construct
  source 1..20: mol_type = other DNA
agccaggacttacaaaggct

SEQ ID NO: 17270 - DNA, 20 bp, synthetic construct
  source 1..20: mol_type = other DNA
gccaggacttacaaaggctg

SEQ ID NO: 17271 - DNA, 20 bp, synthetic construct
  source 1..20: mol_type = other DNA
aggacttacaaaggctgatc

SEQ ID NO: 17272 - DNA, 20 bp, synthetic construct
  source 1..20: mol_type = other DNA
ccaggacttacaaaggctga

SEQ ID NO: 17273 - DNA, 20 bp, synthetic construct
  source 1..20: mol_type = other DNA
caggacttacaaaggctgat

SEQ ID NO: 17274 - DNA, 23 bp, synthetic construct
  source 1..23: mol_type = other DNA
gccaggacttacaaaggctgatc

SEQ ID NO: 17275 - DNA, 20 bp, synthetic construct
  source 1..20: mol_type = other DNA
ggacttacaaaggctgatca

SEQ ID NO: 17276 - DNA, 20 bp, synthetic construct
  source 1..20: mol_type = other DNA
gacttacaaaggctgatcag

SEQ ID NO: 17277 - DNA, 20 bp, synthetic construct
  source 1..20: mol_type = other DNA
acttacaaaggctgatcagg

SEQ ID NO: 17278 - DNA, 23 bp, synthetic construct
  source 1..23: mol_type = other DNA
aggacttacaaaggctgatcagg

SEQ ID NO: 17279 - DNA, 20 bp, synthetic construct
  source 1..20: mol_type = other DNA
cttacaaaggctgatcaggg

SEQ ID NO: 17280 - DNA, 20 bp, synthetic construct
  source 1..20: mol_type = other DNA
ttacaaaggctgatcagggc

SEQ ID NO: 17281 - DNA, 23 bp, synthetic construct
  source 1..23: mol_type = other DNA
gacttacaaaggctgatcagggc

SEQ ID NO: 17282 - DNA, 24 bp, synthetic construct
  source 1..24: mol_type = other DNA
gacttacaaaggctgatcagggca

SEQ ID NO: 17283 - DNA, 20 bp, synthetic construct
  source 1..20: mol_type = other DNA
tacaaaggctgatcagggca

SEQ ID NO: 17284 - DNA, 23 bp, synthetic construct
  source 1..23: mol_type = other DNA
acttacaaaggctgatcagggca

SEQ ID NO: 17285 - DNA, 23 bp, synthetic construct
  source 1..23: mol_type = other DNA
agccaggacttacaaaggctgat

SEQ ID NO: 17286 - DNA, 21 bp, synthetic construct
  source 1..21: mol_type = other DNA
caaaggctgatcagggcatct

SEQ ID NO: 17287 - DNA, 21 bp, synthetic construct
  source 1..21: mol_type = other DNA
caggacttacaaaggctgatc

SEQ ID NO: 17288 - DNA, 20 bp, synthetic construct
  source 1..20: mol_type = other DNA
gctgatcagggcatctccca

SEQ ID NO: 17289 - DNA, 20 bp, synthetic construct
  source 1..20: mol_type = other DNA
acaaaggctgatcagggcat

SEQ ID NO: 17290 - DNA, 20 bp, synthetic construct
  source 1..20: mol_type = other DNA
caaaggctgatcagggcatc

SEQ ID NO: 17291 - DNA, 20 bp, synthetic construct
  source 1..20: mol_type = other DNA
aaaggctgatcagggcatct

SEQ ID NO: 17292 - DNA, 20 bp, synthetic construct
  source 1..20: mol_type = other DNA
aaggctgatcagggcatctc

SEQ ID NO: 17293 - DNA, 20 bp, synthetic construct
  source 1..20: mol_type = other DNA
aggctgatcagggcatctcc

SEQ ID NO: 17294 - DNA, 20 bp, synthetic construct
  source 1..20: mol_type = other DNA
ctgatcagggcatctcccaa

SEQ ID NO: 17295 - DNA, 20 bp, synthetic construct
  source 1..20: mol_type = other DNA
ggctgatcagggcatctccc

SEQ ID NO: 17296 - DNA, 23 bp, synthetic construct
  source 1..23: mol_type = other DNA
tcccaaacccagccctgctgcct

SEQ ID NO: 17297 - DNA, 21 bp, synthetic construct
  source 1..21: mol_type = other DNA
caaacccagccctgctgcctc

SEQ ID NO: 17298 - DNA, 20 bp, synthetic construct
  source 1..20: mol_type = other DNA
cagccctgctgcctctgagg

SEQ ID NO: 17299 - DNA, 20 bp, synthetic construct
  source 1..20: mol_type = other DNA
acccagccctgctgcctctg

SEQ ID NO: 17300 - DNA, 20 bp, synthetic construct
  source 1..20: mol_type = other DNA
cccagccctgctgcctctga

SEQ ID NO: 17301 - DNA, 20 bp, synthetic construct
  source 1..20: mol_type = other DNA
ccagccctgctgcctctgag

SEQ ID NO: 17302 - DNA, 21 bp, synthetic construct
  source 1..21: mol_type = other DNA
aaacccagccctgctgcctct

SEQ ID NO: 17303 - DNA, 20 bp, synthetic construct
  source 1..20: mol_type = other DNA
cagtgggcaagcagcctcag

SEQ ID NO: 17304 - DNA, 20 bp, synthetic construct
  source 1..20: mol_type = other DNA
agccctgctgcctctgaggc

SEQ ID NO: 17305 - DNA, 20 bp, synthetic construct
  source 1..20: mol_type = other DNA
gccctgctgcctctgaggct

SEQ ID NO: 17306 - DNA, 20 bp, synthetic construct
  source 1..20: mol_type = other DNA
ccctgctgcctctgaggctg

SEQ ID NO: 17307 - DNA, 23 bp, synthetic construct
  source 1..23: mol_type = other DNA
cagccctgctgcctctgaggctg

SEQ ID NO: 17308 - DNA, 20 bp, synthetic construct
  source 1..20: mol_type = other DNA
cctgctgcctctgaggctgc

SEQ ID NO: 17309 - DNA, 20 bp, synthetic construct
  source 1..20: mol_type = other DNA
ctgctgcctctgaggctgct

SEQ ID NO: 17310 - DNA, 23 bp, synthetic construct
  source 1..23: mol_type = other DNA
gccctgctgcctctgaggctgct

SEQ ID NO: 17311 - DNA, 20 bp, synthetic construct
  source 1..20: mol_type = other DNA
tgctgcctctgaggctgctt

SEQ ID NO: 17312 - DNA, 20 bp, synthetic construct
  source 1..20: mol_type = other DNA
gctgcctctgaggctgcttg

SEQ ID NO: 17313 - DNA, 23 bp, synthetic construct
  source 1..23: mol_type = other DNA
cctgctgcctctgaggctgcttg

SEQ ID NO: 17314 - DNA, 20 bp, synthetic construct
  source 1..20: mol_type = other DNA
ctgcctctgaggctgcttgc

SEQ ID NO: 17315 - DNA, 20 bp, synthetic construct
  source 1..20: mol_type = other DNA
tgcctctgaggctgcttgcc

SEQ ID NO: 17316 - DNA, 24 bp, synthetic construct
  source 1..24: mol_type = other DNA
cagccctgctgcctctgaggctgc

SEQ ID NO: 17317 - DNA, 20 bp, synthetic construct
  source 1..20: mol_type = other DNA
ctctgaggctgcttgcccac

SEQ ID NO: 17318 - DNA, 20 bp, synthetic construct
  source 1..20: mol_type = other DNA
gcctctgaggctgcttgccc

SEQ ID NO: 17319 - DNA, 20 bp, synthetic construct
  source 1..20: mol_type = other DNA
cctctgaggctgcttgccca

SEQ ID NO: 17320 - DNA, 20 bp, synthetic construct
  source 1..20: mol_type = other DNA
gaggctgcttgcccactgag

SEQ ID NO: 17321 - DNA, 21 bp, synthetic construct
  source 1..21: mol_type = other DNA
ctgaggctgcttgcccactga

SEQ ID NO: 17322 - DNA, 21 bp, synthetic construct
  source 1..21: mol_type = other DNA
cctctgaggctgcttgcccac

SEQ ID NO: 17323 - DNA, 20 bp, synthetic construct
  source 1..20: mol_type = other DNA
tctgaggctgcttgcccact

SEQ ID NO: 17324 - DNA, 23 bp, synthetic construct
  source 1..23: mol_type = other DNA
tctgaggctgcttgcccactgag

SEQ ID NO: 17325 - DNA, 23 bp, synthetic construct
  source 1..23: mol_type = other DNA
ctgcctctgaggctgcttgccca

SEQ ID NO: 17326 - DNA, 21 bp, synthetic construct
  source 1..21: mol_type = other DNA
tctgaggctgcttgcccactg

SEQ ID NO: 17327 - DNA, 20 bp, synthetic construct
  source 1..20: mol_type = other DNA
ctgaggctgcttgcccactg

SEQ ID NO: 17328 - DNA, 20 bp, synthetic construct
  source 1..20: mol_type = other DNA
tgaggctgcttgcccactga

SEQ ID NO: 17329 - DNA, 20 bp, synthetic construct
  source 1..20: mol_type = other DNA
aggctgcttgcccactgagt

SEQ ID NO: 17330 - DNA, 20 bp, synthetic construct
  source 1..20: mol_type = other DNA
ggctgcttgcccactgagtg

SEQ ID NO: 17331 - DNA, 24 bp, synthetic construct
  source 1..24: mol_type = other DNA
gaggctgcttgcccactgagtgga

SEQ ID NO: 17332 - DNA, 20 bp, synthetic construct
  source 1..20: mol_type = other DNA
gctgcttgcccactgagtgg

SEQ ID NO: 17333 - DNA, 23 bp, synthetic construct
  source 1..23: mol_type = other DNA
aggctgcttgcccactgagtgga

SEQ ID NO: 17334 - DNA, 20 bp, synthetic construct
  source 1..20: mol_type = other DNA
gcttgcccactgagtggaca

SEQ ID NO: 17335 - DNA, 20 bp, synthetic construct
  source 1..20: mol_type = other DNA
ctgcttgcccactgagtgga

SEQ ID NO: 17336 - DNA, 20 bp, synthetic construct
  source 1..20: mol_type = other DNA
tgcttgcccactgagtggac

SEQ ID NO: 17337 - DNA, 21 bp, synthetic construct
  source 1..21: mol_type = other DNA
cttgcccactgagtggacatg

SEQ ID NO: 17338 - DNA, 23 bp, synthetic construct
  source 1..23: mol_type = other DNA
ggctgcttgcccactgagtggac

SEQ ID NO: 17339 - DNA, 23 bp, synthetic construct
  source 1..23: mol_type = other DNA
ctctgaggctgcttgcccactga

SEQ ID NO: 17340 - DNA, 21 bp, synthetic construct
  source 1..21: mol_type = other DNA
gcttgcccactgagtggacat

SEQ ID NO: 17341 - DNA, 20 bp, synthetic construct
  source 1..20: mol_type = other DNA
tgcccactgagtggacatgc

SEQ ID NO: 17342 - DNA, 20 bp, synthetic construct
  source 1..20: mol_type = other DNA
cttgcccactgagtggacat

SEQ ID NO: 17343 - DNA, 20 bp, synthetic construct
  source 1..20: mol_type = other DNA
ttgcccactgagtggacatg

SEQ ID NO: 17344 - DNA, 20 bp, synthetic construct
  source 1..20: mol_type = other DNA
gcccactgagtggacatgcc

SEQ ID NO: 17345 - DNA, 20 bp, synthetic construct
  source 1..20: mol_type = other DNA
cccactgagtggacatgcca

SEQ ID NO: 17346 - DNA, 20 bp, synthetic construct
  source 1..20: mol_type = other DNA
ccactgagtggacatgccag

SEQ ID NO: 17347 - DNA, 20 bp, synthetic construct
  source 1..20: mol_type = other DNA
actgagtggacatgccaggc

SEQ ID NO: 17348 - DNA, 20 bp, synthetic construct
  source 1..20: mol_type = other DNA
ctgagtggacatgccaggca

SEQ ID NO: 17349 - DNA, 20 bp, synthetic construct
  source 1..20: mol_type = other DNA
cactgagtggacatgccagg

SEQ ID NO: 17350 - DNA, 20 bp, synthetic construct
  source 1..20: mol_type = other DNA
gcagcatcgtccagtacatg

SEQ ID NO: 17351 - DNA, 20 bp, synthetic construct
  source 1..20: mol_type = other DNA
cagcatcgtccagtacatgt

SEQ ID NO: 17352 - DNA, 20 bp, synthetic construct
  source 1..20: mol_type = other DNA
agcatcgtccagtacatgta

SEQ ID NO: 17353 - DNA, 23 bp, synthetic construct
  source 1..23: mol_type = other DNA
ctgcagcatcgtccagtacatgt

SEQ ID NO: 17354 - DNA, 20 bp, synthetic construct
  source 1..20: mol_type = other DNA
gcatcgtccagtacatgtac

SEQ ID NO: 17355 - DNA, 20 bp, synthetic construct
  source 1..20: mol_type = other DNA
catcgtccagtacatgtact

SEQ ID NO: 17356 - DNA, 20 bp, synthetic construct
  source 1..20: mol_type = other DNA
tcgtccagtacatgtactgc

SEQ ID NO: 17357 - DNA, 20 bp, synthetic construct
  source 1..20: mol_type = other DNA
atcgtccagtacatgtactg

SEQ ID NO: 17358 - DNA, 23 bp, synthetic construct
  source 1..23: mol_type = other DNA
gtccagtacatgtactgcaggca

SEQ ID NO: 17359 - DNA, 21 bp, synthetic construct
  source 1..21: mol_type = other DNA
tcgtccagtacatgtactgca

SEQ ID NO: 17360 - DNA, 24 bp, synthetic construct
  source 1..24: mol_type = other DNA
ctgccgctgctcattccacctcgc

SEQ ID NO: 17361 - DNA, 20 bp, synthetic construct
  source 1..20: mol_type = other DNA
cgtccagtacatgtactgca

SEQ ID NO: 17362 - DNA, 20 bp, synthetic construct
  source 1..20: mol_type = other DNA
gtccagtacatgtactgcag

SEQ ID NO: 17363 - DNA, 21 bp, synthetic construct
  source 1..21: mol_type = other DNA
ccagtacatgtactgcaggca

SEQ ID NO: 17364 - DNA, 20 bp, synthetic construct
  source 1..20: mol_type = other DNA
cagtacatgtactgcaggca

SEQ ID NO: 17365 - DNA, 20 bp, synthetic construct
  source 1..20: mol_type = other DNA
tccagtacatgtactgcagg

SEQ ID NO: 17366 - DNA, 21 bp, synthetic construct
  source 1..21: mol_type = other DNA
tccagtacatgtactgcaggc

SEQ ID NO: 17367 - DNA, 20 bp, synthetic construct
  source 1..20: mol_type = other DNA
ccagtacatgtactgcaggc

SEQ ID NO: 17368 - DNA, 20 bp, synthetic construct
  source 1..20: mol_type = other DNA
agtacatgtactgcaggcaa

SEQ ID NO: 17369 - DNA, 23 bp, synthetic construct
  source 1..23: mol_type = other DNA
tccagtacatgtactgcaggcaa

SEQ ID NO: 17370 - DNA, 24 bp, synthetic construct
  source 1..24: mol_type = other DNA
agtggtgagtgagctgctgcagca

SEQ ID NO: 17371 - DNA, 20 bp, synthetic construct
  source 1..20: mol_type = other DNA
gtacatgtactgcaggcaat

SEQ ID NO: 17372 - DNA, 23 bp, synthetic construct
  source 1..23: mol_type = other DNA
cagtacatgtactgcaggcaatg

SEQ ID NO: 17373 - DNA, 21 bp, synthetic construct
  source 1..21: mol_type = other DNA
acatgtactgcaggcaatgga

SEQ ID NO: 17374 - DNA, 20 bp, synthetic construct
  source 1..20: mol_type = other DNA
acatgtactgcaggcaatgg

SEQ ID NO: 17375 - DNA, 20 bp, synthetic construct
  source 1..20: mol_type = other DNA
tacatgtactgcaggcaatg

SEQ ID NO: 17376 - DNA, 20 bp, synthetic construct
  source 1..20: mol_type = other DNA
catgtactgcaggcaatgga

SEQ ID NO: 17377 - DNA, 20 bp, synthetic construct
  source 1..20: mol_type = other DNA
atgtactgcaggcaatggac

SEQ ID NO: 17378 - DNA, 21 bp, synthetic construct
  source 1..21: mol_type = other DNA
atgtactgcaggcaatggacg

SEQ ID NO: 17379 - DNA, 20 bp, synthetic construct
  source 1..20: mol_type = other DNA
tgtactgcaggcaatggacg

SEQ ID NO: 17380 - DNA, 20 bp, synthetic construct
  source 1..20: mol_type = other DNA
gtactgcaggcaatggacgc

SEQ ID NO: 17381 - DNA, 20 bp, synthetic construct
  source 1..20: mol_type = other DNA
tactgcaggcaatggacgcg

SEQ ID NO: 17382 - DNA, 20 bp, synthetic construct
  source 1..20: mol_type = other DNA
actgcaggcaatggacgcga

SEQ ID NO: 17383 - DNA, 20 bp, synthetic construct
  source 1..20: mol_type = other DNA
ctgcaggcaatggacgcgag

SEQ ID NO: 17384 - DNA, 20 bp, synthetic construct
  source 1..20: mol_type = other DNA
tgcaggcaatggacgcgagg

SEQ ID NO: 17385 - DNA, 23 bp, synthetic construct
  source 1..23: mol_type = other DNA
caggcaatggacgcgaggtggaa

SEQ ID NO: 17386 - DNA, 20 bp, synthetic construct
  source 1..20: mol_type = other DNA
gcaggcaatggacgcgaggt

SEQ ID NO: 17387 - DNA, 23 bp, synthetic construct
  source 1..23: mol_type = other DNA
tactgcaggcaatggacgcgagg

SEQ ID NO: 17388 - DNA, 21 bp, synthetic construct
  source 1..21: mol_type = other DNA
caggcaatggacgcgaggtgg

SEQ ID NO: 17389 - DNA, 21 bp, synthetic construct
  source 1..21: mol_type = other DNA
actgcaggcaatggacgcgag

SEQ ID NO: 17390 - DNA, 21 bp, synthetic construct
  source 1..21: mol_type = other DNA
ggcaatggacgcgaggtggaa

SEQ ID NO: 17391 - DNA, 20 bp, synthetic construct
  source 1..20: mol_type = other DNA
caggcaatggacgcgaggtg

SEQ ID NO: 17392 - DNA, 23 bp, synthetic construct
  source 1..23: mol_type = other DNA
gcaggcaatggacgcgaggtgga

SEQ ID NO: 17393 - DNA, 20 bp, synthetic construct
  source 1..20: mol_type = other DNA
ggcaatggacgcgaggtgga

SEQ ID NO: 17394 - DNA, 20 bp, synthetic construct
  source 1..20: mol_type = other DNA
aggcaatggacgcgaggtgg

SEQ ID NO: 17395 - DNA, 21 bp, synthetic construct
  source 1..21: mol_type = other DNA
aggcaatggacgcgaggtgga

SEQ ID NO: 17396 - DNA, 20 bp, synthetic construct
  source 1..20: mol_type = other DNA
gcaatggacgcgaggtggaa

SEQ ID NO: 17397 - DNA, 20 bp, synthetic construct
  source 1..20: mol_type = other DNA
caatggacgcgaggtggaat

SEQ ID NO: 17398 - DNA, 21 bp, synthetic construct
  source 1..21: mol_type = other DNA
agaagagatttcaggcccgag

SEQ ID NO: 17399 - DNA, 20 bp, synthetic construct
  source 1..20: mol_type = other DNA
gagatttcaggcccgaggtg

SEQ ID NO: 17400 - DNA, 20 bp, synthetic construct
  source 1..20: mol_type = other DNA
agatttcaggcccgaggtgg

SEQ ID NO: 17401 - DNA, 20 bp, synthetic construct
  source 1..20: mol_type = other DNA
gatttcaggcccgaggtggg

SEQ ID NO: 17402 - DNA, 23 bp, synthetic construct
  source 1..23: mol_type = other DNA
gagatttcaggcccgaggtgggt

SEQ ID NO: 17403 - DNA, 24 bp, synthetic construct
  source 1..24: mol_type = other DNA
agctcagcctcgagaagagatttc

SEQ ID NO: 17404 - DNA, 20 bp, synthetic construct
  source 1..20: mol_type = other DNA
atttcaggcccgaggtgggt

SEQ ID NO: 17405 - DNA, 20 bp, synthetic construct
  source 1..20: mol_type = other DNA
tttcaggcccgaggtgggtg

SEQ ID NO: 17406 - DNA, 20 bp, synthetic construct
  source 1..20: mol_type = other DNA
ttcaggcccgaggtgggtgt

SEQ ID NO: 17407 - DNA, 23 bp, synthetic construct
  source 1..23: mol_type = other DNA
gatttcaggcccgaggtgggtgt

SEQ ID NO: 17408 - DNA, 20 bp, synthetic construct
  source 1..20: mol_type = other DNA
tcaggcccgaggtgggtgta

SEQ ID NO: 17409 - DNA, 20 bp, synthetic construct
  source 1..20: mol_type = other DNA
caggcccgaggtgggtgtat

SEQ ID NO: 17410 - DNA, 24 bp, synthetic construct
  source 1..24: mol_type = other DNA
agggccctcagctcagcctcgaga

SEQ ID NO: 17411 - DNA, 20 bp, synthetic construct
  source 1..20: mol_type = other DNA
aggcccgaggtgggtgtatc

SEQ ID NO: 17412 - DNA, 20 bp, synthetic construct
  source 1..20: mol_type = other DNA
ggtgggtgtatctcacaact

SEQ ID NO: 17413 - DNA, 20 bp, synthetic construct
  source 1..20: mol_type = other DNA
ggcccgaggtgggtgtatct

SEQ ID NO: 17414 - DNA, 21 bp, synthetic construct
  source 1..21: mol_type = other DNA
aggcccgaggtgggtgtatct

SEQ ID NO: 17415 - DNA, 21 bp, synthetic construct
  source 1..21: mol_type = other DNA
gaagagatttcaggcccgagg

SEQ ID NO: 17416 - DNA, 20 bp, synthetic construct
  source 1..20: mol_type = other DNA
gcccgaggtgggtgtatctc

SEQ ID NO: 17417 - DNA, 20 bp, synthetic construct
  source 1..20: mol_type = other DNA
cccgaggtgggtgtatctca

SEQ ID NO: 17418 - DNA, 20 bp, synthetic construct
  source 1..20: mol_type = other DNA
gtgggtgtatctcacaactc

SEQ ID NO: 17419 - DNA, 20 bp, synthetic construct
  source 1..20: mol_type = other DNA
ccgaggtgggtgtatctcac

SEQ ID NO: 17420 - DNA, 20 bp, synthetic construct
  source 1..20: mol_type = other DNA
cgaggtgggtgtatctcaca

SEQ ID NO: 17421 - DNA, 23 bp, synthetic construct
  source 1..23: mol_type = other DNA
ggcccgaggtgggtgtatctcac

SEQ ID NO: 17422 - DNA, 24 bp, synthetic construct
  source 1..24: mol_type = other DNA
aggtgggtgtatctcacaactctg

SEQ ID NO: 17423 - DNA, 21 bp, synthetic construct
  source 1..21: mol_type = other DNA
tctcacaactctgtcttcctc

SEQ ID NO: 17424 - DNA, 20 bp, synthetic construct
  source 1..20: mol_type = other DNA
gaggtgggtgtatctcacaa

SEQ ID NO: 17425 - DNA, 23 bp, synthetic construct
  source 1..23: mol_type = other DNA
cgaggtgggtgtatctcacaact

SEQ ID NO: 17426 - DNA, 20 bp, synthetic construct
  source 1..20: mol_type = other DNA
aggtgggtgtatctcacaac

SEQ ID NO: 17427 - DNA, 20 bp, synthetic construct
  source 1..20: mol_type = other DNA
tgggtgtatctcacaactct

SEQ ID NO: 17428 - DNA, 20 bp, synthetic construct
  source 1..20: mol_type = other DNA
gggtgtatctcacaactctg

SEQ ID NO: 17429 - DNA, 21 bp, synthetic construct
  source 1..21: mol_type = other DNA
atctcacaactctgtcttcct

SEQ ID NO: 17430 - DNA, 20 bp, synthetic construct
  source 1..20: mol_type = other DNA
ggtgtatctcacaactctgt

SEQ ID NO: 17431 - DNA, 20 bp, synthetic construct
  source 1..20: mol_type = other DNA
gtgtatctcacaactctgtc

SEQ ID NO: 17432 - DNA, 20 bp, synthetic construct
  source 1..20: mol_type = other DNA
tgtatctcacaactctgtct

SEQ ID NO: 17433 - DNA, 23 bp, synthetic construct
  source 1..23: mol_type = other DNA
gggtgtatctcacaactctgtct

SEQ ID NO: 17434 - DNA, 20 bp, synthetic construct
  source 1..20: mol_type = other DNA
gtatctcacaactctgtctt

SEQ ID NO: 17435 - DNA, 20 bp, synthetic construct
  source 1..20: mol_type = other DNA
tctcacaactctgtcttcct

SEQ ID NO: 17436 - DNA, 20 bp, synthetic construct
  source 1..20: mol_type = other DNA
tatctcacaactctgtcttc

SEQ ID NO: 17437 - DNA, 24 bp, synthetic construct
  source 1..24: mol_type = other DNA
gtatctcacaactctgtcttcctc

SEQ ID NO: 17438 - DNA, 20 bp, synthetic construct
  source 1..20: mol_type = other DNA
atctcacaactctgtcttcc

SEQ ID NO: 17439 - DNA, 23 bp, synthetic construct
  source 1..23: mol_type = other DNA
tatctcacaactctgtcttcctc

SEQ ID NO: 17440 - DNA, 20 bp, synthetic construct
  source 1..20: mol_type = other DNA
ctcacaactctgtcttcctc

SEQ ID NO: 17441 - DNA, 20 bp, synthetic construct
  source 1..20: mol_type = other DNA
tcacaactctgtcttcctcg

SEQ ID NO: 17442 - DNA, 20 bp, synthetic construct
  source 1..20: mol_type = other DNA
ttcctcgtagcctttctctc

SEQ ID NO: 17443 - DNA, 20 bp, synthetic construct
  source 1..20: mol_type = other DNA
cacaactctgtcttcctcgt

SEQ ID NO: 17444 - DNA, 21 bp, synthetic construct
  source 1..21: mol_type = other DNA
tcttcctcgtagcctttctct

SEQ ID NO: 17445 - DNA, 23 bp, synthetic construct
  source 1..23: mol_type = other DNA
atctcacaactctgtcttcctcg

SEQ ID NO: 17446 - DNA, 23 bp, synthetic construct
  source 1..23: mol_type = other DNA
tgtcttcctcgtagcctttctct

SEQ ID NO: 17447 - DNA, 20 bp, synthetic construct
  source 1..20: mol_type = other DNA
acaactctgtcttcctcgta

SEQ ID NO: 17448 - DNA, 24 bp, synthetic construct
  source 1..24: mol_type = other DNA
gggaacagagagctgggtaccagc

SEQ ID NO: 17449 - DNA, 21 bp, synthetic construct
  source 1..21: mol_type = other DNA
taccagcaaggcctggacgct

SEQ ID NO: 17450 - DNA, 20 bp, synthetic construct
  source 1..20: mol_type = other DNA
agcaaggcctggacgctgcg

SEQ ID NO: 17451 - DNA, 23 bp, synthetic construct
  source 1..23: mol_type = other DNA
accagcaaggcctggacgctgcg

SEQ ID NO: 17452 - DNA, 23 bp, synthetic construct
  source 1..23: mol_type = other DNA
gggacagatgaaacctgatgact

SEQ ID NO: 17453 - DNA, 21 bp, synthetic construct
  source 1..21: mol_type = other DNA
gtaccagcaaggcctggacgc

SEQ ID NO: 17454 - DNA, 20 bp, synthetic construct
  source 1..20: mol_type = other DNA
gcaaggcctggacgctgcgg

SEQ ID NO: 17455 - DNA, 21 bp, synthetic construct
  source 1..21: mol_type = other DNA
ggcctggacgctgcggtcact

SEQ ID NO: 17456 - DNA, 20 bp, synthetic construct
  source 1..20: mol_type = other DNA
caaggcctggacgctgcggt

SEQ ID NO: 17457 - DNA, 20 bp, synthetic construct
  source 1..20: mol_type = other DNA
aaggcctggacgctgcggtc

SEQ ID NO: 17458 - DNA, 20 bp, synthetic construct
  source 1..20: mol_type = other DNA
aggcctggacgctgcggtca

SEQ ID NO: 17459 - DNA, 20 bp, synthetic construct
  source 1..20: mol_type = other DNA
ggcctggacgctgcggtcac

SEQ ID NO: 17460 - DNA, 23 bp, synthetic construct
  source 1..23: mol_type = other DNA
gcaaggcctggacgctgcggtca

SEQ ID NO: 17461 - DNA, 20 bp, synthetic construct
  source 1..20: mol_type = other DNA
gcctggacgctgcggtcact

SEQ ID NO: 17462 - DNA, 20 bp, synthetic construct
  source 1..20: mol_type = other DNA
cctggacgctgcggtcactc

SEQ ID NO: 17463 - DNA, 20 bp, synthetic construct
  source 1..20: mol_type = other DNA
ctggacgctgcggtcactca

SEQ ID NO: 17464 - DNA, 23 bp, synthetic construct
  source 1..23: mol_type = other DNA
ggcctggacgctgcggtcactca

SEQ ID NO: 17465 - DNA, 24 bp, synthetic construct
  source 1..24: mol_type = other DNA
tcactcacagtcatcaggtttcat

SEQ ID NO: 17466 - DNA, 20 bp, synthetic construct
  source 1..20: mol_type = other DNA
tggacgctgcggtcactcac

SEQ ID NO: 17467 - DNA, 20 bp, synthetic construct
  source 1..20: mol_type = other DNA
ggacgctgcggtcactcaca

SEQ ID NO: 17468 - DNA, 20 bp, synthetic construct
  source 1..20: mol_type = other DNA
gacgctgcggtcactcacag

SEQ ID NO: 17469 - DNA, 24 bp, synthetic construct
  source 1..24: mol_type = other DNA
ggacgctgcggtcactcacagtca

SEQ ID NO: 17470 - DNA, 20 bp, synthetic construct
  source 1..20: mol_type = other DNA
acgctgcggtcactcacagt

SEQ ID NO: 17471 - DNA, 20 bp, synthetic construct
  source 1..20: mol_type = other DNA
ctgcggtcactcacagtcat

SEQ ID NO: 17472 - DNA, 20 bp, synthetic construct
  source 1..20: mol_type = other DNA
cgctgcggtcactcacagtc

SEQ ID NO: 17473 - DNA, 20 bp, synthetic construct
  source 1..20: mol_type = other DNA
tgcggtcactcacagtcatc

SEQ ID NO: 17474 - DNA, 20 bp, synthetic construct
  source 1..20: mol_type = other DNA
gctgcggtcactcacagtca

SEQ ID NO: 17475 - DNA, 21 bp, synthetic construct
  source 1..21: mol_type = other DNA
gctgcggtcactcacagtcat

SEQ ID NO: 17476 - DNA, 21 bp, synthetic construct
  source 1..21: mol_type = other DNA
cgctgcggtcactcacagtca

SEQ ID NO: 17477 - DNA, 20 bp, synthetic construct
  source 1..20: mol_type = other DNA
gcggtcactcacagtcatca

SEQ ID NO: 17478 - DNA, 20 bp, synthetic construct
  source 1..20: mol_type = other DNA
cggtcactcacagtcatcag

SEQ ID NO: 17479 - DNA, 20 bp, synthetic construct
  source 1..20: mol_type = other DNA
ggtcactcacagtcatcagg

SEQ ID NO: 17480 - DNA, 20 bp, synthetic construct
  source 1..20: mol_type = other DNA
gtcactcacagtcatcaggt

SEQ ID NO: 17481 - DNA, 23 bp, synthetic construct
  source 1..23: mol_type = other DNA
cggtcactcacagtcatcaggtt

SEQ ID NO: 17482 - DNA, 20 bp, synthetic construct
  source 1..20: mol_type = other DNA
tcactcacagtcatcaggtt

SEQ ID NO: 17483 - DNA, 20 bp, synthetic construct
  source 1..20: mol_type = other DNA
cactcacagtcatcaggttt

SEQ ID NO: 17484 - DNA, 20 bp, synthetic construct
  source 1..20: mol_type = other DNA
actcacagtcatcaggtttc

SEQ ID NO: 17485 - DNA, 20 bp, synthetic construct
  source 1..20: mol_type = other DNA
ctcacagtcatcaggtttca

SEQ ID NO: 17486 - DNA, 20 bp, synthetic construct
  source 1..20: mol_type = other DNA
tcacagtcatcaggtttcat

SEQ ID NO: 17487 - DNA, 20 bp, synthetic construct
  source 1..20: mol_type = other DNA
cacagtcatcaggtttcatc

SEQ ID NO: 17488 - DNA, 20 bp, synthetic construct
  source 1..20: mol_type = other DNA
acagtcatcaggtttcatct

SEQ ID NO: 17489 - DNA, 20 bp, synthetic construct
  source 1..20: mol_type = other DNA
cagtcatcaggtttcatctg

SEQ ID NO: 17490 - DNA, 20 bp, synthetic construct
  source 1..20: mol_type = other DNA
agtcatcaggtttcatctgt

SEQ ID NO: 17491 - DNA, 20 bp, synthetic construct
  source 1..20: mol_type = other DNA
gatctatagacacccggcag

SEQ ID NO: 17492 - DNA, 21 bp, synthetic construct
  source 1..21: mol_type = other DNA
catcccaaagggctctcctgc

SEQ ID NO: 17493 - DNA, 20 bp, synthetic construct
  source 1..20: mol_type = other DNA
atctatagacacccggcagg

SEQ ID NO: 17494 - DNA, 23 bp, synthetic construct
  source 1..23: mol_type = other DNA
tgggatctatagacacccggcag

SEQ ID NO: 17495 - DNA, 21 bp, synthetic construct
  source 1..21: mol_type = other DNA
ggatctatagacacccggcag

SEQ ID NO: 17496 - DNA, 20 bp, synthetic construct
  source 1..20: mol_type = other DNA
tctatagacacccggcagga

SEQ ID NO: 17497 - DNA, 20 bp, synthetic construct
  source 1..20: mol_type = other DNA
gggatctatagacacccggc

SEQ ID NO: 17498 - DNA, 21 bp, synthetic construct
  source 1..21: mol_type = other DNA
gacacccggcaggagagccct

SEQ ID NO: 17499 - DNA, 21 bp, synthetic construct
  source 1..21: mol_type = other DNA
gatctatagacacccggcagg

SEQ ID NO: 17500 - DNA, 20 bp, synthetic construct
  source 1..20: mol_type = other DNA
ctatagacacccggcaggag

SEQ ID NO: 17501 - DNA, 20 bp, synthetic construct
  source 1..20: mol_type = other DNA
tatagacacccggcaggaga

SEQ ID NO: 17502 - DNA, 20 bp, synthetic construct
  source 1..20: mol_type = other DNA
atagacacccggcaggagag

SEQ ID NO: 17503 - DNA, 20 bp, synthetic construct
  source 1..20: mol_type = other DNA
acacccggcaggagagccct

SEQ ID NO: 17504 - DNA, 20 bp, synthetic construct
  source 1..20: mol_type = other DNA
tagacacccggcaggagagc

SEQ ID NO: 17505 - DNA, 21 bp, synthetic construct
  source 1..21: mol_type = other DNA
agacacccggcaggagagccc

SEQ ID NO: 17506 - DNA, 20 bp, synthetic construct
  source 1..20: mol_type = other DNA
agacacccggcaggagagcc

SEQ ID NO: 17507 - DNA, 20 bp, synthetic construct
  source 1..20: mol_type = other DNA
gacacccggcaggagagccc

SEQ ID NO: 17508 - DNA, 20 bp, synthetic construct
  source 1..20: mol_type = other DNA
cacccggcaggagagccctt

SEQ ID NO: 17509 - DNA, 20 bp, synthetic construct
  source 1..20: mol_type = other DNA
acccggcaggagagcccttt

SEQ ID NO: 17510 - DNA, 21 bp, synthetic construct
  source 1..21: mol_type = other DNA
ccggcaggagagccctttggg

SEQ ID NO: 17511 - DNA, 21 bp, synthetic construct
  source 1..21: mol_type = other DNA
acacccggcaggagagccctt

SEQ ID NO: 17512 - DNA, 20 bp, synthetic construct
  source 1..20: mol_type = other DNA
cccggcaggagagccctttg

SEQ ID NO: 17513 - DNA, 23 bp, synthetic construct
  source 1..23: mol_type = other DNA
acccggcaggagagccctttggg

SEQ ID NO: 17514 - DNA, 21 bp, synthetic construct
  source 1..21: mol_type = other DNA
cccggcaggagagccctttgg

SEQ ID NO: 17515 - DNA, 20 bp, synthetic construct
  source 1..20: mol_type = other DNA
ccggcaggagagccctttgg

SEQ ID NO: 17516 - DNA, 23 bp, synthetic construct
  source 1..23: mol_type = other DNA
agacacccggcaggagagccctt

SEQ ID NO: 17517 - DNA, 20 bp, synthetic construct
  source 1..20: mol_type = other DNA
cggcaggagagccctttggg

SEQ ID NO: 17518 - DNA, 20 bp, synthetic construct
  source 1..20: mol_type = other DNA
ggcaggagagccctttggga

SEQ ID NO: 17519 - DNA, 20 bp, synthetic construct
  source 1..20: mol_type = other DNA
gcaggagagccctttgggat

SEQ ID NO: 17520 - DNA, 20 bp, synthetic construct
  source 1..20: mol_type = other DNA
caggagagccctttgggatg

SEQ ID NO: 17521 - DNA, 20 bp, synthetic construct
  source 1..20: mol_type = other DNA
aggagagccctttgggatgg

SEQ ID NO: 17522 - DNA, 20 bp, synthetic construct
  source 1..20: mol_type = other DNA
ggagagccctttgggatggc

SEQ ID NO: 17523 - DNA, 23 bp, synthetic construct
  source 1..23: mol_type = other DNA
gcaggagagccctttgggatggc

SEQ ID NO: 17524 - DNA, 20 bp, synthetic construct
  source 1..20: mol_type = other DNA
gagagccctttgggatggct

SEQ ID NO: 17525 - DNA, 20 bp, synthetic construct
  source 1..20: mol_type = other DNA
agagccctttgggatggctc

SEQ ID NO: 17526 - DNA, 20 bp, synthetic construct
  source 1..20: mol_type = other DNA
gagccctttgggatggctcc

SEQ ID NO: 17527 - DNA, 20 bp, synthetic construct
  source 1..20: mol_type = other DNA
agccctttgggatggctccc

SEQ ID NO: 17528 - DNA, 20 bp, synthetic construct
  source 1..20: mol_type = other DNA
gccctttgggatggctcccc

SEQ ID NO: 17529 - DNA, 20 bp, synthetic construct
  source 1..20: mol_type = other DNA
ccctttgggatggctccccg

SEQ ID NO: 17530 - DNA, 23 bp, synthetic construct
  source 1..23: mol_type = other DNA
agagccctttgggatggctcccc

SEQ ID NO: 17531 - DNA, 24 bp, synthetic construct
  source 1..24: mol_type = other DNA
ggagagccctttgggatggctccc

SEQ ID NO: 17532 - DNA, 20 bp, synthetic construct
  source 1..20: mol_type = other DNA
cctttgggatggctccccgc

SEQ ID NO: 17533 - DNA, 20 bp, synthetic construct
  source 1..20: mol_type = other DNA
ttgggatggctccccgcacc

SEQ ID NO: 17534 - DNA, 20 bp, synthetic construct
  source 1..20: mol_type = other DNA
tgggatggctccccgcacca

SEQ ID NO: 17535 - DNA, 20 bp, synthetic construct
  source 1..20: mol_type = other DNA
ctttgggatggctccccgca

SEQ ID NO: 17536 - DNA, 21 bp, synthetic construct
  source 1..21: mol_type = other DNA
ttgggatggctccccgcacca

SEQ ID NO: 17537 - DNA, 20 bp, synthetic construct
  source 1..20: mol_type = other DNA
tttgggatggctccccgcac

SEQ ID NO: 17538 - DNA, 23 bp, synthetic construct
  source 1..23: mol_type = other DNA
ctttgggatggctccccgcacca

SEQ ID NO: 17539 - DNA, 21 bp, synthetic construct
  source 1..21: mol_type = other DNA
tttgggatggctccccgcacc

SEQ ID NO: 17540 - DNA, 141 bp, synthetic construct
  source 1..141: mol_type = other DNA
agagcatccatgggcaccactcagttttagtactctggaaacagaatctactaaaacaaggcaaaatgccgtgtttatctcgtcaacttgttggcgagaaagagttttgggaccactgtctctccgtgggtggtgcccatg

SEQ ID NO: 17541 - DNA, 139 bp, synthetic construct
  source 1..139: mol_type = other DNA
agcatccatgggcaccactcagttttagtactctggaaacagaatctactaaaacaaggcaaaatgccgtgtttatctcgtcaacttgttggcgagaaagagttttgggaccactgtctctccgtgggtggtgcccatg

SEQ ID NO: 17542 - DNA, 138 bp, synthetic construct
  source 1..138: mol_type = other DNA
gcatccatgggcaccactcagttttagagctagaaatagcaagttaaaataaggctagtccgttatcaacttgaaaaagtggcaccgagtcggtgcaagagttttgggaccactgtctctccgtgggtggtgcccatg

SEQ ID NO: 17543 - DNA, 141 bp, synthetic construct
  source 1..141: mol_type = other DNA
gagagcatccatgggcaccactcgttttagtactctggaaacagaatctactaaaacaaggcaaaatgccgtgtttatctcgtcaacttgttggcgagaagagttttgggaccactgtctctccgtgggtggtgcccatgg

SEQ ID NO: 17544 - DNA, 139 bp, synthetic construct
  source 1..139: mol_type = other DNA
gagcatccatgggcaccactcgttttagtactctggaaacagaatctactaaaacaaggcaaaatgccgtgtttatctcgtcaacttgttggcgagaagagttttgggaccactgtctctccgtgggtggtgcccatgg

SEQ ID NO: 17545 - DNA, 138 bp, synthetic construct
  source 1..138: mol_type = other DNA
gaccactgtctctccgtgaggttttagagctagaaatagcaagttaaaataaggctagtccgttatcaacttgaaaaagtggcaccgagtcggtgcagggcatgagagcatccatgggcaccacccacggagagacag

SEQ ID NO: 17546 - DNA, 138 bp, synthetic construct
  source 1..138: mol_type = other DNA
agcatccatgggcaccactcgttttagagctagaaatagcaagttaaaataaggctagtccgttatcaacttgaaaaagtggcaccgagtcggtgcagagttttgggaccactgtctctccgtgggtggtgcccatgg

SEQ ID NO: 17547 - DNA, 139 bp, synthetic construct
  source 1..139: mol_type = other DNA
agagcatccatgggcaccactgttttagtactctggaaacagaatctactaaaacaaggcaaaatgccgtgtttatctcgtcaacttgttggcgagagagttttgggaccactgtctctccgtgggtggtgcccatgga

SEQ ID NO: 17548 - DNA, 139 bp, synthetic construct
  source 1..139: mol_type = other DNA
gggaccactgtctctccgtgagttttagtactctggaaacagaatctactaaaacaaggcaaaatgccgtgtttatctcgtcaacttgttggcgagagggcatgagagcatccatgggcaccacccacggagagacagt

SEQ ID NO: 17549 - DNA, 138 bp, synthetic construct
  source 1..138: mol_type = other DNA
ggaccactgtctctccgtgagttttagagctagaaatagcaagttaaaataaggctagtccgttatcaacttgaaaaagtggcaccgagtcggtgcgggcatgagagcatccatgggcaccacccacggagagacagt

SEQ ID NO: 17550 - DNA, 138 bp, synthetic construct
  source 1..138: mol_type = other DNA
gagcatccatgggcaccactgttttagagctagaaatagcaagttaaaataaggctagtccgttatcaacttgaaaaagtggcaccgagtcggtgcgagttttgggaccactgtctctccgtgggtggtgcccatgga

SEQ ID NO: 17551 - DNA, 139 bp, synthetic construct
  source 1..139: mol_type = other DNA
tgggaccactgtctctccgtggttttagtactctggaaacagaatctactaaaacaaggcaaaatgccgtgtttatctcgtcaacttgttggcgagaggcatgagagcatccatgggcaccacccacggagagacagtg

SEQ ID NO: 17552 - DNA, 138 bp, synthetic construct
  source 1..138: mol_type = other DNA
gggaccactgtctctccgtggttttagagctagaaatagcaagttaaaataaggctagtccgttatcaacttgaaaaagtggcaccgagtcggtgcggcatgagagcatccatgggcaccacccacggagagacagtg

SEQ ID NO: 17553 - DNA, 138 bp, synthetic construct
  source 1..138: mol_type = other DNA
agagcatccatgggcaccacgttttagagctagaaatagcaagttaaaataaggctagtccgttatcaacttgaaaaagtggcaccgagtcggtgcagttttgggaccactgtctctccgtgggtggtgcccatggat

SEQ ID NO: 17554 - DNA, 138 bp, synthetic construct
  source 1..138: mol_type = other DNA
tgggaccactgtctctccgtgttttagagctagaaatagcaagttaaaataaggctagtccgttatcaacttgaaaaagtggcaccgagtcggtgcgcatgagagcatccatgggcaccacccacggagagacagtgg

SEQ ID NO: 17555 - DNA, 138 bp, synthetic construct
  source 1..138: mol_type = other DNA
gagagcatccatgggcaccagttttagagctagaaatagcaagttaaaataaggctagtccgttatcaacttgaaaaagtggcaccgagtcggtgcgttttgggaccactgtctctccgtgggtggtgcccatggatg

SEQ ID NO: 17556 - DNA, 212 bp, synthetic construct
  source 1..212: mol_type = other DNA
catgagagcatccatgggcaccagctatagttccttactgaaaggtaagttgctatagtaagggcaacagacccgaggcgttggggatcgcctagcccgtgtttacgggctctccccatattcaaaataatgacagacgagcaccttggagcatttatctccgaggtgctgttttgggaccactgtctctccgtgggtggtgcccatggatg

SEQ ID NO: 17557 - DNA, 139 bp, synthetic construct
  source 1..139: mol_type = other DNA
tttgggaccactgtctctccggttttagtactctggaaacagaatctactaaaacaaggcaaaatgccgtgtttatctcgtcaacttgttggcgagacatgagagcatccatgggcaccacccacggagagacagtggt

SEQ ID NO: 17558 - DNA, 138 bp, synthetic construct
  source 1..138: mol_type = other DNA
ttgggaccactgtctctccggttttagagctagaaatagcaagttaaaataaggctagtccgttatcaacttgaaaaagtggcaccgagtcggtgccatgagagcatccatgggcaccacccacggagagacagtggt

SEQ ID NO: 17559 - DNA, 138 bp, synthetic construct
  source 1..138: mol_type = other DNA
tgagagcatccatgggcaccgttttagagctagaaatagcaagttaaaataaggctagtccgttatcaacttgaaaaagtggcaccgagtcggtgcttttgggaccactgtctctccgtgggtggtgcccatggatgc

SEQ ID NO: 17560 - DNA, 141 bp, synthetic construct
  source 1..141: mol_type = other DNA
agttttgggaccactgtctctccgttttagtactctggaaacagaatctactaaaacaaggcaaaatgccgtgtttatctcgtcaacttgttggcgagaatgagagcatccatgggcaccacccacggagagacagtggtc

SEQ ID NO: 17561 - DNA, 139 bp, synthetic construct
  source 1..139: mol_type = other DNA
ttttgggaccactgtctctccgttttagtactctggaaacagaatctactaaaacaaggcaaaatgccgtgtttatctcgtcaacttgttggcgagaatgagagcatccatgggcaccacccacggagagacagtggtc

SEQ ID NO: 17562 - DNA, 138 bp, synthetic construct
  source 1..138: mol_type = other DNA
tttgggaccactgtctctccgttttagagctagaaatagcaagttaaaataaggctagtccgttatcaacttgaaaaagtggcaccgagtcggtgcatgagagcatccatgggcaccacccacggagagacagtggtc

SEQ ID NO: 17563 - DNA, 138 bp, synthetic construct
  source 1..138: mol_type = other DNA
atgagagcatccatgggcacgttttagagctagaaatagcaagttaaaataaggctagtccgttatcaacttgaaaaagtggcaccgagtcggtgctttgggaccactgtctctccgtgggtggtgcccatggatgct

SEQ ID NO: 17564 - DNA, 212 bp, synthetic construct
  source 1..212: mol_type = other DNA
ggcatgagagcatccatgggcacgctatagttccttactgaaaggtaagttgctatagtaagggcaacagacccgaggcgttggggatcgcctagcccgtgtttacgggctctccccatattcaaaataatgacagacgagcaccttggagcatttatctccgaggtgcttttgggaccactgtctctccgtgggtggtgcccatggatgct

SEQ ID NO: 17565 - DNA, 139 bp, synthetic construct
  source 1..139: mol_type = other DNA
gttttgggaccactgtctctcgttttagtactctggaaacagaatctactaaaacaaggcaaaatgccgtgtttatctcgtcaacttgttggcgagatgagagcatccatgggcaccacccacggagagacagtggtcc

SEQ ID NO: 17566 - DNA, 138 bp, synthetic construct
  source 1..138: mol_type = other DNA
ttttgggaccactgtctctcgttttagagctagaaatagcaagttaaaataaggctagtccgttatcaacttgaaaaagtggcaccgagtcggtgctgagagcatccatgggcaccacccacggagagacagtggtcc

SEQ ID NO: 17567 - DNA, 138 bp, synthetic construct
  source 1..138: mol_type = other DNA
catgagagcatccatgggcagttttagagctagaaatagcaagttaaaataaggctagtccgttatcaacttgaaaaagtggcaccgagtcggtgcttgggaccactgtctctccgtgggtggtgcccatggatgctc

SEQ ID NO: 17568 - DNA, 138 bp, synthetic construct
  source 1..138: mol_type = other DNA
gttttgggaccactgtctctgttttagagctagaaatagcaagttaaaataaggctagtccgttatcaacttgaaaaagtggcaccgagtcggtgcgagagcatccatgggcaccacccacggagagacagtggtccc

SEQ ID NO: 17569 - DNA, 138 bp, synthetic construct
  source 1..138: mol_type = other DNA
gcatgagagcatccatgggcgttttagagctagaaatagcaagttaaaataaggctagtccgttatcaacttgaaaaagtggcaccgagtcggtgctgggaccactgtctctccgtgggtggtgcccatggatgctct

SEQ ID NO: 17570 - DNA, 212 bp, synthetic construct
  source 1..212: mol_type = other DNA
agggcatgagagcatccatgggcgctatagttccttactgaaaggtaagttgctatagtaagggcaacagacccgaggcgttggggatcgcctagcccgtgtttacgggctctccccatattcaaaataatgacagacgagcaccttggagcatttatctccgaggtgcttgggaccactgtctctccgtgggtggtgcccatggatgctct

SEQ ID NO: 17571 - DNA, 138 bp, synthetic construct
  source 1..138: mol_type = other DNA
agttttgggaccactgtctcgttttagagctagaaatagcaagttaaaataaggctagtccgttatcaacttgaaaaagtggcaccgagtcggtgcagagcatccatgggcaccacccacggagagacagtggtccca

SEQ ID NO: 17572 - DNA, 138 bp, synthetic construct
  source 1..138: mol_type = other DNA
ggcatgagagcatccatggggttttagagctagaaatagcaagttaaaataaggctagtccgttatcaacttgaaaaagtggcaccgagtcggtgcgggaccactgtctctccgtgggtggtgcccatggatgctctc

SEQ ID NO: 17573 - DNA, 138 bp, synthetic construct
  source 1..138: mol_type = other DNA
gagttttgggaccactgtctgttttagagctagaaatagcaagttaaaataaggctagtccgttatcaacttgaaaaagtggcaccgagtcggtgcgagcatccatgggcaccacccacggagagacagtggtcccaa

SEQ ID NO: 17574 - DNA, 138 bp, synthetic construct
  source 1..138: mol_type = other DNA
gggcatgagagcatccatgggttttagagctagaaatagcaagttaaaataaggctagtccgttatcaacttgaaaaagtggcaccgagtcggtgcggaccactgtctctccgtgggtggtgcccatggatgctctca

SEQ ID NO: 17575 - DNA, 212 bp, synthetic construct
  source 1..212: mol_type = other DNA
aaagggcatgagagcatccatgggctatagttccttactgaaaggtaagttgctatagtaagggcaacagacccgaggcgttggggatcgcctagcccgtgtttacgggctctccccatattcaaaataatgacagacgagcaccttggagcatttatctccgaggtgctggaccactgtctctccgtgggtggtgcccatggatgctctca

SEQ ID NO: 17576 - DNA, 187 bp, synthetic construct
  source 1..187: mol_type = other DNA
gcaaagggcatgagagcatccatggttgtagctccctttctcatttcggaaacgaaatgagaaccgttgctacaataaggccgtctgaaaagatgtgccgcaacgctctgccccttaaagcttctgctttaaggggcatcgtttagaccactgtctctccgtgggtggtgcccatggatgctctcat

SEQ ID NO: 17577 - DNA, 138 bp, synthetic construct
  source 1..138: mol_type = other DNA
agggcatgagagcatccatggttttagagctagaaatagcaagttaaaataaggctagtccgttatcaacttgaaaaagtggcaccgagtcggtgcgaccactgtctctccgtgggtggtgcccatggatgctctcat

SEQ ID NO: 17578 - DNA, 138 bp, synthetic construct
  source 1..138: mol_type = other DNA
agagttttgggaccactgtcgttttagagctagaaatagcaagttaaaataaggctagtccgttatcaacttgaaaaagtggcaccgagtcggtgcagcatccatgggcaccacccacggagagacagtggtcccaaa

SEQ ID NO: 17579 - DNA, 212 bp, synthetic construct
  source 1..212: mol_type = other DNA
ggaagagttttgggaccactgtcgctatagttccttactgaaaggtaagttgctatagtaagggcaacagacccgaggcgttggggatcgcctagcccgtgtttacgggctctccccatattcaaaataatgacagacgagcaccttggagcatttatctccgaggtgctagcatccatgggcaccacccacggagagacagtggtcccaaa

SEQ ID NO: 17580 - DNA, 212 bp, synthetic construct
  source 1..212: mol_type = other DNA
caaagggcatgagagcatccatggctatagttccttactgaaaggtaagttgctatagtaagggcaacagacccgaggcgttggggatcgcctagcccgtgtttacgggctctccccatattcaaaataatgacagacgagcaccttggagcatttatctccgaggtgctgaccactgtctctccgtgggtggtgcccatggatgctctcat

SEQ ID NO: 17581 - DNA, 187 bp, synthetic construct
  source 1..187: mol_type = other DNA
tgggaagagttttgggaccactgtgttgtagctccctttctcatttcggaaacgaaatgagaaccgttgctacaataaggccgtctgaaaagatgtgccgcaacgctctgccccttaaagcttctgctttaaggggcatcgtttagcatccatgggcaccacccacggagagacagtggtcccaaaa

SEQ ID NO: 17582 - DNA, 138 bp, synthetic construct
  source 1..138: mol_type = other DNA
aagggcatgagagcatccatgttttagagctagaaatagcaagttaaaataaggctagtccgttatcaacttgaaaaagtggcaccgagtcggtgcaccactgtctctccgtgggtggtgcccatggatgctctcatg

SEQ ID NO: 17583 - DNA, 138 bp, synthetic construct
  source 1..138: mol_type = other DNA
aagagttttgggaccactgtgttttagagctagaaatagcaagttaaaataaggctagtccgttatcaacttgaaaaagtggcaccgagtcggtgcgcatccatgggcaccacccacggagagacagtggtcccaaaa

SEQ ID NO: 17584 - DNA, 212 bp, synthetic construct
  source 1..212: mol_type = other DNA
gggaagagttttgggaccactgtgctatagttccttactgaaaggtaagttgctatagtaagggcaacagacccgaggcgttggggatcgcctagcccgtgtttacgggctctccccatattcaaaataatgacagacgagcaccttggagcatttatctccgaggtgctgcatccatgggcaccacccacggagagacagtggtcccaaaa

SEQ ID NO: 17585 - DNA, 139 bp, synthetic construct
  source 1..139: mol_type = other DNA
caaagggcatgagagcatccagttttagtactctggaaacagaatctactaaaacaaggcaaaatgccgtgtttatctcgtcaacttgttggcgagaccactgtctctccgtgggtggtgcccatggatgctctcatgc

SEQ ID NO: 17586 - DNA, 138 bp, synthetic construct
  source 1..138: mol_type = other DNA
aaagggcatgagagcatccagttttagagctagaaatagcaagttaaaataaggctagtccgttatcaacttgaaaaagtggcaccgagtcggtgcccactgtctctccgtgggtggtgcccatggatgctctcatgc

SEQ ID NO: 17587 - DNA, 138 bp, synthetic construct
  source 1..138: mol_type = other DNA
gaagagttttgggaccactggttttagagctagaaatagcaagttaaaataaggctagtccgttatcaacttgaaaaagtggcaccgagtcggtgccatccatgggcaccacccacggagagacagtggtcccaaaac

SEQ ID NO: 17588 - DNA, 212 bp, synthetic construct
  source 1..212: mol_type = other DNA
agcaaagggcatgagagcatccagctatagttccttactgaaaggtaagttgctatagtaagggcaacagacccgaggcgttggggatcgcctagcccgtgtttacgggctctccccatattcaaaataatgacagacgagcaccttggagcatttatctccgaggtgctccactgtctctccgtgggtggtgcccatggatgctctcatgc

SEQ ID NO: 17589 - DNA, 141 bp, synthetic construct
  source 1..141: mol_type = other DNA
cagcaaagggcatgagagcatccgttttagtactctggaaacagaatctactaaaacaaggcaaaatgccgtgtttatctcgtcaacttgttggcgagacactgtctctccgtgggtggtgcccatggatgctctcatgcc

SEQ ID NO: 17590 - DNA, 139 bp, synthetic construct
  source 1..139: mol_type = other DNA
gcaaagggcatgagagcatccgttttagtactctggaaacagaatctactaaaacaaggcaaaatgccgtgtttatctcgtcaacttgttggcgagacactgtctctccgtgggtggtgcccatggatgctctcatgcc

SEQ ID NO: 17591 - DNA, 138 bp, synthetic construct
  source 1..138: mol_type = other DNA
caaagggcatgagagcatccgttttagagctagaaatagcaagttaaaataaggctagtccgttatcaacttgaaaaagtggcaccgagtcggtgccactgtctctccgtgggtggtgcccatggatgctctcatgcc

SEQ ID NO: 17592 - DNA, 138 bp, synthetic construct
  source 1..138: mol_type = other DNA
ggaagagttttgggaccactgttttagagctagaaatagcaagttaaaataaggctagtccgttatcaacttgaaaaagtggcaccgagtcggtgcatccatgggcaccacccacggagagacagtggtcccaaaact

SEQ ID NO: 17593 - DNA, 212 bp, synthetic construct
  source 1..212: mol_type = other DNA
ttgggaagagttttgggaccactgctatagttccttactgaaaggtaagttgctatagtaagggcaacagacccgaggcgttggggatcgcctagcccgtgtttacgggctctccccatattcaaaataatgacagacgagcaccttggagcatttatctccgaggtgctatccatgggcaccacccacggagagacagtggtcccaaaact

SEQ ID NO: 17594 - DNA, 139 bp, synthetic construct
  source 1..139: mol_type = other DNA
agcaaagggcatgagagcatcgttttagtactctggaaacagaatctactaaaacaaggcaaaatgccgtgtttatctcgtcaacttgttggcgagaactgtctctccgtgggtggtgcccatggatgctctcatgccc

SEQ ID NO: 17595 - DNA, 138 bp, synthetic construct
  source 1..138: mol_type = other DNA
gggaagagttttgggaccacgttttagagctagaaatagcaagttaaaataaggctagtccgttatcaacttgaaaaagtggcaccgagtcggtgctccatgggcaccacccacggagagacagtggtcccaaaactc

SEQ ID NO: 17596 - DNA, 138 bp, synthetic construct
  source 1..138: mol_type = other DNA
gcaaagggcatgagagcatcgttttagagctagaaatagcaagttaaaataaggctagtccgttatcaacttgaaaaagtggcaccgagtcggtgcactgtctctccgtgggtggtgcccatggatgctctcatgccc

SEQ ID NO: 17597 - DNA, 138 bp, synthetic construct
  source 1..138: mol_type = other DNA
tgggaagagttttgggaccagttttagagctagaaatagcaagttaaaataaggctagtccgttatcaacttgaaaaagtggcaccgagtcggtgcccatgggcaccacccacggagagacagtggtcccaaaactct

SEQ ID NO: 17598 - DNA, 138 bp, synthetic construct
  source 1..138: mol_type = other DNA
agcaaagggcatgagagcatgttttagagctagaaatagcaagttaaaataaggctagtccgttatcaacttgaaaaagtggcaccgagtcggtgcctgtctctccgtgggtggtgcccatggatgctctcatgccct

SEQ ID NO: 17599 - DNA, 212 bp, synthetic construct
  source 1..212: mol_type = other DNA
ccttgggaagagttttgggaccagctatagttccttactgaaaggtaagttgctatagtaagggcaacagacccgaggcgttggggatcgcctagcccgtgtttacgggctctccccatattcaaaataatgacagacgagcaccttggagcatttatctccgaggtgctccatgggcaccacccacggagagacagtggtcccaaaactct

SEQ ID NO: 17600 - DNA, 138 bp, synthetic construct
  source 1..138: mol_type = other DNA
ttgggaagagttttgggaccgttttagagctagaaatagcaagttaaaataaggctagtccgttatcaacttgaaaaagtggcaccgagtcggtgccatgggcaccacccacggagagacagtggtcccaaaactctt

SEQ ID NO: 17601 - DNA, 138 bp, synthetic construct
  source 1..138: mol_type = other DNA
cagcaaagggcatgagagcagttttagagctagaaatagcaagttaaaataaggctagtccgttatcaacttgaaaaagtggcaccgagtcggtgctgtctctccgtgggtggtgcccatggatgctctcatgccctt

SEQ ID NO: 17602 - DNA, 138 bp, synthetic construct
  source 1..138: mol_type = other DNA
cttgggaagagttttgggacgttttagagctagaaatagcaagttaaaataaggctagtccgttatcaacttgaaaaagtggcaccgagtcggtgcatgggcaccacccacggagagacagtggtcccaaaactcttc

SEQ ID NO: 17603 - DNA, 138 bp, synthetic construct
  source 1..138: mol_type = other DNA
acagcaaagggcatgagagcgttttagagctagaaatagcaagttaaaataaggctagtccgttatcaacttgaaaaagtggcaccgagtcggtgcgtctctccgtgggtggtgcccatggatgctctcatgcccttt

SEQ ID NO: 17604 - DNA, 138 bp, synthetic construct
  source 1..138: mol_type = other DNA
ccttgggaagagttttgggagttttagagctagaaatagcaagttaaaataaggctagtccgttatcaacttgaaaaagtggcaccgagtcggtgctgggcaccacccacggagagacagtggtcccaaaactcttcc

SEQ ID NO: 17605 - DNA, 138 bp, synthetic construct
  source 1..138: mol_type = other DNA
cacagcaaagggcatgagaggttttagagctagaaatagcaagttaaaataaggctagtccgttatcaacttgaaaaagtggcaccgagtcggtgctctctccgtgggtggtgcccatggatgctctcatgccctttg

SEQ ID NO: 17606 - DNA, 212 bp, synthetic construct
  source 1..212: mol_type = other DNA
gggcacagcaaagggcatgagaggctatagttccttactgaaaggtaagttgctatagtaagggcaacagacccgaggcgttggggatcgcctagcccgtgtttacgggctctccccatattcaaaataatgacagacgagcaccttggagcatttatctccgaggtgcttctctccgtgggtggtgcccatggatgctctcatgccctttg

SEQ ID NO: 17607 - DNA, 187 bp, synthetic construct
  source 1..187: mol_type = other DNA
ttgggcacagcaaagggcatgagagttgtagctccctttctcatttcggaaacgaaatgagaaccgttgctacaataaggccgtctgaaaagatgtgccgcaacgctctgccccttaaagcttctgctttaaggggcatcgtttactctccgtgggtggtgcccatggatgctctcatgccctttgc

SEQ ID NO: 17608 - DNA, 138 bp, synthetic construct
  source 1..138: mol_type = other DNA
tccttgggaagagttttggggttttagagctagaaatagcaagttaaaataaggctagtccgttatcaacttgaaaaagtggcaccgagtcggtgcgggcaccacccacggagagacagtggtcccaaaactcttccc

SEQ ID NO: 17609 - DNA, 138 bp, synthetic construct
  source 1..138: mol_type = other DNA
gcacagcaaagggcatgagagttttagagctagaaatagcaagttaaaataaggctagtccgttatcaacttgaaaaagtggcaccgagtcggtgcctctccgtgggtggtgcccatggatgctctcatgccctttgc

SEQ ID NO: 17610 - DNA, 212 bp, synthetic construct
  source 1..212: mol_type = other DNA
cattccttgggaagagttttggggctatagttccttactgaaaggtaagttgctatagtaagggcaacagacccgaggcgttggggatcgcctagcccgtgtttacgggctctccccatattcaaaataatgacagacgagcaccttggagcatttatctccgaggtgctgggcaccacccacggagagacagtggtcccaaaactcttccc

SEQ ID NO: 17611 - DNA, 212 bp, synthetic construct
  source 1..212: mol_type = other DNA
tgggcacagcaaagggcatgagagctatagttccttactgaaaggtaagttgctatagtaagggcaacagacccgaggcgttggggatcgcctagcccgtgtttacgggctctccccatattcaaaataatgacagacgagcaccttggagcatttatctccgaggtgctctctccgtgggtggtgcccatggatgctctcatgccctttgc

SEQ ID NO: 17612 - DNA, 138 bp, synthetic construct
  source 1..138: mol_type = other DNA
ggcacagcaaagggcatgaggttttagagctagaaatagcaagttaaaataaggctagtccgttatcaacttgaaaaagtggcaccgagtcggtgctctccgtgggtggtgcccatggatgctctcatgccctttgct

SEQ ID NO: 17613 - DNA, 138 bp, synthetic construct
  source 1..138: mol_type = other DNA
ttccttgggaagagttttgggttttagagctagaaatagcaagttaaaataaggctagtccgttatcaacttgaaaaagtggcaccgagtcggtgcggcaccacccacggagagacagtggtcccaaaactcttccca

SEQ ID NO: 17614 - DNA, 138 bp, synthetic construct
  source 1..138: mol_type = other DNA
gggcacagcaaagggcatgagttttagagctagaaatagcaagttaaaataaggctagtccgttatcaacttgaaaaagtggcaccgagtcggtgcctccgtgggtggtgcccatggatgctctcatgccctttgctg

SEQ ID NO: 17615 - DNA, 138 bp, synthetic construct
  source 1..138: mol_type = other DNA
attccttgggaagagttttggttttagagctagaaatagcaagttaaaataaggctagtccgttatcaacttgaaaaagtggcaccgagtcggtgcgcaccacccacggagagacagtggtcccaaaactcttcccaa

SEQ ID NO: 17616 - DNA, 212 bp, synthetic construct
  source 1..212: mol_type = other DNA
gccattccttgggaagagttttggctatagttccttactgaaaggtaagttgctatagtaagggcaacagacccgaggcgttggggatcgcctagcccgtgtttacgggctctccccatattcaaaataatgacagacgagcaccttggagcatttatctccgaggtgctgcaccacccacggagagacagtggtcccaaaactcttcccaa

SEQ ID NO: 17617 - DNA, 187 bp, synthetic construct
  source 1..187: mol_type = other DNA
gggccattccttgggaagagttttgttgtagctccctttctcatttcggaaacgaaatgagaaccgttgctacaataaggccgtctgaaaagatgtgccgcaacgctctgccccttaaagcttctgctttaaggggcatcgtttacaccacccacggagagacagtggtcccaaaactcttcccaag

SEQ ID NO: 17618 - DNA, 139 bp, synthetic construct
  source 1..139: mol_type = other DNA
ttgggcacagcaaagggcatggttttagtactctggaaacagaatctactaaaacaaggcaaaatgccgtgtttatctcgtcaacttgttggcgagatccgtgggtggtgcccatggatgctctcatgccctttgctgt

SEQ ID NO: 17619 - DNA, 138 bp, synthetic construct
  source 1..138: mol_type = other DNA
cattccttgggaagagttttgttttagagctagaaatagcaagttaaaataaggctagtccgttatcaacttgaaaaagtggcaccgagtcggtgccaccacccacggagagacagtggtcccaaaactcttcccaag

SEQ ID NO: 17620 - DNA, 138 bp, synthetic construct
  source 1..138: mol_type = other DNA
tgggcacagcaaagggcatggttttagagctagaaatagcaagttaaaataaggctagtccgttatcaacttgaaaaagtggcaccgagtcggtgctccgtgggtggtgcccatggatgctctcatgccctttgctgt

SEQ ID NO: 17621 - DNA, 212 bp, synthetic construct
  source 1..212: mol_type = other DNA
ggccattccttgggaagagttttgctatagttccttactgaaaggtaagttgctatagtaagggcaacagacccgaggcgttggggatcgcctagcccgtgtttacgggctctccccatattcaaaataatgacagacgagcaccttggagcatttatctccgaggtgctcaccacccacggagagacagtggtcccaaaactcttcccaag

SEQ ID NO: 17622 - DNA, 212 bp, synthetic construct
  source 1..212: mol_type = other DNA
ggttgggcacagcaaagggcatggctatagttccttactgaaaggtaagttgctatagtaagggcaacagacccgaggcgttggggatcgcctagcccgtgtttacgggctctccccatattcaaaataatgacagacgagcaccttggagcatttatctccgaggtgcttccgtgggtggtgcccatggatgctctcatgccctttgctgt

SEQ ID NO: 17623 - DNA, 142 bp, synthetic construct
  source 1..142: mol_type = other DNA
gggccattccttgggaagagtttgttttagtactctggaaacagaatctactaaaacaaggcaaaatgccgtgtttatctcgtcaacttgttggcgagacaccacccacggagagacagtggtcccaaaactcttcccaagg

SEQ ID NO: 17624 - DNA, 142 bp, synthetic construct
  source 1..142: mol_type = other DNA
gggttgggcacagcaaagggcatgttttagtactctggaaacagaatctactaaaacaaggcaaaatgccgtgtttatctcgtcaacttgttggcgagatccgtgggtggtgcccatggatgctctcatgccctttgctgtg

SEQ ID NO: 17625 - DNA, 140 bp, synthetic construct
  source 1..140: mol_type = other DNA
gccattccttgggaagagtttgttttagtactctggaaacagaatctactaaaacaaggcaaaatgccgtgtttatctcgtcaacttgttggcgagacaccacccacggagagacagtggtcccaaaactcttcccaagg

SEQ ID NO: 17626 - DNA, 140 bp, synthetic construct
  source 1..140: mol_type = other DNA
gttgggcacagcaaagggcatgttttagtactctggaaacagaatctactaaaacaaggcaaaatgccgtgtttatctcgtcaacttgttggcgagatccgtgggtggtgcccatggatgctctcatgccctttgctgtg

SEQ ID NO: 17627 - DNA, 139 bp, synthetic construct
  source 1..139: mol_type = other DNA
ccattccttgggaagagtttgttttagagctagaaatagcaagttaaaataaggctagtccgttatcaacttgaaaaagtggcaccgagtcggtgccaccacccacggagagacagtggtcccaaaactcttcccaagg

SEQ ID NO: 17628 - DNA, 139 bp, synthetic construct
  source 1..139: mol_type = other DNA
ttgggcacagcaaagggcatgttttagagctagaaatagcaagttaaaataaggctagtccgttatcaacttgaaaaagtggcaccgagtcggtgctccgtgggtggtgcccatggatgctctcatgccctttgctgtg

SEQ ID NO: 17629 - DNA, 143 bp, synthetic construct
  source 1..143: mol_type = other DNA
cgggccattccttgggaagagttgttttagtactctggaaacagaatctactaaaacaaggcaaaatgccgtgtttatctcgtcaacttgttggcgagacaccacccacggagagacagtggtcccaaaactcttcccaagga

SEQ ID NO: 17630 - DNA, 141 bp, synthetic construct
  source 1..141: mol_type = other DNA
ggccattccttgggaagagttgttttagtactctggaaacagaatctactaaaacaaggcaaaatgccgtgtttatctcgtcaacttgttggcgagacaccacccacggagagacagtggtcccaaaactcttcccaagga

SEQ ID NO: 17631 - DNA, 141 bp, synthetic construct
  source 1..141: mol_type = other DNA
ggttgggcacagcaaagggcagttttagtactctggaaacagaatctactaaaacaaggcaaaatgccgtgtttatctcgtcaacttgttggcgagatccgtgggtggtgcccatggatgctctcatgccctttgctgtgc

SEQ ID NO: 17632 - DNA, 140 bp, synthetic construct
  source 1..140: mol_type = other DNA
gccattccttgggaagagttgttttagagctagaaatagcaagttaaaataaggctagtccgttatcaacttgaaaaagtggcaccgagtcggtgccaccacccacggagagacagtggtcccaaaactcttcccaagga

SEQ ID NO: 17633 - DNA, 140 bp, synthetic construct
  source 1..140: mol_type = other DNA
gttgggcacagcaaagggcagttttagagctagaaatagcaagttaaaataaggctagtccgttatcaacttgaaaaagtggcaccgagtcggtgctccgtgggtggtgcccatggatgctctcatgccctttgctgtgc

SEQ ID NO: 17634 - DNA, 144 bp, synthetic construct
  source 1..144: mol_type = other DNA
tcgggttgggcacagcaaagggcgttttagtactctggaaacagaatctactaaaacaaggcaaaatgccgtgtttatctcgtcaacttgttggcgagatccgtgggtggtgcccatggatgctctcatgccctttgctgtgcc

SEQ ID NO: 17635 - DNA, 142 bp, synthetic construct
  source 1..142: mol_type = other DNA
gggccattccttgggaagagtgttttagtactctggaaacagaatctactaaaacaaggcaaaatgccgtgtttatctcgtcaacttgttggcgagacaccacccacggagagacagtggtcccaaaactcttcccaaggaa

SEQ ID NO: 17636 - DNA, 142 bp, synthetic construct
  source 1..142: mol_type = other DNA
gggttgggcacagcaaagggcgttttagtactctggaaacagaatctactaaaacaaggcaaaatgccgtgtttatctcgtcaacttgttggcgagatccgtgggtggtgcccatggatgctctcatgccctttgctgtgcc

SEQ ID NO: 17637 - DNA, 141 bp, synthetic construct
  source 1..141: mol_type = other DNA
ggttgggcacagcaaagggcgttttagagctagaaatagcaagttaaaataaggctagtccgttatcaacttgaaaaagtggcaccgagtcggtgctccgtgggtggtgcccatggatgctctcatgccctttgctgtgcc

SEQ ID NO: 17638 - DNA, 141 bp, synthetic construct
  source 1..141: mol_type = other DNA
ggccattccttgggaagagtgttttagagctagaaatagcaagttaaaataaggctagtccgttatcaacttgaaaaagtggcaccgagtcggtgccaccacccacggagagacagtggtcccaaaactcttcccaaggaa

SEQ ID NO: 17639 - DNA, 143 bp, synthetic construct
  source 1..143: mol_type = other DNA
cgggttgggcacagcaaaggggttttagtactctggaaacagaatctactaaaacaaggcaaaatgccgtgtttatctcgtcaacttgttggcgagatccgtgggtggtgcccatggatgctctcatgccctttgctgtgccc

SEQ ID NO: 17640 - DNA, 142 bp, synthetic construct
  source 1..142: mol_type = other DNA
gggccattccttgggaagaggttttagagctagaaatagcaagttaaaataaggctagtccgttatcaacttgaaaaagtggcaccgagtcggtgccaccacccacggagagacagtggtcccaaaactcttcccaaggaat

SEQ ID NO: 17641 - DNA, 142 bp, synthetic construct
  source 1..142: mol_type = other DNA
gggttgggcacagcaaaggggttttagagctagaaatagcaagttaaaataaggctagtccgttatcaacttgaaaaagtggcaccgagtcggtgctccgtgggtggtgcccatggatgctctcatgccctttgctgtgccc

SEQ ID NO: 17642 - DNA, 143 bp, synthetic construct
  source 1..143: mol_type = other DNA
cgggccattccttgggaagagttttagagctagaaatagcaagttaaaataaggctagtccgttatcaacttgaaaaagtggcaccgagtcggtgccaccacccacggagagacagtggtcccaaaactcttcccaaggaatg

SEQ ID NO: 17643 - DNA, 143 bp, synthetic construct
  source 1..143: mol_type = other DNA
cgggttgggcacagcaaagggttttagagctagaaatagcaagttaaaataaggctagtccgttatcaacttgaaaaagtggcaccgagtcggtgctccgtgggtggtgcccatggatgctctcatgccctttgctgtgccca

SEQ ID NO: 17644 - DNA, 144 bp, synthetic construct
  source 1..144: mol_type = other DNA
tcgggccattccttgggaaggttttagagctagaaatagcaagttaaaataaggctagtccgttatcaacttgaaaaagtggcaccgagtcggtgccaccacccacggagagacagtggtcccaaaactcttcccaaggaatgg

SEQ ID NO: 17645 - DNA, 144 bp, synthetic construct
  source 1..144: mol_type = other DNA
tcgggttgggcacagcaaaggttttagagctagaaatagcaagttaaaataaggctagtccgttatcaacttgaaaaagtggcaccgagtcggtgctccgtgggtggtgcccatggatgctctcatgccctttgctgtgcccaa

SEQ ID NO: 17646 - DNA, 145 bp, synthetic construct
  source 1..145: mol_type = other DNA
ctcgggccattccttgggaagttttagagctagaaatagcaagttaaaataaggctagtccgttatcaacttgaaaaagtggcaccgagtcggtgccaccacccacggagagacagtggtcccaaaactcttcccaaggaatggc

SEQ ID NO: 17647 - DNA, 145 bp, synthetic construct
  source 1..145: mol_type = other DNA
ttcgggttgggcacagcaaagttttagagctagaaatagcaagttaaaataaggctagtccgttatcaacttgaaaaagtggcaccgagtcggtgctccgtgggtggtgcccatggatgctctcatgccctttgctgtgcccaac

SEQ ID NO: 17648 - DNA, 99 bp, synthetic construct
  source 1..99: mol_type = other DNA
tggctgtgcccttcttctgcagcgttttagtactctggaaacagaatctactaaaacaaggcaaaatgccgtgtttatctcgtcaacttgttggcgaga

SEQ ID NO: 17649 - DNA, 97 bp, synthetic construct
  source 1..97: mol_type = other DNA
ccctgatcagcctttgtaagtgttttagtactctggaaacagaatctactaaaacaaggcaaaatgccgtgtttatctcgtcaacttgttggcgaga

SEQ ID NO: 17650 - DNA, 96 bp, synthetic construct
  source 1..96: mol_type = other DNA
agcctttgtaagtcctggctgttttagagctagaaatagcaagttaaaataaggctagtccgttatcaacttgaaaaagtggcaccgagtcggtgc

SEQ ID NO: 17651 - DNA, 96 bp, synthetic construct
  source 1..96: mol_type = other DNA
tgatcagcctttgtaagtccgttttagagctagaaatagcaagttaaaataaggctagtccgttatcaacttgaaaaagtggcaccgagtcggtgc

SEQ ID NO: 17652 - DNA, 96 bp, synthetic construct
  source 1..96: mol_type = other DNA
cagcctttgtaagtcctggcgttttagagctagaaatagcaagttaaaataaggctagtccgttatcaacttgaaaaagtggcaccgagtcggtgc

SEQ ID NO: 17653 - DNA, 97 bp, synthetic construct
  source 1..97: mol_type = other DNA
cctgatcagcctttgtaagtcgttttagtactctggaaacagaatctactaaaacaaggcaaaatgccgtgtttatctcgtcaacttgttggcgaga

SEQ ID NO: 17654 - DNA, 96 bp, synthetic construct
  source 1..96: mol_type = other DNA
tgggcaagcagcctcagagggttttagagctagaaatagcaagttaaaataaggctagtccgttatcaacttgaaaaagtggcaccgagtcggtgc

SEQ ID NO: 17655 - DNA, 96 bp, synthetic construct
  source 1..96: mol_type = other DNA
cagtgggcaagcagcctcaggttttagagctagaaatagcaagttaaaataaggctagtccgttatcaacttgaaaaagtggcaccgagtcggtgc

SEQ ID NO: 17656 - DNA, 96 bp, synthetic construct
  source 1..96: mol_type = other DNA
gggcaagcagcctcagaggcgttttagagctagaaatagcaagttaaaataaggctagtccgttatcaacttgaaaaagtggcaccgagtcggtgc

SEQ ID NO: 17657 - DNA, 96 bp, synthetic construct
  source 1..96: mol_type = other DNA
gcctttgtaagtcctggctggttttagagctagaaatagcaagttaaaataaggctagtccgttatcaacttgaaaaagtggcaccgagtcggtgc

SEQ ID NO: 17658 - DNA, 97 bp, synthetic construct
  source 1..97: mol_type = other DNA
ggcaagcagcctcagaggcaggttttagtactctggaaacagaatctactaaaacaaggcaaaatgccgtgtttatctcgtcaacttgttggcgaga

SEQ ID NO: 17659 - DNA, 97 bp, synthetic construct
  source 1..97: mol_type = other DNA
gggcaagcagcctcagaggcagttttagtactctggaaacagaatctactaaaacaaggcaaaatgccgtgtttatctcgtcaacttgttggcgaga

SEQ ID NO: 17660 - DNA, 96 bp, synthetic construct
  source 1..96: mol_type = other DNA
cctttgtaagtcctggctgtgttttagagctagaaatagcaagttaaaataaggctagtccgttatcaacttgaaaaagtggcaccgagtcggtgc

SEQ ID NO: 17661 - DNA, 96 bp, synthetic construct
  source 1..96: mol_type = other DNA
ggcaagcagcctcagaggcagttttagagctagaaatagcaagttaaaataaggctagtccgttatcaacttgaaaaagtggcaccgagtcggtgc

SEQ ID NO: 17662 - DNA, 96 bp, synthetic construct
  source 1..96: mol_type = other DNA
ctttgtaagtcctggctgtggttttagagctagaaatagcaagttaaaataaggctagtccgttatcaacttgaaaaagtggcaccgagtcggtgc

SEQ ID NO: 17663 - DNA, 96 bp, synthetic construct
  source 1..96: mol_type = other DNA
gcaagcagcctcagaggcaggttttagagctagaaatagcaagttaaaataaggctagtccgttatcaacttgaaaaagtggcaccgagtcggtgc

SEQ ID NO: 17664 - DNA, 96 bp, synthetic construct
  source 1..96: mol_type = other DNA
tttgtaagtcctggctgtgcgttttagagctagaaatagcaagttaaaataaggctagtccgttatcaacttgaaaaagtggcaccgagtcggtgc

SEQ ID NO: 17665 - DNA, 170 bp, synthetic construct
  source 1..170: mol_type = other DNA
gcctttgtaagtcctggctgtgcgctatagttccttactgaaaggtaagttgctatagtaagggcaacagacccgaggcgttggggatcgcctagcccgtgtttacgggctctccccatattcaaaataatgacagacgagcaccttggagcatttatctccgaggtgct

SEQ ID NO: 17666 - DNA, 97 bp, synthetic construct
  source 1..97: mol_type = other DNA
gcaagcagcctcagaggcagcgttttagtactctggaaacagaatctactaaaacaaggcaaaatgccgtgtttatctcgtcaacttgttggcgaga

SEQ ID NO: 17667 - DNA, 96 bp, synthetic construct
  source 1..96: mol_type = other DNA
caagcagcctcagaggcagcgttttagagctagaaatagcaagttaaaataaggctagtccgttatcaacttgaaaaagtggcaccgagtcggtgc

SEQ ID NO: 17668 - DNA, 96 bp, synthetic construct
  source 1..96: mol_type = other DNA
ttgtaagtcctggctgtgccgttttagagctagaaatagcaagttaaaataaggctagtccgttatcaacttgaaaaagtggcaccgagtcggtgc

SEQ ID NO: 17669 - DNA, 99 bp, synthetic construct
  source 1..99: mol_type = other DNA
tgggcaagcagcctcagaggcaggttttagtactctggaaacagaatctactaaaacaaggcaaaatgccgtgtttatctcgtcaacttgttggcgaga

SEQ ID NO: 17670 - DNA, 96 bp, synthetic construct
  source 1..96: mol_type = other DNA
aagcagcctcagaggcagcagttttagagctagaaatagcaagttaaaataaggctagtccgttatcaacttgaaaaagtggcaccgagtcggtgc

SEQ ID NO: 17671 - DNA, 96 bp, synthetic construct
  source 1..96: mol_type = other DNA
tgtaagtcctggctgtgcccgttttagagctagaaatagcaagttaaaataaggctagtccgttatcaacttgaaaaagtggcaccgagtcggtgc

SEQ ID NO: 17672 - DNA, 170 bp, synthetic construct
  source 1..170: mol_type = other DNA
tttgtaagtcctggctgtgccctgctatagttccttactgaaaggtaagttgctatagtaagggcaacagacccgaggcgttggggatcgcctagcccgtgtttacgggctctccccatattcaaaataatgacagacgagcaccttggagcatttatctccgaggtgct

SEQ ID NO: 17673 - DNA, 97 bp, synthetic construct
  source 1..97: mol_type = other DNA
agcagcctcagaggcagcagggttttagtactctggaaacagaatctactaaaacaaggcaaaatgccgtgtttatctcgtcaacttgttggcgaga

SEQ ID NO: 17674 - DNA, 96 bp, synthetic construct
  source 1..96: mol_type = other DNA
agcagcctcagaggcagcaggttttagagctagaaatagcaagttaaaataaggctagtccgttatcaacttgaaaaagtggcaccgagtcggtgc

SEQ ID NO: 17675 - DNA, 96 bp, synthetic construct
  source 1..96: mol_type = other DNA
gtaagtcctggctgtgccctgttttagagctagaaatagcaagttaaaataaggctagtccgttatcaacttgaaaaagtggcaccgagtcggtgc

SEQ ID NO: 17676 - DNA, 96 bp, synthetic construct
  source 1..96: mol_type = other DNA
cagcctcagaggcagcaggggttttagagctagaaatagcaagttaaaataaggctagtccgttatcaacttgaaaaagtggcaccgagtcggtgc

SEQ ID NO: 17677 - DNA, 96 bp, synthetic construct
  source 1..96: mol_type = other DNA
gcagcctcagaggcagcagggttttagagctagaaatagcaagttaaaataaggctagtccgttatcaacttgaaaaagtggcaccgagtcggtgc

SEQ ID NO: 17678 - DNA, 96 bp, synthetic construct
  source 1..96: mol_type = other DNA
taagtcctggctgtgcccttgttttagagctagaaatagcaagttaaaataaggctagtccgttatcaacttgaaaaagtggcaccgagtcggtgc

SEQ ID NO: 17679 - DNA, 96 bp, synthetic construct
  source 1..96: mol_type = other DNA
aagtcctggctgtgcccttcgttttagagctagaaatagcaagttaaaataaggctagtccgttatcaacttgaaaaagtggcaccgagtcggtgc

SEQ ID NO: 17680 - DNA, 96 bp, synthetic construct
  source 1..96: mol_type = other DNA
agcctcagaggcagcagggcgttttagagctagaaatagcaagttaaaataaggctagtccgttatcaacttgaaaaagtggcaccgagtcggtgc

SEQ ID NO: 17681 - DNA, 96 bp, synthetic construct
  source 1..96: mol_type = other DNA
agtcctggctgtgcccttctgttttagagctagaaatagcaagttaaaataaggctagtccgttatcaacttgaaaaagtggcaccgagtcggtgc

SEQ ID NO: 17682 - DNA, 170 bp, synthetic construct
  source 1..170: mol_type = other DNA
gtaagtcctggctgtgcccttctgctatagttccttactgaaaggtaagttgctatagtaagggcaacagacccgaggcgttggggatcgcctagcccgtgtttacgggctctccccatattcaaaataatgacagacgagcaccttggagcatttatctccgaggtgct

SEQ ID NO: 17683 - DNA, 145 bp, synthetic construct
  source 1..145: mol_type = other DNA
gatcagcctttgtaagtcctggctgttgtagctccctttctcatttcggaaacgaaatgagaaccgttgctacaataaggccgtctgaaaagatgtgccgcaacgctctgccccttaaagcttctgctttaaggggcatcgttta

SEQ ID NO: 17684 - DNA, 96 bp, synthetic construct
  source 1..96: mol_type = other DNA
tcctggctgtgcccttcttcgttttagagctagaaatagcaagttaaaataaggctagtccgttatcaacttgaaaaagtggcaccgagtcggtgc

SEQ ID NO: 17685 - DNA, 96 bp, synthetic construct
  source 1..96: mol_type = other DNA
gcctcagaggcagcagggctgttttagagctagaaatagcaagttaaaataaggctagtccgttatcaacttgaaaaagtggcaccgagtcggtgc

SEQ ID NO: 17686 - DNA, 96 bp, synthetic construct
  source 1..96: mol_type = other DNA
gtcctggctgtgcccttcttgttttagagctagaaatagcaagttaaaataaggctagtccgttatcaacttgaaaaagtggcaccgagtcggtgc

SEQ ID NO: 17687 - DNA, 170 bp, synthetic construct
  source 1..170: mol_type = other DNA
gggcaagcagcctcagaggcagcgctatagttccttactgaaaggtaagttgctatagtaagggcaacagacccgaggcgttggggatcgcctagcccgtgtttacgggctctccccatattcaaaataatgacagacgagcaccttggagcatttatctccgaggtgct

SEQ ID NO: 17688 - DNA, 145 bp, synthetic construct
  source 1..145: mol_type = other DNA
gaggcagcagggctgggtttgggagttgtagctccctttctcatttcggaaacgaaatgagaaccgttgctacaataaggccgtctgaaaagatgtgccgcaacgctctgccccttaaagcttctgctttaaggggcatcgttta

SEQ ID NO: 17689 - DNA, 96 bp, synthetic construct
  source 1..96: mol_type = other DNA
cctcagaggcagcagggctggttttagagctagaaatagcaagttaaaataaggctagtccgttatcaacttgaaaaagtggcaccgagtcggtgc

SEQ ID NO: 17690 - DNA, 170 bp, synthetic construct
  source 1..170: mol_type = other DNA
cagaggcagcagggctgggtttggctatagttccttactgaaaggtaagttgctatagtaagggcaacagacccgaggcgttggggatcgcctagcccgtgtttacgggctctccccatattcaaaataatgacagacgagcaccttggagcatttatctccgaggtgct

SEQ ID NO: 17691 - DNA, 97 bp, synthetic construct
  source 1..97: mol_type = other DNA
tcctggctgtgcccttcttctgttttagtactctggaaacagaatctactaaaacaaggcaaaatgccgtgtttatctcgtcaacttgttggcgaga

SEQ ID NO: 17692 - DNA, 96 bp, synthetic construct
  source 1..96: mol_type = other DNA
ctggctgtgcccttcttctggttttagagctagaaatagcaagttaaaataaggctagtccgttatcaacttgaaaaagtggcaccgagtcggtgc

SEQ ID NO: 17693 - DNA, 96 bp, synthetic construct
  source 1..96: mol_type = other DNA
ctcagaggcagcagggctgggttttagagctagaaatagcaagttaaaataaggctagtccgttatcaacttgaaaaagtggcaccgagtcggtgc

SEQ ID NO: 17694 - DNA, 96 bp, synthetic construct
  source 1..96: mol_type = other DNA
cctggctgtgcccttcttctgttttagagctagaaatagcaagttaaaataaggctagtccgttatcaacttgaaaaagtggcaccgagtcggtgc

SEQ ID NO: 17695 - DNA, 170 bp, synthetic construct
  source 1..170: mol_type = other DNA
agtcctggctgtgcccttcttctgctatagttccttactgaaaggtaagttgctatagtaagggcaacagacccgaggcgttggggatcgcctagcccgtgtttacgggctctccccatattcaaaataatgacagacgagcaccttggagcatttatctccgaggtgct

SEQ ID NO: 17696 - DNA, 97 bp, synthetic construct
  source 1..97: mol_type = other DNA
gtcctggctgtgcccttcttcgttttagtactctggaaacagaatctactaaaacaaggcaaaatgccgtgtttatctcgtcaacttgttggcgaga

SEQ ID NO: 17697 - DNA, 97 bp, synthetic construct
  source 1..97: mol_type = other DNA
tgcagcacgagacattcagaagttttagtactctggaaacagaatctactaaaacaaggcaaaatgccgtgtttatctcgtcaacttgttggcgaga

SEQ ID NO: 17698 - DNA, 96 bp, synthetic construct
  source 1..96: mol_type = other DNA
tcagaggcagcagggctggggttttagagctagaaatagcaagttaaaataaggctagtccgttatcaacttgaaaaagtggcaccgagtcggtgc

SEQ ID NO: 17699 - DNA, 97 bp, synthetic construct
  source 1..97: mol_type = other DNA
ggctgtgcccttcttctgcaggttttagtactctggaaacagaatctactaaaacaaggcaaaatgccgtgtttatctcgtcaacttgttggcgaga

SEQ ID NO: 17700 - DNA, 96 bp, synthetic construct
  source 1..96: mol_type = other DNA
agaggcagcagggctgggttgttttagagctagaaatagcaagttaaaataaggctagtccgttatcaacttgaaaaagtggcaccgagtcggtgc

SEQ ID NO: 17701 - DNA, 96 bp, synthetic construct
  source 1..96: mol_type = other DNA
cagaggcagcagggctgggtgttttagagctagaaatagcaagttaaaataaggctagtccgttatcaacttgaaaaagtggcaccgagtcggtgc

SEQ ID NO: 17702 - DNA, 96 bp, synthetic construct
  source 1..96: mol_type = other DNA
tggctgtgcccttcttctgcgttttagagctagaaatagcaagttaaaataaggctagtccgttatcaacttgaaaaagtggcaccgagtcggtgc

SEQ ID NO: 17703 - DNA, 96 bp, synthetic construct
  source 1..96: mol_type = other DNA
ggctgtgcccttcttctgcagttttagagctagaaatagcaagttaaaataaggctagtccgttatcaacttgaaaaagtggcaccgagtcggtgc

SEQ ID NO: 17704 - DNA, 96 bp, synthetic construct
  source 1..96: mol_type = other DNA
gaggcagcagggctgggtttgttttagagctagaaatagcaagttaaaataaggctagtccgttatcaacttgaaaaagtggcaccgagtcggtgc

SEQ ID NO: 17705 - DNA, 96 bp, synthetic construct
  source 1..96: mol_type = other DNA
gctgtgcccttcttctgcaggttttagagctagaaatagcaagttaaaataaggctagtccgttatcaacttgaaaaagtggcaccgagtcggtgc

SEQ ID NO: 17706 - DNA, 96 bp, synthetic construct
  source 1..96: mol_type = other DNA
aggcagcagggctgggtttggttttagagctagaaatagcaagttaaaataaggctagtccgttatcaacttgaaaaagtggcaccgagtcggtgc

SEQ ID NO: 17707 - DNA, 96 bp, synthetic construct
  source 1..96: mol_type = other DNA
ctgtgcccttcttctgcagcgttttagagctagaaatagcaagttaaaataaggctagtccgttatcaacttgaaaaagtggcaccgagtcggtgc

SEQ ID NO: 17708 - DNA, 96 bp, synthetic construct
  source 1..96: mol_type = other DNA
ggcagcagggctgggtttgggttttagagctagaaatagcaagttaaaataaggctagtccgttatcaacttgaaaaagtggcaccgagtcggtgc

SEQ ID NO: 17709 - DNA, 96 bp, synthetic construct
  source 1..96: mol_type = other DNA
tgtgcccttcttctgcagcagttttagagctagaaatagcaagttaaaataaggctagtccgttatcaacttgaaaaagtggcaccgagtcggtgc

SEQ ID NO: 17710 - DNA, 170 bp, synthetic construct
  source 1..170: mol_type = other DNA
gctgtgcccttcttctgcagcacgctatagttccttactgaaaggtaagttgctatagtaagggcaacagacccgaggcgttggggatcgcctagcccgtgtttacgggctctccccatattcaaaataatgacagacgagcaccttggagcatttatctccgaggtgct

SEQ ID NO: 17711 - DNA, 96 bp, synthetic construct
  source 1..96: mol_type = other DNA
gcagcagggctgggtttggggttttagagctagaaatagcaagttaaaataaggctagtccgttatcaacttgaaaaagtggcaccgagtcggtgc

SEQ ID NO: 17712 - DNA, 96 bp, synthetic construct
  source 1..96: mol_type = other DNA
gtgcccttcttctgcagcacgttttagagctagaaatagcaagttaaaataaggctagtccgttatcaacttgaaaaagtggcaccgagtcggtgc

SEQ ID NO: 17713 - DNA, 170 bp, synthetic construct
  source 1..170: mol_type = other DNA
aggcagcagggctgggtttgggagctatagttccttactgaaaggtaagttgctatagtaagggcaacagacccgaggcgttggggatcgcctagcccgtgtttacgggctctccccatattcaaaataatgacagacgagcaccttggagcatttatctccgaggtgct

SEQ ID NO: 17714 - DNA, 96 bp, synthetic construct
  source 1..96: mol_type = other DNA
tgcccttcttctgcagcacggttttagagctagaaatagcaagttaaaataaggctagtccgttatcaacttgaaaaagtggcaccgagtcggtgc

SEQ ID NO: 17715 - DNA, 96 bp, synthetic construct
  source 1..96: mol_type = other DNA
cagcagggctgggtttgggagttttagagctagaaatagcaagttaaaataaggctagtccgttatcaacttgaaaaagtggcaccgagtcggtgc

SEQ ID NO: 17716 - DNA, 96 bp, synthetic construct
  source 1..96: mol_type = other DNA
agcagggctgggtttgggaggttttagagctagaaatagcaagttaaaataaggctagtccgttatcaacttgaaaaagtggcaccgagtcggtgc

SEQ ID NO: 17717 - DNA, 96 bp, synthetic construct
  source 1..96: mol_type = other DNA
gcccttcttctgcagcacgagttttagagctagaaatagcaagttaaaataaggctagtccgttatcaacttgaaaaagtggcaccgagtcggtgc

SEQ ID NO: 17718 - DNA, 170 bp, synthetic construct
  source 1..170: mol_type = other DNA
ggcagcagggctgggtttgggaggctatagttccttactgaaaggtaagttgctatagtaagggcaacagacccgaggcgttggggatcgcctagcccgtgtttacgggctctccccatattcaaaataatgacagacgagcaccttggagcatttatctccgaggtgct

SEQ ID NO: 17719 - DNA, 97 bp, synthetic construct
  source 1..97: mol_type = other DNA
ctgtgcccttcttctgcagcagttttagtactctggaaacagaatctactaaaacaaggcaaaatgccgtgtttatctcgtcaacttgttggcgaga

SEQ ID NO: 17720 - DNA, 96 bp, synthetic construct
  source 1..96: mol_type = other DNA
gggctgggtttgggagcttcgttttagagctagaaatagcaagttaaaataaggctagtccgttatcaacttgaaaaagtggcaccgagtcggtgc

SEQ ID NO: 17721 - DNA, 96 bp, synthetic construct
  source 1..96: mol_type = other DNA
gcagggctgggtttgggagcgttttagagctagaaatagcaagttaaaataaggctagtccgttatcaacttgaaaaagtggcaccgagtcggtgc

SEQ ID NO: 17722 - DNA, 96 bp, synthetic construct
  source 1..96: mol_type = other DNA
cccttcttctgcagcacgaggttttagagctagaaatagcaagttaaaataaggctagtccgttatcaacttgaaaaagtggcaccgagtcggtgc

SEQ ID NO: 17723 - DNA, 170 bp, synthetic construct
  source 1..170: mol_type = other DNA
tgcccttcttctgcagcacgagagctatagttccttactgaaaggtaagttgctatagtaagggcaacagacccgaggcgttggggatcgcctagcccgtgtttacgggctctccccatattcaaaataatgacagacgagcaccttggagcatttatctccgaggtgct

SEQ ID NO: 17724 - DNA, 99 bp, synthetic construct
  source 1..99: mol_type = other DNA
gggctgggtttgggagcttcctggttttagtactctggaaacagaatctactaaaacaaggcaaaatgccgtgtttatctcgtcaacttgttggcgaga

SEQ ID NO: 17725 - DNA, 99 bp, synthetic construct
  source 1..99: mol_type = other DNA
cttcttctgcagcacgagacattgttttagtactctggaaacagaatctactaaaacaaggcaaaatgccgtgtttatctcgtcaacttgttggcgaga

SEQ ID NO: 17726 - DNA, 97 bp, synthetic construct
  source 1..97: mol_type = other DNA
gggctgggtttgggagcttccgttttagtactctggaaacagaatctactaaaacaaggcaaaatgccgtgtttatctcgtcaacttgttggcgaga

SEQ ID NO: 17727 - DNA, 97 bp, synthetic construct
  source 1..97: mol_type = other DNA
cttcttctgcagcacgagacagttttagtactctggaaacagaatctactaaaacaaggcaaaatgccgtgtttatctcgtcaacttgttggcgaga

SEQ ID NO: 17728 - DNA, 97 bp, synthetic construct
  source 1..97: mol_type = other DNA
cagaggcagcagggctgggttgttttagtactctggaaacagaatctactaaaacaaggcaaaatgccgtgtttatctcgtcaacttgttggcgaga

SEQ ID NO: 17729 - DNA, 97 bp, synthetic construct
  source 1..97: mol_type = other DNA
ggctgggtttgggagcttcctgttttagtactctggaaacagaatctactaaaacaaggcaaaatgccgtgtttatctcgtcaacttgttggcgaga

SEQ ID NO: 17730 - DNA, 96 bp, synthetic construct
  source 1..96: mol_type = other DNA
cttctgcagcacgagacattgttttagagctagaaatagcaagttaaaataaggctagtccgttatcaacttgaaaaagtggcaccgagtcggtgc

SEQ ID NO: 17731 - DNA, 96 bp, synthetic construct
  source 1..96: mol_type = other DNA
ggctgggtttgggagcttccgttttagagctagaaatagcaagttaaaataaggctagtccgttatcaacttgaaaaagtggcaccgagtcggtgc

SEQ ID NO: 17732 - DNA, 96 bp, synthetic construct
  source 1..96: mol_type = other DNA
cagggctgggtttgggagctgttttagagctagaaatagcaagttaaaataaggctagtccgttatcaacttgaaaaagtggcaccgagtcggtgc

SEQ ID NO: 17733 - DNA, 96 bp, synthetic construct
  source 1..96: mol_type = other DNA
ccttcttctgcagcacgagagttttagagctagaaatagcaagttaaaataaggctagtccgttatcaacttgaaaaagtggcaccgagtcggtgc

SEQ ID NO: 17734 - DNA, 97 bp, synthetic construct
  source 1..97: mol_type = other DNA
ttcttctgcagcacgagacatgttttagtactctggaaacagaatctactaaaacaaggcaaaatgccgtgtttatctcgtcaacttgttggcgaga

SEQ ID NO: 17735 - DNA, 96 bp, synthetic construct
  source 1..96: mol_type = other DNA
agggctgggtttgggagcttgttttagagctagaaatagcaagttaaaataaggctagtccgttatcaacttgaaaaagtggcaccgagtcggtgc

SEQ ID NO: 17736 - DNA, 96 bp, synthetic construct
  source 1..96: mol_type = other DNA
cttcttctgcagcacgagacgttttagagctagaaatagcaagttaaaataaggctagtccgttatcaacttgaaaaagtggcaccgagtcggtgc

SEQ ID NO: 17737 - DNA, 96 bp, synthetic construct
  source 1..96: mol_type = other DNA
ttcttctgcagcacgagacagttttagagctagaaatagcaagttaaaataaggctagtccgttatcaacttgaaaaagtggcaccgagtcggtgc

SEQ ID NO: 17738 - DNA, 96 bp, synthetic construct
  source 1..96: mol_type = other DNA
tcttctgcagcacgagacatgttttagagctagaaatagcaagttaaaataaggctagtccgttatcaacttgaaaaagtggcaccgagtcggtgc

SEQ ID NO: 17739 - DNA, 96 bp, synthetic construct
  source 1..96: mol_type = other DNA
gctgggtttgggagcttcctgttttagagctagaaatagcaagttaaaataaggctagtccgttatcaacttgaaaaagtggcaccgagtcggtgc

SEQ ID NO: 17740 - DNA, 96 bp, synthetic construct
  source 1..96: mol_type = other DNA
tgggtttgggagcttcctgcgttttagagctagaaatagcaagttaaaataaggctagtccgttatcaacttgaaaaagtggcaccgagtcggtgc

SEQ ID NO: 17741 - DNA, 96 bp, synthetic construct
  source 1..96: mol_type = other DNA
ttctgcagcacgagacattcgttttagagctagaaatagcaagttaaaataaggctagtccgttatcaacttgaaaaagtggcaccgagtcggtgc

SEQ ID NO: 17742 - DNA, 96 bp, synthetic construct
  source 1..96: mol_type = other DNA
ctgggtttgggagcttcctggttttagagctagaaatagcaagttaaaataaggctagtccgttatcaacttgaaaaagtggcaccgagtcggtgc

SEQ ID NO: 17743 - DNA, 96 bp, synthetic construct
  source 1..96: mol_type = other DNA
gggtttgggagcttcctgcagttttagagctagaaatagcaagttaaaataaggctagtccgttatcaacttgaaaaagtggcaccgagtcggtgc

SEQ ID NO: 17744 - DNA, 96 bp, synthetic construct
  source 1..96: mol_type = other DNA
ctgcagcacgagacattcaggttttagagctagaaatagcaagttaaaataaggctagtccgttatcaacttgaaaaagtggcaccgagtcggtgc

SEQ ID NO: 17745 - DNA, 96 bp, synthetic construct
  source 1..96: mol_type = other DNA
cagcacgagacattcagaaggttttagagctagaaatagcaagttaaaataaggctagtccgttatcaacttgaaaaagtggcaccgagtcggtgc

SEQ ID NO: 17746 - DNA, 96 bp, synthetic construct
  source 1..96: mol_type = other DNA
tctgcagcacgagacattcagttttagagctagaaatagcaagttaaaataaggctagtccgttatcaacttgaaaaagtggcaccgagtcggtgc

SEQ ID NO: 17747 - DNA, 139 bp, synthetic construct
  source 1..139: mol_type = other DNA
cctcagtgcagccagatattcgttttagtactctggaaacagaatctactaaaacaaggcaaaatgccgtgtttatctcgtcaacttgttggcgagaggcttctgggaccatcagcgggccggtgagtatctggctgca

SEQ ID NO: 17748 - DNA, 138 bp, synthetic construct
  source 1..138: mol_type = other DNA
ctcagtgcagccagatattcgttttagagctagaaatagcaagttaaaataaggctagtccgttatcaacttgaaaaagtggcaccgagtcggtgcggcttctgggaccatcagcgggccggtgagtatctggctgca

SEQ ID NO: 17749 - DNA, 138 bp, synthetic construct
  source 1..138: mol_type = other DNA
ccatcagcgggccggtgaatgttttagagctagaaatagcaagttaaaataaggctagtccgttatcaacttgaaaaagtggcaccgagtcggtgccgtgggcagccctcagtgcagccagatactcaccggcccgct

SEQ ID NO: 17750 - DNA, 138 bp, synthetic construct
  source 1..138: mol_type = other DNA
cctcagtgcagccagatattgttttagagctagaaatagcaagttaaaataaggctagtccgttatcaacttgaaaaagtggcaccgagtcggtgcgcttctgggaccatcagcgggccggtgagtatctggctgcac

SEQ ID NO: 17751 - DNA, 138 bp, synthetic construct
  source 1..138: mol_type = other DNA
accatcagcgggccggtgaagttttagagctagaaatagcaagttaaaataaggctagtccgttatcaacttgaaaaagtggcaccgagtcggtgcgtgggcagccctcagtgcagccagatactcaccggcccgctg

SEQ ID NO: 17752 - DNA, 138 bp, synthetic construct
  source 1..138: mol_type = other DNA
ccctcagtgcagccagatatgttttagagctagaaatagcaagttaaaataaggctagtccgttatcaacttgaaaaagtggcaccgagtcggtgccttctgggaccatcagcgggccggtgagtatctggctgcact

SEQ ID NO: 17753 - DNA, 212 bp, synthetic construct
  source 1..212: mol_type = other DNA
cagccctcagtgcagccagatatgctatagttccttactgaaaggtaagttgctatagtaagggcaacagacccgaggcgttggggatcgcctagcccgtgtttacgggctctccccatattcaaaataatgacagacgagcaccttggagcatttatctccgaggtgctcttctgggaccatcagcgggccggtgagtatctggctgcact

SEQ ID NO: 17754 - DNA, 187 bp, synthetic construct
  source 1..187: mol_type = other DNA
ggcagccctcagtgcagccagatagttgtagctccctttctcatttcggaaacgaaatgagaaccgttgctacaataaggccgtctgaaaagatgtgccgcaacgctctgccccttaaagcttctgctttaaggggcatcgtttattctgggaccatcagcgggccggtgagtatctggctgcactg

SEQ ID NO: 17755 - DNA, 138 bp, synthetic construct
  source 1..138: mol_type = other DNA
gaccatcagcgggccggtgagttttagagctagaaatagcaagttaaaataaggctagtccgttatcaacttgaaaaagtggcaccgagtcggtgctgggcagccctcagtgcagccagatactcaccggcccgctga

SEQ ID NO: 17756 - DNA, 138 bp, synthetic construct
  source 1..138: mol_type = other DNA
gccctcagtgcagccagatagttttagagctagaaatagcaagttaaaataaggctagtccgttatcaacttgaaaaagtggcaccgagtcggtgcttctgggaccatcagcgggccggtgagtatctggctgcactg

SEQ ID NO: 17757 - DNA, 212 bp, synthetic construct
  source 1..212: mol_type = other DNA
tgggaccatcagcgggccggtgagctatagttccttactgaaaggtaagttgctatagtaagggcaacagacccgaggcgttggggatcgcctagcccgtgtttacgggctctccccatattcaaaataatgacagacgagcaccttggagcatttatctccgaggtgcttgggcagccctcagtgcagccagatactcaccggcccgctga

SEQ ID NO: 17758 - DNA, 212 bp, synthetic construct
  source 1..212: mol_type = other DNA
gcagccctcagtgcagccagatagctatagttccttactgaaaggtaagttgctatagtaagggcaacagacccgaggcgttggggatcgcctagcccgtgtttacgggctctccccatattcaaaataatgacagacgagcaccttggagcatttatctccgaggtgctttctgggaccatcagcgggccggtgagtatctggctgcactg

SEQ ID NO: 17759 - DNA, 138 bp, synthetic construct
  source 1..138: mol_type = other DNA
ggaccatcagcgggccggtggttttagagctagaaatagcaagttaaaataaggctagtccgttatcaacttgaaaaagtggcaccgagtcggtgcgggcagccctcagtgcagccagatactcaccggcccgctgat

SEQ ID NO: 17760 - DNA, 138 bp, synthetic construct
  source 1..138: mol_type = other DNA
agccctcagtgcagccagatgttttagagctagaaatagcaagttaaaataaggctagtccgttatcaacttgaaaaagtggcaccgagtcggtgctctgggaccatcagcgggccggtgagtatctggctgcactga

SEQ ID NO: 17761 - DNA, 138 bp, synthetic construct
  source 1..138: mol_type = other DNA
gggaccatcagcgggccggtgttttagagctagaaatagcaagttaaaataaggctagtccgttatcaacttgaaaaagtggcaccgagtcggtgcggcagccctcagtgcagccagatactcaccggcccgctgatg

SEQ ID NO: 17762 - DNA, 138 bp, synthetic construct
  source 1..138: mol_type = other DNA
cagccctcagtgcagccagagttttagagctagaaatagcaagttaaaataaggctagtccgttatcaacttgaaaaagtggcaccgagtcggtgcctgggaccatcagcgggccggtgagtatctggctgcactgag

SEQ ID NO: 17763 - DNA, 212 bp, synthetic construct
  source 1..212: mol_type = other DNA
gggcagccctcagtgcagccagagctatagttccttactgaaaggtaagttgctatagtaagggcaacagacccgaggcgttggggatcgcctagcccgtgtttacgggctctccccatattcaaaataatgacagacgagcaccttggagcatttatctccgaggtgctctgggaccatcagcgggccggtgagtatctggctgcactgag

SEQ ID NO: 17764 - DNA, 138 bp, synthetic construct
  source 1..138: mol_type = other DNA
tgggaccatcagcgggccgggttttagagctagaaatagcaagttaaaataaggctagtccgttatcaacttgaaaaagtggcaccgagtcggtgcgcagccctcagtgcagccagatactcaccggcccgctgatgg

SEQ ID NO: 17765 - DNA, 138 bp, synthetic construct
  source 1..138: mol_type = other DNA
gcagccctcagtgcagccaggttttagagctagaaatagcaagttaaaataaggctagtccgttatcaacttgaaaaagtggcaccgagtcggtgctgggaccatcagcgggccggtgagtatctggctgcactgagg

SEQ ID NO: 17766 - DNA, 141 bp, synthetic construct
  source 1..141: mol_type = other DNA
cttctgggaccatcagcgggccggttttagtactctggaaacagaatctactaaaacaaggcaaaatgccgtgtttatctcgtcaacttgttggcgagacagccctcagtgcagccagatactcaccggcccgctgatggt

SEQ ID NO: 17767 - DNA, 139 bp, synthetic construct
  source 1..139: mol_type = other DNA
tctgggaccatcagcgggccggttttagtactctggaaacagaatctactaaaacaaggcaaaatgccgtgtttatctcgtcaacttgttggcgagacagccctcagtgcagccagatactcaccggcccgctgatggt

SEQ ID NO: 17768 - DNA, 138 bp, synthetic construct
  source 1..138: mol_type = other DNA
ctgggaccatcagcgggccggttttagagctagaaatagcaagttaaaataaggctagtccgttatcaacttgaaaaagtggcaccgagtcggtgccagccctcagtgcagccagatactcaccggcccgctgatggt

SEQ ID NO: 17769 - DNA, 138 bp, synthetic construct
  source 1..138: mol_type = other DNA
ggcagccctcagtgcagccagttttagagctagaaatagcaagttaaaataaggctagtccgttatcaacttgaaaaagtggcaccgagtcggtgcgggaccatcagcgggccggtgagtatctggctgcactgaggg

SEQ ID NO: 17770 - DNA, 177 bp, synthetic construct
  source 1..177: mol_type = other DNA
gcgtgggcagccctcagtgcagccgttgtagctccctttttcatttcgcgaaagcgaaatgaaaaacgttgttacaataagagatgaatttctcgcaaagctctgcctcttgaaatttcggtttcaagaggcatcggaccatcagcgggccggtgagtatctggctgcactgagggc

SEQ ID NO: 17771 - DNA, 139 bp, synthetic construct
  source 1..139: mol_type = other DNA
ttctgggaccatcagcgggccgttttagtactctggaaacagaatctactaaaacaaggcaaaatgccgtgtttatctcgtcaacttgttggcgagaagccctcagtgcagccagatactcaccggcccgctgatggtc

SEQ ID NO: 17772 - DNA, 138 bp, synthetic construct
  source 1..138: mol_type = other DNA
tctgggaccatcagcgggccgttttagagctagaaatagcaagttaaaataaggctagtccgttatcaacttgaaaaagtggcaccgagtcggtgcagccctcagtgcagccagatactcaccggcccgctgatggtc

SEQ ID NO: 17773 - DNA, 138 bp, synthetic construct
  source 1..138: mol_type = other DNA
gggcagccctcagtgcagccgttttagagctagaaatagcaagttaaaataaggctagtccgttatcaacttgaaaaagtggcaccgagtcggtgcggaccatcagcgggccggtgagtatctggctgcactgagggc

SEQ ID NO: 17774 - DNA, 138 bp, synthetic construct
  source 1..138: mol_type = other DNA
ttctgggaccatcagcgggcgttttagagctagaaatagcaagttaaaataaggctagtccgttatcaacttgaaaaagtggcaccgagtcggtgcgccctcagtgcagccagatactcaccggcccgctgatggtcc

SEQ ID NO: 17775 - DNA, 138 bp, synthetic construct
  source 1..138: mol_type = other DNA
tgggcagccctcagtgcagcgttttagagctagaaatagcaagttaaaataaggctagtccgttatcaacttgaaaaagtggcaccgagtcggtgcgaccatcagcgggccggtgagtatctggctgcactgagggct

SEQ ID NO: 17776 - DNA, 139 bp, synthetic construct
  source 1..139: mol_type = other DNA
cgtgggcagccctcagtgcaggttttagtactctggaaacagaatctactaaaacaaggcaaaatgccgtgtttatctcgtcaacttgttggcgagaaccatcagcgggccggtgagtatctggctgcactgagggctg

SEQ ID NO: 17777 - DNA, 139 bp, synthetic construct
  source 1..139: mol_type = other DNA
gcttctgggaccatcagcggggttttagtactctggaaacagaatctactaaaacaaggcaaaatgccgtgtttatctcgtcaacttgttggcgagaccctcagtgcagccagatactcaccggcccgctgatggtccc

SEQ ID NO: 17778 - DNA, 138 bp, synthetic construct
  source 1..138: mol_type = other DNA
cttctgggaccatcagcggggttttagagctagaaatagcaagttaaaataaggctagtccgttatcaacttgaaaaagtggcaccgagtcggtgcccctcagtgcagccagatactcaccggcccgctgatggtccc

SEQ ID NO: 17779 - DNA, 138 bp, synthetic construct
  source 1..138: mol_type = other DNA
gtgggcagccctcagtgcaggttttagagctagaaatagcaagttaaaataaggctagtccgttatcaacttgaaaaagtggcaccgagtcggtgcaccatcagcgggccggtgagtatctggctgcactgagggctg

SEQ ID NO: 17780 - DNA, 139 bp, synthetic construct
  source 1..139: mol_type = other DNA
ggcttctgggaccatcagcgggttttagtactctggaaacagaatctactaaaacaaggcaaaatgccgtgtttatctcgtcaacttgttggcgagacctcagtgcagccagatactcaccggcccgctgatggtccca

SEQ ID NO: 17781 - DNA, 139 bp, synthetic construct
  source 1..139: mol_type = other DNA
gcgtgggcagccctcagtgcagttttagtactctggaaacagaatctactaaaacaaggcaaaatgccgtgtttatctcgtcaacttgttggcgagaccatcagcgggccggtgagtatctggctgcactgagggctgc

SEQ ID NO: 17782 - DNA, 138 bp, synthetic construct
  source 1..138: mol_type = other DNA
gcttctgggaccatcagcgggttttagagctagaaatagcaagttaaaataaggctagtccgttatcaacttgaaaaagtggcaccgagtcggtgccctcagtgcagccagatactcaccggcccgctgatggtccca

SEQ ID NO: 17783 - DNA, 138 bp, synthetic construct
  source 1..138: mol_type = other DNA
cgtgggcagccctcagtgcagttttagagctagaaatagcaagttaaaataaggctagtccgttatcaacttgaaaaagtggcaccgagtcggtgcccatcagcgggccggtgagtatctggctgcactgagggctgc

SEQ ID NO: 17784 - DNA, 138 bp, synthetic construct
  source 1..138: mol_type = other DNA
ggcttctgggaccatcagcggttttagagctagaaatagcaagttaaaataaggctagtccgttatcaacttgaaaaagtggcaccgagtcggtgcctcagtgcagccagatactcaccggcccgctgatggtcccag

SEQ ID NO: 17785 - DNA, 138 bp, synthetic construct
  source 1..138: mol_type = other DNA
gcgtgggcagccctcagtgcgttttagagctagaaatagcaagttaaaataaggctagtccgttatcaacttgaaaaagtggcaccgagtcggtgccatcagcgggccggtgagtatctggctgcactgagggctgcc

SEQ ID NO: 17786 - DNA, 138 bp, synthetic construct
  source 1..138: mol_type = other DNA
tggcttctgggaccatcagcgttttagagctagaaatagcaagttaaaataaggctagtccgttatcaacttgaaaaagtggcaccgagtcggtgctcagtgcagccagatactcaccggcccgctgatggtcccaga

SEQ ID NO: 17787 - DNA, 138 bp, synthetic construct
  source 1..138: mol_type = other DNA
tgcgtgggcagccctcagtggttttagagctagaaatagcaagttaaaataaggctagtccgttatcaacttgaaaaagtggcaccgagtcggtgcatcagcgggccggtgagtatctggctgcactgagggctgccc

SEQ ID NO: 17788 - DNA, 212 bp, synthetic construct
  source 1..212: mol_type = other DNA
tcctggcttctgggaccatcagcgctatagttccttactgaaaggtaagttgctatagtaagggcaacagacccgaggcgttggggatcgcctagcccgtgtttacgggctctccccatattcaaaataatgacagacgagcaccttggagcatttatctccgaggtgcttcagtgcagccagatactcaccggcccgctgatggtcccaga

SEQ ID NO: 17789 - DNA, 212 bp, synthetic construct
  source 1..212: mol_type = other DNA
ctctgcgtgggcagccctcagtggctatagttccttactgaaaggtaagttgctatagtaagggcaacagacccgaggcgttggggatcgcctagcccgtgtttacgggctctccccatattcaaaataatgacagacgagcaccttggagcatttatctccgaggtgctatcagcgggccggtgagtatctggctgcactgagggctgccc

SEQ ID NO: 17790 - DNA, 187 bp, synthetic construct
  source 1..187: mol_type = other DNA
cctcctggcttctgggaccatcaggttgtagctccctttctcatttcggaaacgaaatgagaaccgttgctacaataaggccgtctgaaaagatgtgccgcaacgctctgccccttaaagcttctgctttaaggggcatcgtttacagtgcagccagatactcaccggcccgctgatggtcccagaa

SEQ ID NO: 17791 - DNA, 187 bp, synthetic construct
  source 1..187: mol_type = other DNA
tgctctgcgtgggcagccctcagtgttgtagctccctttctcatttcggaaacgaaatgagaaccgttgctacaataaggccgtctgaaaagatgtgccgcaacgctctgccccttaaagcttctgctttaaggggcatcgtttatcagcgggccggtgagtatctggctgcactgagggctgccca

SEQ ID NO: 17792 - DNA, 139 bp, synthetic construct
  source 1..139: mol_type = other DNA
cctggcttctgggaccatcaggttttagtactctggaaacagaatctactaaaacaaggcaaaatgccgtgtttatctcgtcaacttgttggcgagacagtgcagccagatactcaccggcccgctgatggtcccagaa

SEQ ID NO: 17793 - DNA, 139 bp, synthetic construct
  source 1..139: mol_type = other DNA
tctgcgtgggcagccctcagtgttttagtactctggaaacagaatctactaaaacaaggcaaaatgccgtgtttatctcgtcaacttgttggcgagatcagcgggccggtgagtatctggctgcactgagggctgccca

SEQ ID NO: 17794 - DNA, 138 bp, synthetic construct
  source 1..138: mol_type = other DNA
ctggcttctgggaccatcaggttttagagctagaaatagcaagttaaaataaggctagtccgttatcaacttgaaaaagtggcaccgagtcggtgccagtgcagccagatactcaccggcccgctgatggtcccagaa

SEQ ID NO: 17795 - DNA, 138 bp, synthetic construct
  source 1..138: mol_type = other DNA
ctgcgtgggcagccctcagtgttttagagctagaaatagcaagttaaaataaggctagtccgttatcaacttgaaaaagtggcaccgagtcggtgctcagcgggccggtgagtatctggctgcactgagggctgccca

SEQ ID NO: 17796 - DNA, 212 bp, synthetic construct
  source 1..212: mol_type = other DNA
ctcctggcttctgggaccatcaggctatagttccttactgaaaggtaagttgctatagtaagggcaacagacccgaggcgttggggatcgcctagcccgtgtttacgggctctccccatattcaaaataatgacagacgagcaccttggagcatttatctccgaggtgctcagtgcagccagatactcaccggcccgctgatggtcccagaa

SEQ ID NO: 17797 - DNA, 212 bp, synthetic construct
  source 1..212: mol_type = other DNA
gctctgcgtgggcagccctcagtgctatagttccttactgaaaggtaagttgctatagtaagggcaacagacccgaggcgttggggatcgcctagcccgtgtttacgggctctccccatattcaaaataatgacagacgagcaccttggagcatttatctccgaggtgcttcagcgggccggtgagtatctggctgcactgagggctgccca

SEQ ID NO: 17798 - DNA, 141 bp, synthetic construct
  source 1..141: mol_type = other DNA
cctcctggcttctgggaccatcagttttagtactctggaaacagaatctactaaaacaaggcaaaatgccgtgtttatctcgtcaacttgttggcgagaagtgcagccagatactcaccggcccgctgatggtcccagaag

SEQ ID NO: 17799 - DNA, 139 bp, synthetic construct
  source 1..139: mol_type = other DNA
tcctggcttctgggaccatcagttttagtactctggaaacagaatctactaaaacaaggcaaaatgccgtgtttatctcgtcaacttgttggcgagaagtgcagccagatactcaccggcccgctgatggtcccagaag

SEQ ID NO: 17800 - DNA, 139 bp, synthetic construct
  source 1..139: mol_type = other DNA
ctctgcgtgggcagccctcaggttttagtactctggaaacagaatctactaaaacaaggcaaaatgccgtgtttatctcgtcaacttgttggcgagacagcgggccggtgagtatctggctgcactgagggctgcccac

SEQ ID NO: 17801 - DNA, 138 bp, synthetic construct
  source 1..138: mol_type = other DNA
cctggcttctgggaccatcagttttagagctagaaatagcaagttaaaataaggctagtccgttatcaacttgaaaaagtggcaccgagtcggtgcagtgcagccagatactcaccggcccgctgatggtcccagaag

SEQ ID NO: 17802 - DNA, 138 bp, synthetic construct
  source 1..138: mol_type = other DNA
tctgcgtgggcagccctcaggttttagagctagaaatagcaagttaaaataaggctagtccgttatcaacttgaaaaagtggcaccgagtcggtgccagcgggccggtgagtatctggctgcactgagggctgcccac

SEQ ID NO: 17803 - DNA, 139 bp, synthetic construct
  source 1..139: mol_type = other DNA
ctcctggcttctgggaccatcgttttagtactctggaaacagaatctactaaaacaaggcaaaatgccgtgtttatctcgtcaacttgttggcgagagtgcagccagatactcaccggcccgctgatggtcccagaagc

SEQ ID NO: 17804 - DNA, 138 bp, synthetic construct
  source 1..138: mol_type = other DNA
ctctgcgtgggcagccctcagttttagagctagaaatagcaagttaaaataaggctagtccgttatcaacttgaaaaagtggcaccgagtcggtgcagcgggccggtgagtatctggctgcactgagggctgcccacg

SEQ ID NO: 17805 - DNA, 138 bp, synthetic construct
  source 1..138: mol_type = other DNA
tcctggcttctgggaccatcgttttagagctagaaatagcaagttaaaataaggctagtccgttatcaacttgaaaaagtggcaccgagtcggtgcgtgcagccagatactcaccggcccgctgatggtcccagaagc

SEQ ID NO: 17806 - DNA, 138 bp, synthetic construct
  source 1..138: mol_type = other DNA
ctcctggcttctgggaccatgttttagagctagaaatagcaagttaaaataaggctagtccgttatcaacttgaaaaagtggcaccgagtcggtgctgcagccagatactcaccggcccgctgatggtcccagaagcc

SEQ ID NO: 17807 - DNA, 138 bp, synthetic construct
  source 1..138: mol_type = other DNA
gctctgcgtgggcagccctcgttttagagctagaaatagcaagttaaaataaggctagtccgttatcaacttgaaaaagtggcaccgagtcggtgcgcgggccggtgagtatctggctgcactgagggctgcccacgc

SEQ ID NO: 17808 - DNA, 212 bp, synthetic construct
  source 1..212: mol_type = other DNA
gatgctctgcgtgggcagccctcgctatagttccttactgaaaggtaagttgctatagtaagggcaacagacccgaggcgttggggatcgcctagcccgtgtttacgggctctccccatattcaaaataatgacagacgagcaccttggagcatttatctccgaggtgctgcgggccggtgagtatctggctgcactgagggctgcccacgc

SEQ ID NO: 17809 - DNA, 139 bp, synthetic construct
  source 1..139: mol_type = other DNA
acctcctggcttctgggaccagttttagtactctggaaacagaatctactaaaacaaggcaaaatgccgtgtttatctcgtcaacttgttggcgagagcagccagatactcaccggcccgctgatggtcccagaagcca

SEQ ID NO: 17810 - DNA, 138 bp, synthetic construct
  source 1..138: mol_type = other DNA
tgctctgcgtgggcagccctgttttagagctagaaatagcaagttaaaataaggctagtccgttatcaacttgaaaaagtggcaccgagtcggtgccgggccggtgagtatctggctgcactgagggctgcccacgca

SEQ ID NO: 17811 - DNA, 138 bp, synthetic construct
  source 1..138: mol_type = other DNA
cctcctggcttctgggaccagttttagagctagaaatagcaagttaaaataaggctagtccgttatcaacttgaaaaagtggcaccgagtcggtgcgcagccagatactcaccggcccgctgatggtcccagaagcca

SEQ ID NO: 17812 - DNA, 212 bp, synthetic construct
  source 1..212: mol_type = other DNA
ggacctcctggcttctgggaccagctatagttccttactgaaaggtaagttgctatagtaagggcaacagacccgaggcgttggggatcgcctagcccgtgtttacgggctctccccatattcaaaataatgacagacgagcaccttggagcatttatctccgaggtgctgcagccagatactcaccggcccgctgatggtcccagaagcca

SEQ ID NO: 17813 - DNA, 139 bp, synthetic construct
  source 1..139: mol_type = other DNA
gacctcctggcttctgggaccgttttagtactctggaaacagaatctactaaaacaaggcaaaatgccgtgtttatctcgtcaacttgttggcgagacagccagatactcaccggcccgctgatggtcccagaagccag

SEQ ID NO: 17814 - DNA, 139 bp, synthetic construct
  source 1..139: mol_type = other DNA
gatgctctgcgtgggcagcccgttttagtactctggaaacagaatctactaaaacaaggcaaaatgccgtgtttatctcgtcaacttgttggcgagagggccggtgagtatctggctgcactgagggctgcccacgcag

SEQ ID NO: 17815 - DNA, 138 bp, synthetic construct
  source 1..138: mol_type = other DNA
acctcctggcttctgggaccgttttagagctagaaatagcaagttaaaataaggctagtccgttatcaacttgaaaaagtggcaccgagtcggtgccagccagatactcaccggcccgctgatggtcccagaagccag

SEQ ID NO: 17816 - DNA, 138 bp, synthetic construct
  source 1..138: mol_type = other DNA
atgctctgcgtgggcagcccgttttagagctagaaatagcaagttaaaataaggctagtccgttatcaacttgaaaaagtggcaccgagtcggtgcgggccggtgagtatctggctgcactgagggctgcccacgcag

SEQ ID NO: 17817 - DNA, 139 bp, synthetic construct
  source 1..139: mol_type = other DNA
ggatgctctgcgtgggcagccgttttagtactctggaaacagaatctactaaaacaaggcaaaatgccgtgtttatctcgtcaacttgttggcgagaggccggtgagtatctggctgcactgagggctgcccacgcaga

SEQ ID NO: 17818 - DNA, 138 bp, synthetic construct
  source 1..138: mol_type = other DNA
gacctcctggcttctgggacgttttagagctagaaatagcaagttaaaataaggctagtccgttatcaacttgaaaaagtggcaccgagtcggtgcagccagatactcaccggcccgctgatggtcccagaagccagg

SEQ ID NO: 17819 - DNA, 138 bp, synthetic construct
  source 1..138: mol_type = other DNA
gatgctctgcgtgggcagccgttttagagctagaaatagcaagttaaaataaggctagtccgttatcaacttgaaaaagtggcaccgagtcggtgcggccggtgagtatctggctgcactgagggctgcccacgcaga

SEQ ID NO: 17820 - DNA, 138 bp, synthetic construct
  source 1..138: mol_type = other DNA
ggacctcctggcttctgggagttttagagctagaaatagcaagttaaaataaggctagtccgttatcaacttgaaaaagtggcaccgagtcggtgcgccagatactcaccggcccgctgatggtcccagaagccagga

SEQ ID NO: 17821 - DNA, 138 bp, synthetic construct
  source 1..138: mol_type = other DNA
ggatgctctgcgtgggcagcgttttagagctagaaatagcaagttaaaataaggctagtccgttatcaacttgaaaaagtggcaccgagtcggtgcgccggtgagtatctggctgcactgagggctgcccacgcagag

SEQ ID NO: 17822 - DNA, 212 bp, synthetic construct
  source 1..212: mol_type = other DNA
gggggacctcctggcttctgggagctatagttccttactgaaaggtaagttgctatagtaagggcaacagacccgaggcgttggggatcgcctagcccgtgtttacgggctctccccatattcaaaataatgacagacgagcaccttggagcatttatctccgaggtgctgccagatactcaccggcccgctgatggtcccagaagccagga

SEQ ID NO: 17823 - DNA, 138 bp, synthetic construct
  source 1..138: mol_type = other DNA
gggacctcctggcttctggggttttagagctagaaatagcaagttaaaataaggctagtccgttatcaacttgaaaaagtggcaccgagtcggtgcccagatactcaccggcccgctgatggtcccagaagccaggag

SEQ ID NO: 17824 - DNA, 138 bp, synthetic construct
  source 1..138: mol_type = other DNA
gggatgctctgcgtgggcaggttttagagctagaaatagcaagttaaaataaggctagtccgttatcaacttgaaaaagtggcaccgagtcggtgcccggtgagtatctggctgcactgagggctgcccacgcagagc

SEQ ID NO: 17825 - DNA, 212 bp, synthetic construct
  source 1..212: mol_type = other DNA
gcagggatgctctgcgtgggcaggctatagttccttactgaaaggtaagttgctatagtaagggcaacagacccgaggcgttggggatcgcctagcccgtgtttacgggctctccccatattcaaaataatgacagacgagcaccttggagcatttatctccgaggtgctccggtgagtatctggctgcactgagggctgcccacgcagagc

SEQ ID NO: 17826 - DNA, 138 bp, synthetic construct
  source 1..138: mol_type = other DNA
ggggacctcctggcttctgggttttagagctagaaatagcaagttaaaataaggctagtccgttatcaacttgaaaaagtggcaccgagtcggtgccagatactcaccggcccgctgatggtcccagaagccaggagg

SEQ ID NO: 17827 - DNA, 138 bp, synthetic construct
  source 1..138: mol_type = other DNA
agggatgctctgcgtgggcagttttagagctagaaatagcaagttaaaataaggctagtccgttatcaacttgaaaaagtggcaccgagtcggtgccggtgagtatctggctgcactgagggctgcccacgcagagca

SEQ ID NO: 17828 - DNA, 139 bp, synthetic construct
  source 1..139: mol_type = other DNA
gggggacctcctggcttctggttttagagctagaaatagcaagttaaaataaggctagtccgttatcaacttgaaaaagtggcaccgagtcggtgccagatactcaccggcccgctgatggtcccagaagccaggaggt

SEQ ID NO: 17829 - DNA, 139 bp, synthetic construct
  source 1..139: mol_type = other DNA
cagggatgctctgcgtgggcgttttagagctagaaatagcaagttaaaataaggctagtccgttatcaacttgaaaaagtggcaccgagtcggtgccggtgagtatctggctgcactgagggctgcccacgcagagcat

SEQ ID NO: 17830 - DNA, 213 bp, synthetic construct
  source 1..213: mol_type = other DNA
gccgggggacctcctggcttctggctatagttccttactgaaaggtaagttgctatagtaagggcaacagacccgaggcgttggggatcgcctagcccgtgtttacgggctctccccatattcaaaataatgacagacgagcaccttggagcatttatctccgaggtgctcagatactcaccggcccgctgatggtcccagaagccaggaggt

SEQ ID NO: 17831 - DNA, 213 bp, synthetic construct
  source 1..213: mol_type = other DNA
gagcagggatgctctgcgtgggcgctatagttccttactgaaaggtaagttgctatagtaagggcaacagacccgaggcgttggggatcgcctagcccgtgtttacgggctctccccatattcaaaataatgacagacgagcaccttggagcatttatctccgaggtgctcggtgagtatctggctgcactgagggctgcccacgcagagcat

SEQ ID NO: 17832 - DNA, 189 bp, synthetic construct
  source 1..189: mol_type = other DNA
cggccgggggacctcctggcttctgttgtagctccctttctcatttcggaaacgaaatgagaaccgttgctacaataaggccgtctgaaaagatgtgccgcaacgctctgccccttaaagcttctgctttaaggggcatcgtttacagatactcaccggcccgctgatggtcccagaagccaggaggtc

SEQ ID NO: 17833 - DNA, 189 bp, synthetic construct
  source 1..189: mol_type = other DNA
gggagcagggatgctctgcgtggggttgtagctccctttctcatttcggaaacgaaatgagaaccgttgctacaataaggccgtctgaaaagatgtgccgcaacgctctgccccttaaagcttctgctttaaggggcatcgtttacggtgagtatctggctgcactgagggctgcccacgcagagcatc

SEQ ID NO: 17834 - DNA, 140 bp, synthetic construct
  source 1..140: mol_type = other DNA
cgggggacctcctggcttctgttttagagctagaaatagcaagttaaaataaggctagtccgttatcaacttgaaaaagtggcaccgagtcggtgccagatactcaccggcccgctgatggtcccagaagccaggaggtc

SEQ ID NO: 17835 - DNA, 140 bp, synthetic construct
  source 1..140: mol_type = other DNA
gcagggatgctctgcgtggggttttagagctagaaatagcaagttaaaataaggctagtccgttatcaacttgaaaaagtggcaccgagtcggtgccggtgagtatctggctgcactgagggctgcccacgcagagcatc

SEQ ID NO: 17836 - DNA, 214 bp, synthetic construct
  source 1..214: mol_type = other DNA
ggccgggggacctcctggcttctgctatagttccttactgaaaggtaagttgctatagtaagggcaacagacccgaggcgttggggatcgcctagcccgtgtttacgggctctccccatattcaaaataatgacagacgagcaccttggagcatttatctccgaggtgctcagatactcaccggcccgctgatggtcccagaagccaggaggtc

SEQ ID NO: 17837 - DNA, 214 bp, synthetic construct
  source 1..214: mol_type = other DNA
ggagcagggatgctctgcgtggggctatagttccttactgaaaggtaagttgctatagtaagggcaacagacccgaggcgttggggatcgcctagcccgtgtttacgggctctccccatattcaaaataatgacagacgagcaccttggagcatttatctccgaggtgctcggtgagtatctggctgcactgagggctgcccacgcagagcatc

SEQ ID NO: 17838 - DNA, 190 bp, synthetic construct
  source 1..190: mol_type = other DNA
ggggagcagggatgctctgcgtgggttgtagctccctttctcatttcggaaacgaaatgagaaccgttgctacaataaggccgtctgaaaagatgtgccgcaacgctctgccccttaaagcttctgctttaaggggcatcgtttacggtgagtatctggctgcactgagggctgcccacgcagagcatcc

SEQ ID NO: 17839 - DNA, 144 bp, synthetic construct
  source 1..144: mol_type = other DNA
cggccgggggacctcctggcttcgttttagtactctggaaacagaatctactaaaacaaggcaaaatgccgtgtttatctcgtcaacttgttggcgagacagatactcaccggcccgctgatggtcccagaagccaggaggtcc

SEQ ID NO: 17840 - DNA, 142 bp, synthetic construct
  source 1..142: mol_type = other DNA
gccgggggacctcctggcttcgttttagtactctggaaacagaatctactaaaacaaggcaaaatgccgtgtttatctcgtcaacttgttggcgagacagatactcaccggcccgctgatggtcccagaagccaggaggtcc

SEQ ID NO: 17841 - DNA, 142 bp, synthetic construct
  source 1..142: mol_type = other DNA
gagcagggatgctctgcgtgggttttagtactctggaaacagaatctactaaaacaaggcaaaatgccgtgtttatctcgtcaacttgttggcgagacggtgagtatctggctgcactgagggctgcccacgcagagcatcc

SEQ ID NO: 17842 - DNA, 141 bp, synthetic construct
  source 1..141: mol_type = other DNA
ccgggggacctcctggcttcgttttagagctagaaatagcaagttaaaataaggctagtccgttatcaacttgaaaaagtggcaccgagtcggtgccagatactcaccggcccgctgatggtcccagaagccaggaggtcc

SEQ ID NO: 17843 - DNA, 141 bp, synthetic construct
  source 1..141: mol_type = other DNA
agcagggatgctctgcgtgggttttagagctagaaatagcaagttaaaataaggctagtccgttatcaacttgaaaaagtggcaccgagtcggtgccggtgagtatctggctgcactgagggctgcccacgcagagcatcc

SEQ ID NO: 17844 - DNA, 215 bp, synthetic construct
  source 1..215: mol_type = other DNA
gggagcagggatgctctgcgtgggctatagttccttactgaaaggtaagttgctatagtaagggcaacagacccgaggcgttggggatcgcctagcccgtgtttacgggctctccccatattcaaaataatgacagacgagcaccttggagcatttatctccgaggtgctcggtgagtatctggctgcactgagggctgcccacgcagagcatcc

SEQ ID NO: 17845 - DNA, 145 bp, synthetic construct
  source 1..145: mol_type = other DNA
gcggccgggggacctcctggcttgttttagtactctggaaacagaatctactaaaacaaggcaaaatgccgtgtttatctcgtcaacttgttggcgagacagatactcaccggcccgctgatggtcccagaagccaggaggtccc

SEQ ID NO: 17846 - DNA, 143 bp, synthetic construct
  source 1..143: mol_type = other DNA
ggccgggggacctcctggcttgttttagtactctggaaacagaatctactaaaacaaggcaaaatgccgtgtttatctcgtcaacttgttggcgagacagatactcaccggcccgctgatggtcccagaagccaggaggtccc

SEQ ID NO: 17847 - DNA, 143 bp, synthetic construct
  source 1..143: mol_type = other DNA
ggagcagggatgctctgcgtggttttagtactctggaaacagaatctactaaaacaaggcaaaatgccgtgtttatctcgtcaacttgttggcgagacggtgagtatctggctgcactgagggctgcccacgcagagcatccc

SEQ ID NO: 17848 - DNA, 142 bp, synthetic construct
  source 1..142: mol_type = other DNA
gccgggggacctcctggcttgttttagagctagaaatagcaagttaaaataaggctagtccgttatcaacttgaaaaagtggcaccgagtcggtgccagatactcaccggcccgctgatggtcccagaagccaggaggtccc

SEQ ID NO: 17849 - DNA, 142 bp, synthetic construct
  source 1..142: mol_type = other DNA
gagcagggatgctctgcgtggttttagagctagaaatagcaagttaaaataaggctagtccgttatcaacttgaaaaagtggcaccgagtcggtgccggtgagtatctggctgcactgagggctgcccacgcagagcatccc

SEQ ID NO: 17850 - DNA, 144 bp, synthetic construct
  source 1..144: mol_type = other DNA
cggccgggggacctcctggctgttttagtactctggaaacagaatctactaaaacaaggcaaaatgccgtgtttatctcgtcaacttgttggcgagacagatactcaccggcccgctgatggtcccagaagccaggaggtcccc

SEQ ID NO: 17851 - DNA, 143 bp, synthetic construct
  source 1..143: mol_type = other DNA
ggagcagggatgctctgcgtgttttagagctagaaatagcaagttaaaataaggctagtccgttatcaacttgaaaaagtggcaccgagtcggtgccggtgagtatctggctgcactgagggctgcccacgcagagcatccct

SEQ ID NO: 17852 - DNA, 143 bp, synthetic construct
  source 1..143: mol_type = other DNA
ggccgggggacctcctggctgttttagagctagaaatagcaagttaaaataaggctagtccgttatcaacttgaaaaagtggcaccgagtcggtgccagatactcaccggcccgctgatggtcccagaagccaggaggtcccc

SEQ ID NO: 17853 - DNA, 145 bp, synthetic construct
  source 1..145: mol_type = other DNA
ggggagcagggatgctctgcggttttagtactctggaaacagaatctactaaaacaaggcaaaatgccgtgtttatctcgtcaacttgttggcgagacggtgagtatctggctgcactgagggctgcccacgcagagcatccctg

SEQ ID NO: 17854 - DNA, 144 bp, synthetic construct
  source 1..144: mol_type = other DNA
gggagcagggatgctctgcggttttagagctagaaatagcaagttaaaataaggctagtccgttatcaacttgaaaaagtggcaccgagtcggtgccggtgagtatctggctgcactgagggctgcccacgcagagcatccctg

SEQ ID NO: 17855 - DNA, 144 bp, synthetic construct
  source 1..144: mol_type = other DNA
cggccgggggacctcctggcgttttagagctagaaatagcaagttaaaataaggctagtccgttatcaacttgaaaaagtggcaccgagtcggtgccagatactcaccggcccgctgatggtcccagaagccaggaggtccccc

SEQ ID NO: 17856 - DNA, 218 bp, synthetic construct
  source 1..218: mol_type = other DNA
gtggggagcagggatgctctgcggctatagttccttactgaaaggtaagttgctatagtaagggcaacagacccgaggcgttggggatcgcctagcccgtgtttacgggctctccccatattcaaaataatgacagacgagcaccttggagcatttatctccgaggtgctcggtgagtatctggctgcactgagggctgcccacgcagagcatccctg

SEQ ID NO: 17857 - DNA, 148 bp, synthetic construct
  source 1..148: mol_type = other DNA
tgtggggagcagggatgctctgcgttttagtactctggaaacagaatctactaaaacaaggcaaaatgccgtgtttatctcgtcaacttgttggcgagacggtgagtatctggctgcactgagggctgcccacgcagagcatccctgc

SEQ ID NO: 17858 - DNA, 146 bp, synthetic construct
  source 1..146: mol_type = other DNA
tggggagcagggatgctctgcgttttagtactctggaaacagaatctactaaaacaaggcaaaatgccgtgtttatctcgtcaacttgttggcgagacggtgagtatctggctgcactgagggctgcccacgcagagcatccctgc

SEQ ID NO: 17859 - DNA, 145 bp, synthetic construct
  source 1..145: mol_type = other DNA
ggggagcagggatgctctgcgttttagagctagaaatagcaagttaaaataaggctagtccgttatcaacttgaaaaagtggcaccgagtcggtgccggtgagtatctggctgcactgagggctgcccacgcagagcatccctgc

SEQ ID NO: 17860 - DNA, 145 bp, synthetic construct
  source 1..145: mol_type = other DNA
gcggccgggggacctcctgggttttagagctagaaatagcaagttaaaataaggctagtccgttatcaacttgaaaaagtggcaccgagtcggtgccagatactcaccggcccgctgatggtcccagaagccaggaggtcccccg

SEQ ID NO: 17861 - DNA, 97 bp, synthetic construct
  source 1..97: mol_type = other DNA
ttgcctgcagtacatgtactggttttagtactctggaaacagaatctactaaaacaaggcaaaatgccgtgtttatctcgtcaacttgttggcgaga

SEQ ID NO: 17862 - DNA, 96 bp, synthetic construct
  source 1..96: mol_type = other DNA
ttgcctgcagtacatgtactgttttagagctagaaatagcaagttaaaataaggctagtccgttatcaacttgaaaaagtggcaccgagtcggtgc

SEQ ID NO: 17863 - DNA, 96 bp, synthetic construct
  source 1..96: mol_type = other DNA
gtgagatacacccacctcgggttttagagctagaaatagcaagttaaaataaggctagtccgttatcaacttgaaaaagtggcaccgagtcggtgc

SEQ ID NO: 17864 - DNA, 96 bp, synthetic construct
  source 1..96: mol_type = other DNA
tgcctgcagtacatgtactggttttagagctagaaatagcaagttaaaataaggctagtccgttatcaacttgaaaaagtggcaccgagtcggtgc

SEQ ID NO: 17865 - DNA, 96 bp, synthetic construct
  source 1..96: mol_type = other DNA
tgagatacacccacctcggggttttagagctagaaatagcaagttaaaataaggctagtccgttatcaacttgaaaaagtggcaccgagtcggtgc

SEQ ID NO: 17866 - DNA, 96 bp, synthetic construct
  source 1..96: mol_type = other DNA
gcctgcagtacatgtactgggttttagagctagaaatagcaagttaaaataaggctagtccgttatcaacttgaaaaagtggcaccgagtcggtgc

SEQ ID NO: 17867 - DNA, 170 bp, synthetic construct
  source 1..170: mol_type = other DNA
tgcctgcagtacatgtactggacgctatagttccttactgaaaggtaagttgctatagtaagggcaacagacccgaggcgttggggatcgcctagcccgtgtttacgggctctccccatattcaaaataatgacagacgagcaccttggagcatttatctccgaggtgct

SEQ ID NO: 17868 - DNA, 145 bp, synthetic construct
  source 1..145: mol_type = other DNA
actggacgatgctgcagcagctcagttgtagctccctttctcatttcggaaacgaaatgagaaccgttgctacaataaggccgtctgaaaagatgtgccgcaacgctctgccccttaaagcttctgctttaaggggcatcgttta

SEQ ID NO: 17869 - DNA, 96 bp, synthetic construct
  source 1..96: mol_type = other DNA
gagatacacccacctcgggcgttttagagctagaaatagcaagttaaaataaggctagtccgttatcaacttgaaaaagtggcaccgagtcggtgc

SEQ ID NO: 17870 - DNA, 96 bp, synthetic construct
  source 1..96: mol_type = other DNA
cctgcagtacatgtactggagttttagagctagaaatagcaagttaaaataaggctagtccgttatcaacttgaaaaagtggcaccgagtcggtgc

SEQ ID NO: 17871 - DNA, 170 bp, synthetic construct
  source 1..170: mol_type = other DNA
gagatacacccacctcgggcctggctatagttccttactgaaaggtaagttgctatagtaagggcaacagacccgaggcgttggggatcgcctagcccgtgtttacgggctctccccatattcaaaataatgacagacgagcaccttggagcatttatctccgaggtgct

SEQ ID NO: 17872 - DNA, 96 bp, synthetic construct
  source 1..96: mol_type = other DNA
agatacacccacctcgggccgttttagagctagaaatagcaagttaaaataaggctagtccgttatcaacttgaaaaagtggcaccgagtcggtgc

SEQ ID NO: 17873 - DNA, 96 bp, synthetic construct
  source 1..96: mol_type = other DNA
ctgcagtacatgtactggacgttttagagctagaaatagcaagttaaaataaggctagtccgttatcaacttgaaaaagtggcaccgagtcggtgc

SEQ ID NO: 17874 - DNA, 96 bp, synthetic construct
  source 1..96: mol_type = other DNA
gatacacccacctcgggcctgttttagagctagaaatagcaagttaaaataaggctagtccgttatcaacttgaaaaagtggcaccgagtcggtgc

SEQ ID NO: 17875 - DNA, 96 bp, synthetic construct
  source 1..96: mol_type = other DNA
tgcagtacatgtactggacggttttagagctagaaatagcaagttaaaataaggctagtccgttatcaacttgaaaaagtggcaccgagtcggtgc

SEQ ID NO: 17876 - DNA, 96 bp, synthetic construct
  source 1..96: mol_type = other DNA
atacacccacctcgggcctggttttagagctagaaatagcaagttaaaataaggctagtccgttatcaacttgaaaaagtggcaccgagtcggtgc

SEQ ID NO: 17877 - DNA, 96 bp, synthetic construct
  source 1..96: mol_type = other DNA
gcagtacatgtactggacgagttttagagctagaaatagcaagttaaaataaggctagtccgttatcaacttgaaaaagtggcaccgagtcggtgc

SEQ ID NO: 17878 - DNA, 99 bp, synthetic construct
  source 1..99: mol_type = other DNA
tgtgagatacacccacctcgggcgttttagtactctggaaacagaatctactaaaacaaggcaaaatgccgtgtttatctcgtcaacttgttggcgaga

SEQ ID NO: 17879 - DNA, 97 bp, synthetic construct
  source 1..97: mol_type = other DNA
gagatacacccacctcgggccgttttagtactctggaaacagaatctactaaaacaaggcaaaatgccgtgtttatctcgtcaacttgttggcgaga

SEQ ID NO: 17880 - DNA, 96 bp, synthetic construct
  source 1..96: mol_type = other DNA
tacacccacctcgggcctgagttttagagctagaaatagcaagttaaaataaggctagtccgttatcaacttgaaaaagtggcaccgagtcggtgc

SEQ ID NO: 17881 - DNA, 96 bp, synthetic construct
  source 1..96: mol_type = other DNA
cagtacatgtactggacgatgttttagagctagaaatagcaagttaaaataaggctagtccgttatcaacttgaaaaagtggcaccgagtcggtgc

SEQ ID NO: 17882 - DNA, 135 bp, synthetic construct
  source 1..135: mol_type = other DNA
ctgccgctgctcattccacctcgcgttgtagctccctttttcatttcgcgaaagcgaaatgaaaaacgttgttacaataagagatgaatttctcgcaaagctctgcctcttgaaatttcggtttcaagaggcatc

SEQ ID NO: 17883 - DNA, 96 bp, synthetic construct
  source 1..96: mol_type = other DNA
gtacatgtactggacgatgcgttttagagctagaaatagcaagttaaaataaggctagtccgttatcaacttgaaaaagtggcaccgagtcggtgc

SEQ ID NO: 17884 - DNA, 96 bp, synthetic construct
  source 1..96: mol_type = other DNA
acacccacctcgggcctgaagttttagagctagaaatagcaagttaaaataaggctagtccgttatcaacttgaaaaagtggcaccgagtcggtgc

SEQ ID NO: 17885 - DNA, 96 bp, synthetic construct
  source 1..96: mol_type = other DNA
agtacatgtactggacgatggttttagagctagaaatagcaagttaaaataaggctagtccgttatcaacttgaaaaagtggcaccgagtcggtgc

SEQ ID NO: 17886 - DNA, 96 bp, synthetic construct
  source 1..96: mol_type = other DNA
gggcctgaaatctcttctcggttttagagctagaaatagcaagttaaaataaggctagtccgttatcaacttgaaaaagtggcaccgagtcggtgc

SEQ ID NO: 17887 - DNA, 96 bp, synthetic construct
  source 1..96: mol_type = other DNA
cacccacctcgggcctgaaagttttagagctagaaatagcaagttaaaataaggctagtccgttatcaacttgaaaaagtggcaccgagtcggtgc

SEQ ID NO: 17888 - DNA, 97 bp, synthetic construct
  source 1..97: mol_type = other DNA
agtacatgtactggacgatgcgttttagtactctggaaacagaatctactaaaacaaggcaaaatgccgtgtttatctcgtcaacttgttggcgaga

SEQ ID NO: 17889 - DNA, 97 bp, synthetic construct
  source 1..97: mol_type = other DNA
tcgggcctgaaatctcttctcgttttagtactctggaaacagaatctactaaaacaaggcaaaatgccgtgtttatctcgtcaacttgttggcgaga

SEQ ID NO: 17890 - DNA, 97 bp, synthetic construct
  source 1..97: mol_type = other DNA
ctcgggcctgaaatctcttctgttttagtactctggaaacagaatctactaaaacaaggcaaaatgccgtgtttatctcgtcaacttgttggcgaga

SEQ ID NO: 17891 - DNA, 97 bp, synthetic construct
  source 1..97: mol_type = other DNA
gtacatgtactggacgatgctgttttagtactctggaaacagaatctactaaaacaaggcaaaatgccgtgtttatctcgtcaacttgttggcgaga

SEQ ID NO: 17892 - DNA, 96 bp, synthetic construct
  source 1..96: mol_type = other DNA
ctcgggcctgaaatctcttcgttttagagctagaaatagcaagttaaaataaggctagtccgttatcaacttgaaaaagtggcaccgagtcggtgc

SEQ ID NO: 17893 - DNA, 96 bp, synthetic construct
  source 1..96: mol_type = other DNA
acccacctcgggcctgaaatgttttagagctagaaatagcaagttaaaataaggctagtccgttatcaacttgaaaaagtggcaccgagtcggtgc

SEQ ID NO: 17894 - DNA, 96 bp, synthetic construct
  source 1..96: mol_type = other DNA
tacatgtactggacgatgctgttttagagctagaaatagcaagttaaaataaggctagtccgttatcaacttgaaaaagtggcaccgagtcggtgc

SEQ ID NO: 17895 - DNA, 97 bp, synthetic construct
  source 1..97: mol_type = other DNA
acctcgggcctgaaatctcttgttttagtactctggaaacagaatctactaaaacaaggcaaaatgccgtgtttatctcgtcaacttgttggcgaga

SEQ ID NO: 17896 - DNA, 97 bp, synthetic construct
  source 1..97: mol_type = other DNA
acatgtactggacgatgctgcgttttagtactctggaaacagaatctactaaaacaaggcaaaatgccgtgtttatctcgtcaacttgttggcgaga

SEQ ID NO: 17897 - DNA, 96 bp, synthetic construct
  source 1..96: mol_type = other DNA
cccacctcgggcctgaaatcgttttagagctagaaatagcaagttaaaataaggctagtccgttatcaacttgaaaaagtggcaccgagtcggtgc

SEQ ID NO: 17898 - DNA, 96 bp, synthetic construct
  source 1..96: mol_type = other DNA
acatgtactggacgatgctggttttagagctagaaatagcaagttaaaataaggctagtccgttatcaacttgaaaaagtggcaccgagtcggtgc

SEQ ID NO: 17899 - DNA, 96 bp, synthetic construct
  source 1..96: mol_type = other DNA
tcgggcctgaaatctcttctgttttagagctagaaatagcaagttaaaataaggctagtccgttatcaacttgaaaaagtggcaccgagtcggtgc

SEQ ID NO: 17900 - DNA, 96 bp, synthetic construct
  source 1..96: mol_type = other DNA
catgtactggacgatgctgcgttttagagctagaaatagcaagttaaaataaggctagtccgttatcaacttgaaaaagtggcaccgagtcggtgc

SEQ ID NO: 17901 - DNA, 96 bp, synthetic construct
  source 1..96: mol_type = other DNA
ccacctcgggcctgaaatctgttttagagctagaaatagcaagttaaaataaggctagtccgttatcaacttgaaaaagtggcaccgagtcggtgc

SEQ ID NO: 17902 - DNA, 96 bp, synthetic construct
  source 1..96: mol_type = other DNA
tgtactggacgatgctgcaggttttagagctagaaatagcaagttaaaataaggctagtccgttatcaacttgaaaaagtggcaccgagtcggtgc

SEQ ID NO: 17903 - DNA, 96 bp, synthetic construct
  source 1..96: mol_type = other DNA
cacctcgggcctgaaatctcgttttagagctagaaatagcaagttaaaataaggctagtccgttatcaacttgaaaaagtggcaccgagtcggtgc

SEQ ID NO: 17904 - DNA, 96 bp, synthetic construct
  source 1..96: mol_type = other DNA
atgtactggacgatgctgcagttttagagctagaaatagcaagttaaaataaggctagtccgttatcaacttgaaaaagtggcaccgagtcggtgc

SEQ ID NO: 17905 - DNA, 170 bp, synthetic construct
  source 1..170: mol_type = other DNA
acccacctcgggcctgaaatctcgctatagttccttactgaaaggtaagttgctatagtaagggcaacagacccgaggcgttggggatcgcctagcccgtgtttacgggctctccccatattcaaaataatgacagacgagcaccttggagcatttatctccgaggtgct

SEQ ID NO: 17906 - DNA, 170 bp, synthetic construct
  source 1..170: mol_type = other DNA
tacatgtactggacgatgctgcagctatagttccttactgaaaggtaagttgctatagtaagggcaacagacccgaggcgttggggatcgcctagcccgtgtttacgggctctccccatattcaaaataatgacagacgagcaccttggagcatttatctccgaggtgct

SEQ ID NO: 17907 - DNA, 145 bp, synthetic construct
  source 1..145: mol_type = other DNA
aaatctcttctcgaggctgagctggttgtagctccctttctcatttcggaaacgaaatgagaaccgttgctacaataaggccgtctgaaaagatgtgccgcaacgctctgccccttaaagcttctgctttaaggggcatcgttta

SEQ ID NO: 17908 - DNA, 97 bp, synthetic construct
  source 1..97: mol_type = other DNA
catgtactggacgatgctgcagttttagtactctggaaacagaatctactaaaacaaggcaaaatgccgtgtttatctcgtcaacttgttggcgaga

SEQ ID NO: 17909 - DNA, 96 bp, synthetic construct
  source 1..96: mol_type = other DNA
acctcgggcctgaaatctctgttttagagctagaaatagcaagttaaaataaggctagtccgttatcaacttgaaaaagtggcaccgagtcggtgc

SEQ ID NO: 17910 - DNA, 99 bp, synthetic construct
  source 1..99: mol_type = other DNA
cacctcgggcctgaaatctcttcgttttagtactctggaaacagaatctactaaaacaaggcaaaatgccgtgtttatctcgtcaacttgttggcgaga

SEQ ID NO: 17911 - DNA, 96 bp, synthetic construct
  source 1..96: mol_type = other DNA
gtactggacgatgctgcagcgttttagagctagaaatagcaagttaaaataaggctagtccgttatcaacttgaaaaagtggcaccgagtcggtgc

SEQ ID NO: 17912 - DNA, 96 bp, synthetic construct
  source 1..96: mol_type = other DNA
cctcgggcctgaaatctcttgttttagagctagaaatagcaagttaaaataaggctagtccgttatcaacttgaaaaagtggcaccgagtcggtgc

SEQ ID NO: 17913 - DNA, 97 bp, synthetic construct
  source 1..97: mol_type = other DNA
cctcgggcctgaaatctcttcgttttagtactctggaaacagaatctactaaaacaaggcaaaatgccgtgtttatctcgtcaacttgttggcgaga

SEQ ID NO: 17914 - DNA, 96 bp, synthetic construct
  source 1..96: mol_type = other DNA
tactggacgatgctgcagcagttttagagctagaaatagcaagttaaaataaggctagtccgttatcaacttgaaaaagtggcaccgagtcggtgc

SEQ ID NO: 17915 - DNA, 96 bp, synthetic construct
  source 1..96: mol_type = other DNA
cgggcctgaaatctcttctcgttttagagctagaaatagcaagttaaaataaggctagtccgttatcaacttgaaaaagtggcaccgagtcggtgc

SEQ ID NO: 17916 - DNA, 96 bp, synthetic construct
  source 1..96: mol_type = other DNA
actggacgatgctgcagcaggttttagagctagaaatagcaagttaaaataaggctagtccgttatcaacttgaaaaagtggcaccgagtcggtgc

SEQ ID NO: 17917 - DNA, 170 bp, synthetic construct
  source 1..170: mol_type = other DNA
tgtactggacgatgctgcagcaggctatagttccttactgaaaggtaagttgctatagtaagggcaacagacccgaggcgttggggatcgcctagcccgtgtttacgggctctccccatattcaaaataatgacagacgagcaccttggagcatttatctccgaggtgct

SEQ ID NO: 17918 - DNA, 96 bp, synthetic construct
  source 1..96: mol_type = other DNA
ctggacgatgctgcagcagcgttttagagctagaaatagcaagttaaaataaggctagtccgttatcaacttgaaaaagtggcaccgagtcggtgc

SEQ ID NO: 17919 - DNA, 170 bp, synthetic construct
  source 1..170: mol_type = other DNA
cctcgggcctgaaatctcttctcgctatagttccttactgaaaggtaagttgctatagtaagggcaacagacccgaggcgttggggatcgcctagcccgtgtttacgggctctccccatattcaaaataatgacagacgagcaccttggagcatttatctccgaggtgct

SEQ ID NO: 17920 - DNA, 96 bp, synthetic construct
  source 1..96: mol_type = other DNA
tggacgatgctgcagcagctgttttagagctagaaatagcaagttaaaataaggctagtccgttatcaacttgaaaaagtggcaccgagtcggtgc

SEQ ID NO: 17921 - DNA, 96 bp, synthetic construct
  source 1..96: mol_type = other DNA
ggcctgaaatctcttctcgagttttagagctagaaatagcaagttaaaataaggctagtccgttatcaacttgaaaaagtggcaccgagtcggtgc

SEQ ID NO: 17922 - DNA, 96 bp, synthetic construct
  source 1..96: mol_type = other DNA
ggacgatgctgcagcagctcgttttagagctagaaatagcaagttaaaataaggctagtccgttatcaacttgaaaaagtggcaccgagtcggtgc

SEQ ID NO: 17923 - DNA, 96 bp, synthetic construct
  source 1..96: mol_type = other DNA
gcctgaaatctcttctcgaggttttagagctagaaatagcaagttaaaataaggctagtccgttatcaacttgaaaaagtggcaccgagtcggtgc

SEQ ID NO: 17924 - DNA, 96 bp, synthetic construct
  source 1..96: mol_type = other DNA
gacgatgctgcagcagctcagttttagagctagaaatagcaagttaaaataaggctagtccgttatcaacttgaaaaagtggcaccgagtcggtgc

SEQ ID NO: 17925 - DNA, 170 bp, synthetic construct
  source 1..170: mol_type = other DNA
ggcctgaaatctcttctcgaggcgctatagttccttactgaaaggtaagttgctatagtaagggcaacagacccgaggcgttggggatcgcctagcccgtgtttacgggctctccccatattcaaaataatgacagacgagcaccttggagcatttatctccgaggtgct

SEQ ID NO: 17926 - DNA, 96 bp, synthetic construct
  source 1..96: mol_type = other DNA
cctgaaatctcttctcgagggttttagagctagaaatagcaagttaaaataaggctagtccgttatcaacttgaaaaagtggcaccgagtcggtgc

SEQ ID NO: 17927 - DNA, 96 bp, synthetic construct
  source 1..96: mol_type = other DNA
acgatgctgcagcagctcacgttttagagctagaaatagcaagttaaaataaggctagtccgttatcaacttgaaaaagtggcaccgagtcggtgc

SEQ ID NO: 17928 - DNA, 170 bp, synthetic construct
  source 1..170: mol_type = other DNA
tggacgatgctgcagcagctcacgctatagttccttactgaaaggtaagttgctatagtaagggcaacagacccgaggcgttggggatcgcctagcccgtgtttacgggctctccccatattcaaaataatgacagacgagcaccttggagcatttatctccgaggtgct

SEQ ID NO: 17929 - DNA, 96 bp, synthetic construct
  source 1..96: mol_type = other DNA
ctgaaatctcttctcgaggcgttttagagctagaaatagcaagttaaaataaggctagtccgttatcaacttgaaaaagtggcaccgagtcggtgc

SEQ ID NO: 17930 - DNA, 96 bp, synthetic construct
  source 1..96: mol_type = other DNA
cgatgctgcagcagctcactgttttagagctagaaatagcaagttaaaataaggctagtccgttatcaacttgaaaaagtggcaccgagtcggtgc

SEQ ID NO: 17931 - DNA, 96 bp, synthetic construct
  source 1..96: mol_type = other DNA
gaaatctcttctcgaggctggttttagagctagaaatagcaagttaaaataaggctagtccgttatcaacttgaaaaagtggcaccgagtcggtgc

SEQ ID NO: 17932 - DNA, 96 bp, synthetic construct
  source 1..96: mol_type = other DNA
cagcagctcactcaccactcgttttagagctagaaatagcaagttaaaataaggctagtccgttatcaacttgaaaaagtggcaccgagtcggtgc

SEQ ID NO: 17933 - DNA, 96 bp, synthetic construct
  source 1..96: mol_type = other DNA
tgaaatctcttctcgaggctgttttagagctagaaatagcaagttaaaataaggctagtccgttatcaacttgaaaaagtggcaccgagtcggtgc

SEQ ID NO: 17934 - DNA, 96 bp, synthetic construct
  source 1..96: mol_type = other DNA
gatgctgcagcagctcactcgttttagagctagaaatagcaagttaaaataaggctagtccgttatcaacttgaaaaagtggcaccgagtcggtgc

SEQ ID NO: 17935 - DNA, 170 bp, synthetic construct
  source 1..170: mol_type = other DNA
gacgatgctgcagcagctcactcgctatagttccttactgaaaggtaagttgctatagtaagggcaacagacccgaggcgttggggatcgcctagcccgtgtttacgggctctccccatattcaaaataatgacagacgagcaccttggagcatttatctccgaggtgct

SEQ ID NO: 17936 - DNA, 96 bp, synthetic construct
  source 1..96: mol_type = other DNA
gcagcagctcactcaccactgttttagagctagaaatagcaagttaaaataaggctagtccgttatcaacttgaaaaagtggcaccgagtcggtgc

SEQ ID NO: 17937 - DNA, 96 bp, synthetic construct
  source 1..96: mol_type = other DNA
ctcttctcgaggctgagctggttttagagctagaaatagcaagttaaaataaggctagtccgttatcaacttgaaaaagtggcaccgagtcggtgc

SEQ ID NO: 17938 - DNA, 96 bp, synthetic construct
  source 1..96: mol_type = other DNA
atgctgcagcagctcactcagttttagagctagaaatagcaagttaaaataaggctagtccgttatcaacttgaaaaagtggcaccgagtcggtgc

SEQ ID NO: 17939 - DNA, 170 bp, synthetic construct
  source 1..170: mol_type = other DNA
cgatgctgcagcagctcactcacgctatagttccttactgaaaggtaagttgctatagtaagggcaacagacccgaggcgttggggatcgcctagcccgtgtttacgggctctccccatattcaaaataatgacagacgagcaccttggagcatttatctccgaggtgct

SEQ ID NO: 17940 - DNA, 99 bp, synthetic construct
  source 1..99: mol_type = other DNA
tgaaatctcttctcgaggctgaggttttagtactctggaaacagaatctactaaaacaaggcaaaatgccgtgtttatctcgtcaacttgttggcgaga

SEQ ID NO: 17941 - DNA, 97 bp, synthetic construct
  source 1..97: mol_type = other DNA
gaaatctcttctcgaggctgagttttagtactctggaaacagaatctactaaaacaaggcaaaatgccgtgtttatctcgtcaacttgttggcgaga

SEQ ID NO: 17942 - DNA, 97 bp, synthetic construct
  source 1..97: mol_type = other DNA
atctcttctcgaggctgagctgttttagtactctggaaacagaatctactaaaacaaggcaaaatgccgtgtttatctcgtcaacttgttggcgaga

SEQ ID NO: 17943 - DNA, 97 bp, synthetic construct
  source 1..97: mol_type = other DNA
aatctcttctcgaggctgagcgttttagtactctggaaacagaatctactaaaacaaggcaaaatgccgtgtttatctcgtcaacttgttggcgaga

SEQ ID NO: 17944 - DNA, 97 bp, synthetic construct
  source 1..97: mol_type = other DNA
agctcactcaccactctgtcagttttagtactctggaaacagaatctactaaaacaaggcaaaatgccgtgtttatctcgtcaacttgttggcgaga

SEQ ID NO: 17945 - DNA, 96 bp, synthetic construct
  source 1..96: mol_type = other DNA
aatctcttctcgaggctgaggttttagagctagaaatagcaagttaaaataaggctagtccgttatcaacttgaaaaagtggcaccgagtcggtgc

SEQ ID NO: 17946 - DNA, 96 bp, synthetic construct
  source 1..96: mol_type = other DNA
aaatctcttctcgaggctgagttttagagctagaaatagcaagttaaaataaggctagtccgttatcaacttgaaaaagtggcaccgagtcggtgc

SEQ ID NO: 17947 - DNA, 96 bp, synthetic construct
  source 1..96: mol_type = other DNA
tgctgcagcagctcactcacgttttagagctagaaatagcaagttaaaataaggctagtccgttatcaacttgaaaaagtggcaccgagtcggtgc

SEQ ID NO: 17948 - DNA, 97 bp, synthetic construct
  source 1..97: mol_type = other DNA
aaatctcttctcgaggctgaggttttagtactctggaaacagaatctactaaaacaaggcaaaatgccgtgtttatctcgtcaacttgttggcgaga

SEQ ID NO: 17949 - DNA, 97 bp, synthetic construct
  source 1..97: mol_type = other DNA
cagcagctcactcaccactctgttttagtactctggaaacagaatctactaaaacaaggcaaaatgccgtgtttatctcgtcaacttgttggcgaga

SEQ ID NO: 17950 - DNA, 96 bp, synthetic construct
  source 1..96: mol_type = other DNA
gctgcagcagctcactcaccgttttagagctagaaatagcaagttaaaataaggctagtccgttatcaacttgaaaaagtggcaccgagtcggtgc

SEQ ID NO: 17951 - DNA, 96 bp, synthetic construct
  source 1..96: mol_type = other DNA
ctcactcaccactctgtcaagttttagagctagaaatagcaagttaaaataaggctagtccgttatcaacttgaaaaagtggcaccgagtcggtgc

SEQ ID NO: 17952 - DNA, 96 bp, synthetic construct
  source 1..96: mol_type = other DNA
atctcttctcgaggctgagcgttttagagctagaaatagcaagttaaaataaggctagtccgttatcaacttgaaaaagtggcaccgagtcggtgc

SEQ ID NO: 17953 - DNA, 96 bp, synthetic construct
  source 1..96: mol_type = other DNA
ctgcagcagctcactcaccagttttagagctagaaatagcaagttaaaataaggctagtccgttatcaacttgaaaaagtggcaccgagtcggtgc

SEQ ID NO: 17954 - DNA, 96 bp, synthetic construct
  source 1..96: mol_type = other DNA
tctcttctcgaggctgagctgttttagagctagaaatagcaagttaaaataaggctagtccgttatcaacttgaaaaagtggcaccgagtcggtgc

SEQ ID NO: 17955 - DNA, 96 bp, synthetic construct
  source 1..96: mol_type = other DNA
tgcagcagctcactcaccacgttttagagctagaaatagcaagttaaaataaggctagtccgttatcaacttgaaaaagtggcaccgagtcggtgc

SEQ ID NO: 17956 - DNA, 170 bp, synthetic construct
  source 1..170: mol_type = other DNA
gctgcagcagctcactcaccactgctatagttccttactgaaaggtaagttgctatagtaagggcaacagacccgaggcgttggggatcgcctagcccgtgtttacgggctctccccatattcaaaataatgacagacgagcaccttggagcatttatctccgaggtgct

SEQ ID NO: 17957 - DNA, 99 bp, synthetic construct
  source 1..99: mol_type = other DNA
ctgtcaacggctgcaacctgcgggttttagtactctggaaacagaatctactaaaacaaggcaaaatgccgtgtttatctcgtcaacttgttggcgaga

SEQ ID NO: 17958 - DNA, 138 bp, synthetic construct
  source 1..138: mol_type = other DNA
atatacgggaggcttagatggttttagagctagaaatagcaagttaaaataaggctagtccgttatcaacttgaaaaagtggcaccgagtcggtgcgttttttttttttttctggtgttattccagctaagcctcccg

SEQ ID NO: 17959 - DNA, 187 bp, synthetic construct
  source 1..187: mol_type = other DNA
ttttttttctggtgttattccatcgttgtagctccctttctcatttcggaaacgaaatgagaaccgttgctacaataaggccgtctgaaaagatgtgccgcaacgctctgccccttaaagcttctgctttaaggggcatcgtttattgcaggcaccatatacgggaggcttagctggaataacacca

SEQ ID NO: 17960 - DNA, 139 bp, synthetic construct
  source 1..139: mol_type = other DNA
tttttctggtgttattccatcgttttagtactctggaaacagaatctactaaaacaaggcaaaatgccgtgtttatctcgtcaacttgttggcgagattgcaggcaccatatacgggaggcttagctggaataacacca

SEQ ID NO: 17961 - DNA, 138 bp, synthetic construct
  source 1..138: mol_type = other DNA
catatacgggaggcttagatgttttagagctagaaatagcaagttaaaataaggctagtccgttatcaacttgaaaaagtggcaccgagtcggtgcttttttttttttttctggtgttattccagctaagcctcccgt

SEQ ID NO: 17962 - DNA, 138 bp, synthetic construct
  source 1..138: mol_type = other DNA
ttttctggtgttattccatcgttttagagctagaaatagcaagttaaaataaggctagtccgttatcaacttgaaaaagtggcaccgagtcggtgcttgcaggcaccatatacgggaggcttagctggaataacacca

SEQ ID NO: 17963 - DNA, 212 bp, synthetic construct
  source 1..212: mol_type = other DNA
tttttttctggtgttattccatcgctatagttccttactgaaaggtaagttgctatagtaagggcaacagacccgaggcgttggggatcgcctagcccgtgtttacgggctctccccatattcaaaataatgacagacgagcaccttggagcatttatctccgaggtgctttgcaggcaccatatacgggaggcttagctggaataacacca

SEQ ID NO: 17964 - DNA, 141 bp, synthetic construct
  source 1..141: mol_type = other DNA
gcaccatatacgggaggcttagagttttagtactctggaaacagaatctactaaaacaaggcaaaatgccgtgtttatctcgtcaacttgttggcgagatttttttttttttctggtgttattccagctaagcctcccgta

SEQ ID NO: 17965 - DNA, 139 bp, synthetic construct
  source 1..139: mol_type = other DNA
ttttttctggtgttattccatgttttagtactctggaaacagaatctactaaaacaaggcaaaatgccgtgtttatctcgtcaacttgttggcgagatgcaggcaccatatacgggaggcttagctggaataacaccag

SEQ ID NO: 17966 - DNA, 139 bp, synthetic construct
  source 1..139: mol_type = other DNA
accatatacgggaggcttagagttttagtactctggaaacagaatctactaaaacaaggcaaaatgccgtgtttatctcgtcaacttgttggcgagatttttttttttttctggtgttattccagctaagcctcccgta

SEQ ID NO: 17967 - DNA, 138 bp, synthetic construct
  source 1..138: mol_type = other DNA
ccatatacgggaggcttagagttttagagctagaaatagcaagttaaaataaggctagtccgttatcaacttgaaaaagtggcaccgagtcggtgctttttttttttttctggtgttattccagctaagcctcccgta

SEQ ID NO: 17968 - DNA, 138 bp, synthetic construct
  source 1..138: mol_type = other DNA
tttttctggtgttattccatgttttagagctagaaatagcaagttaaaataaggctagtccgttatcaacttgaaaaagtggcaccgagtcggtgctgcaggcaccatatacgggaggcttagctggaataacaccag

SEQ ID NO: 17969 - DNA, 141 bp, synthetic construct
  source 1..141: mol_type = other DNA
ggcaccatatacgggaggcttaggttttagtactctggaaacagaatctactaaaacaaggcaaaatgccgtgtttatctcgtcaacttgttggcgagattttttttttttctggtgttattccagctaagcctcccgtat

SEQ ID NO: 17970 - DNA, 139 bp, synthetic construct
  source 1..139: mol_type = other DNA
tttttttctggtgttattccagttttagtactctggaaacagaatctactaaaacaaggcaaaatgccgtgtttatctcgtcaacttgttggcgagagcaggcaccatatacgggaggcttagctggaataacaccaga

SEQ ID NO: 17971 - DNA, 139 bp, synthetic construct
  source 1..139: mol_type = other DNA
caccatatacgggaggcttaggttttagtactctggaaacagaatctactaaaacaaggcaaaatgccgtgtttatctcgtcaacttgttggcgagattttttttttttctggtgttattccagctaagcctcccgtat

SEQ ID NO: 17972 - DNA, 138 bp, synthetic construct
  source 1..138: mol_type = other DNA
accatatacgggaggcttaggttttagagctagaaatagcaagttaaaataaggctagtccgttatcaacttgaaaaagtggcaccgagtcggtgcttttttttttttctggtgttattccagctaagcctcccgtat

SEQ ID NO: 17973 - DNA, 138 bp, synthetic construct
  source 1..138: mol_type = other DNA
ttttttctggtgttattccagttttagagctagaaatagcaagttaaaataaggctagtccgttatcaacttgaaaaagtggcaccgagtcggtgcgcaggcaccatatacgggaggcttagctggaataacaccaga

SEQ ID NO: 17974 - DNA, 146 bp, synthetic construct
  source 1..146: mol_type = other DNA
accatatacgggaggcttaggtctttgtactctggtaccagaagctacaaagataaggcttcatgccgaaatcaacaccctgtcattttatggcagggtgttttttttttttttttctggtgttattccagctaagcctcccgtat

SEQ ID NO: 17975 - DNA, 139 bp, synthetic construct
  source 1..139: mol_type = other DNA
gcaccatatacgggaggcttagttttagtactctggaaacagaatctactaaaacaaggcaaaatgccgtgtttatctcgtcaacttgttggcgagatttttttttttctggtgttattccagctaagcctcccgtata

SEQ ID NO: 17976 - DNA, 138 bp, synthetic construct
  source 1..138: mol_type = other DNA
tttttttctggtgttattccgttttagagctagaaatagcaagttaaaataaggctagtccgttatcaacttgaaaaagtggcaccgagtcggtgccaggcaccatatacgggaggcttagctggaataacaccagaa

SEQ ID NO: 17977 - DNA, 138 bp, synthetic construct
  source 1..138: mol_type = other DNA
caccatatacgggaggcttagttttagagctagaaatagcaagttaaaataaggctagtccgttatcaacttgaaaaagtggcaccgagtcggtgctttttttttttctggtgttattccagctaagcctcccgtata

SEQ ID NO: 17978 - DNA, 138 bp, synthetic construct
  source 1..138: mol_type = other DNA
gcaccatatacgggaggcttgttttagagctagaaatagcaagttaaaataaggctagtccgttatcaacttgaaaaagtggcaccgagtcggtgcttttttttttctggtgttattccagctaagcctcccgtatat

SEQ ID NO: 17979 - DNA, 138 bp, synthetic construct
  source 1..138: mol_type = other DNA
ttttttttctggtgttattcgttttagagctagaaatagcaagttaaaataaggctagtccgttatcaacttgaaaaagtggcaccgagtcggtgcaggcaccatatacgggaggcttagctggaataacaccagaaa

SEQ ID NO: 17980 - DNA, 138 bp, synthetic construct
  source 1..138: mol_type = other DNA
ggcaccatatacgggaggctgttttagagctagaaatagcaagttaaaataaggctagtccgttatcaacttgaaaaagtggcaccgagtcggtgctttttttttctggtgttattccagctaagcctcccgtatatg

SEQ ID NO: 17981 - DNA, 138 bp, synthetic construct
  source 1..138: mol_type = other DNA
tttttttttctggtgttattgttttagagctagaaatagcaagttaaaataaggctagtccgttatcaacttgaaaaagtggcaccgagtcggtgcggcaccatatacgggaggcttagctggaataacaccagaaaa

SEQ ID NO: 17982 - DNA, 212 bp, synthetic construct
  source 1..212: mol_type = other DNA
ttttttttttttctggtgttattgctatagttccttactgaaaggtaagttgctatagtaagggcaacagacccgaggcgttggggatcgcctagcccgtgtttacgggctctccccatattcaaaataatgacagacgagcaccttggagcatttatctccgaggtgctggcaccatatacgggaggcttagctggaataacaccagaaaa

SEQ ID NO: 17983 - DNA, 139 bp, synthetic construct
  source 1..139: mol_type = other DNA
caggcaccatatacgggaggcgttttagtactctggaaacagaatctactaaaacaaggcaaaatgccgtgtttatctcgtcaacttgttggcgagattttttttctggtgttattccagctaagcctcccgtatatgg

SEQ ID NO: 17984 - DNA, 138 bp, synthetic construct
  source 1..138: mol_type = other DNA
ttttttttttctggtgttatgttttagagctagaaatagcaagttaaaataaggctagtccgttatcaacttgaaaaagtggcaccgagtcggtgcgcaccatatacgggaggcttagctggaataacaccagaaaaa

SEQ ID NO: 17985 - DNA, 138 bp, synthetic construct
  source 1..138: mol_type = other DNA
aggcaccatatacgggaggcgttttagagctagaaatagcaagttaaaataaggctagtccgttatcaacttgaaaaagtggcaccgagtcggtgcttttttttctggtgttattccagctaagcctcccgtatatgg

SEQ ID NO: 17986 - DNA, 139 bp, synthetic construct
  source 1..139: mol_type = other DNA
gcaggcaccatatacgggagggttttagtactctggaaacagaatctactaaaacaaggcaaaatgccgtgtttatctcgtcaacttgttggcgagatttttttctggtgttattccagctaagcctcccgtatatggt

SEQ ID NO: 17987 - DNA, 138 bp, synthetic construct
  source 1..138: mol_type = other DNA
tttttttttttctggtgttagttttagagctagaaatagcaagttaaaataaggctagtccgttatcaacttgaaaaagtggcaccgagtcggtgccaccatatacgggaggcttagctggaataacaccagaaaaaa

SEQ ID NO: 17988 - DNA, 138 bp, synthetic construct
  source 1..138: mol_type = other DNA
caggcaccatatacgggagggttttagagctagaaatagcaagttaaaataaggctagtccgttatcaacttgaaaaagtggcaccgagtcggtgctttttttctggtgttattccagctaagcctcccgtatatggt

SEQ ID NO: 17989 - DNA, 138 bp, synthetic construct
  source 1..138: mol_type = other DNA
ttttttttttttctggtgttgttttagagctagaaatagcaagttaaaataaggctagtccgttatcaacttgaaaaagtggcaccgagtcggtgcaccatatacgggaggcttagctggaataacaccagaaaaaaa

SEQ ID NO: 17990 - DNA, 138 bp, synthetic construct
  source 1..138: mol_type = other DNA
gcaggcaccatatacgggaggttttagagctagaaatagcaagttaaaataaggctagtccgttatcaacttgaaaaagtggcaccgagtcggtgcttttttctggtgttattccagctaagcctcccgtatatggtg

SEQ ID NO: 17991 - DNA, 212 bp, synthetic construct
  source 1..212: mol_type = other DNA
gttttttttttttttctggtgttgctatagttccttactgaaaggtaagttgctatagtaagggcaacagacccgaggcgttggggatcgcctagcccgtgtttacgggctctccccatattcaaaataatgacagacgagcaccttggagcatttatctccgaggtgctaccatatacgggaggcttagctggaataacaccagaaaaaaa

SEQ ID NO: 17992 - DNA, 187 bp, synthetic construct
  source 1..187: mol_type = other DNA
ccgttttttttttttttctggtgtgttgtagctccctttctcatttcggaaacgaaatgagaaccgttgctacaataaggccgtctgaaaagatgtgccgcaacgctctgccccttaaagcttctgctttaaggggcatcgtttaccatatacgggaggcttagctggaataacaccagaaaaaaaa

SEQ ID NO: 17993 - DNA, 138 bp, synthetic construct
  source 1..138: mol_type = other DNA
tgcaggcaccatatacgggagttttagagctagaaatagcaagttaaaataaggctagtccgttatcaacttgaaaaagtggcaccgagtcggtgctttttctggtgttattccagctaagcctcccgtatatggtgc

SEQ ID NO: 17994 - DNA, 138 bp, synthetic construct
  source 1..138: mol_type = other DNA
tttttttttttttctggtgtgttttagagctagaaatagcaagttaaaataaggctagtccgttatcaacttgaaaaagtggcaccgagtcggtgcccatatacgggaggcttagctggaataacaccagaaaaaaaa

SEQ ID NO: 17995 - DNA, 212 bp, synthetic construct
  source 1..212: mol_type = other DNA
cgttttttttttttttctggtgtgctatagttccttactgaaaggtaagttgctatagtaagggcaacagacccgaggcgttggggatcgcctagcccgtgtttacgggctctccccatattcaaaataatgacagacgagcaccttggagcatttatctccgaggtgctccatatacgggaggcttagctggaataacaccagaaaaaaaa

SEQ ID NO: 17996 - DNA, 138 bp, synthetic construct
  source 1..138: mol_type = other DNA
ttgcaggcaccatatacggggttttagagctagaaatagcaagttaaaataaggctagtccgttatcaacttgaaaaagtggcaccgagtcggtgcttttctggtgttattccagctaagcctcccgtatatggtgcc

SEQ ID NO: 17997 - DNA, 138 bp, synthetic construct
  source 1..138: mol_type = other DNA
ttttttttttttttctggtggttttagagctagaaatagcaagttaaaataaggctagtccgttatcaacttgaaaaagtggcaccgagtcggtgccatatacgggaggcttagctggaataacaccagaaaaaaaaa

SEQ ID NO: 17998 - DNA, 139 bp, synthetic construct
  source 1..139: mol_type = other DNA
gcttgcaggcaccatatacgggttttagtactctggaaacagaatctactaaaacaaggcaaaatgccgtgtttatctcgtcaacttgttggcgagatttctggtgttattccagctaagcctcccgtatatggtgcct

SEQ ID NO: 17999 - DNA, 138 bp, synthetic construct
  source 1..138: mol_type = other DNA
cttgcaggcaccatatacgggttttagagctagaaatagcaagttaaaataaggctagtccgttatcaacttgaaaaagtggcaccgagtcggtgctttctggtgttattccagctaagcctcccgtatatggtgcct

SEQ ID NO: 18000 - DNA, 138 bp, synthetic construct
  source 1..138: mol_type = other DNA
gttttttttttttttctggtgttttagagctagaaatagcaagttaaaataaggctagtccgttatcaacttgaaaaagtggcaccgagtcggtgcatatacgggaggcttagctggaataacaccagaaaaaaaaaa

SEQ ID NO: 18001 - DNA, 212 bp, synthetic construct
  source 1..212: mol_type = other DNA
gagcttgcaggcaccatatacgggctatagttccttactgaaaggtaagttgctatagtaagggcaacagacccgaggcgttggggatcgcctagcccgtgtttacgggctctccccatattcaaaataatgacagacgagcaccttggagcatttatctccgaggtgcttttctggtgttattccagctaagcctcccgtatatggtgcct

SEQ ID NO: 18002 - DNA, 177 bp, synthetic construct
  source 1..177: mol_type = other DNA
gcaccgttttttttttttttctgggttgtagctccctttttcatttcgcgaaagcgaaatgaaaaacgttgttacaataagagatgaatttctcgcaaagctctgcctcttgaaatttcggtttcaagaggcatctatacgggaggcttagctggaataacaccagaaaaaaaaaaa

SEQ ID NO: 18003 - DNA, 139 bp, synthetic construct
  source 1..139: mol_type = other DNA
agcttgcaggcaccatatacggttttagtactctggaaacagaatctactaaaacaaggcaaaatgccgtgtttatctcgtcaacttgttggcgagattctggtgttattccagctaagcctcccgtatatggtgcctg

SEQ ID NO: 18004 - DNA, 138 bp, synthetic construct
  source 1..138: mol_type = other DNA
cgttttttttttttttctgggttttagagctagaaatagcaagttaaaataaggctagtccgttatcaacttgaaaaagtggcaccgagtcggtgctatacgggaggcttagctggaataacaccagaaaaaaaaaaa

SEQ ID NO: 18005 - DNA, 138 bp, synthetic construct
  source 1..138: mol_type = other DNA
gcttgcaggcaccatatacggttttagagctagaaatagcaagttaaaataaggctagtccgttatcaacttgaaaaagtggcaccgagtcggtgcttctggtgttattccagctaagcctcccgtatatggtgcctg

SEQ ID NO: 18006 - DNA, 141 bp, synthetic construct
  source 1..141: mol_type = other DNA
aagagcttgcaggcaccatatacgttttagtactctggaaacagaatctactaaaacaaggcaaaatgccgtgtttatctcgtcaacttgttggcgagatctggtgttattccagctaagcctcccgtatatggtgcctgc

SEQ ID NO: 18007 - DNA, 139 bp, synthetic construct
  source 1..139: mol_type = other DNA
gagcttgcaggcaccatatacgttttagtactctggaaacagaatctactaaaacaaggcaaaatgccgtgtttatctcgtcaacttgttggcgagatctggtgttattccagctaagcctcccgtatatggtgcctgc

SEQ ID NO: 18008 - DNA, 138 bp, synthetic construct
  source 1..138: mol_type = other DNA
ccgttttttttttttttctggttttagagctagaaatagcaagttaaaataaggctagtccgttatcaacttgaaaaagtggcaccgagtcggtgcatacgggaggcttagctggaataacaccagaaaaaaaaaaaa

SEQ ID NO: 18009 - DNA, 138 bp, synthetic construct
  source 1..138: mol_type = other DNA
agcttgcaggcaccatatacgttttagagctagaaatagcaagttaaaataaggctagtccgttatcaacttgaaaaagtggcaccgagtcggtgctctggtgttattccagctaagcctcccgtatatggtgcctgc

SEQ ID NO: 18010 - DNA, 141 bp, synthetic construct
  source 1..141: mol_type = other DNA
caagagcttgcaggcaccatatagttttagtactctggaaacagaatctactaaaacaaggcaaaatgccgtgtttatctcgtcaacttgttggcgagactggtgttattccagctaagcctcccgtatatggtgcctgca

SEQ ID NO: 18011 - DNA, 139 bp, synthetic construct
  source 1..139: mol_type = other DNA
agagcttgcaggcaccatatagttttagtactctggaaacagaatctactaaaacaaggcaaaatgccgtgtttatctcgtcaacttgttggcgagactggtgttattccagctaagcctcccgtatatggtgcctgca

SEQ ID NO: 18012 - DNA, 138 bp, synthetic construct
  source 1..138: mol_type = other DNA
gagcttgcaggcaccatatagttttagagctagaaatagcaagttaaaataaggctagtccgttatcaacttgaaaaagtggcaccgagtcggtgcctggtgttattccagctaagcctcccgtatatggtgcctgca

SEQ ID NO: 18013 - DNA, 138 bp, synthetic construct
  source 1..138: mol_type = other DNA
accgttttttttttttttctgttttagagctagaaatagcaagttaaaataaggctagtccgttatcaacttgaaaaagtggcaccgagtcggtgctacgggaggcttagctggaataacaccagaaaaaaaaaaaaa

SEQ ID NO: 18014 - DNA, 177 bp, synthetic construct
  source 1..177: mol_type = other DNA
acagcaccgttttttttttttttcgttgtagctccctttttcatttcgcgaaagcgaaatgaaaaacgttgttacaataagagatgaatttctcgcaaagctctgcctcttgaaatttcggtttcaagaggcatcacgggaggcttagctggaataacaccagaaaaaaaaaaaaaa

SEQ ID NO: 18015 - DNA, 141 bp, synthetic construct
  source 1..141: mol_type = other DNA
ccaagagcttgcaggcaccatatgttttagtactctggaaacagaatctactaaaacaaggcaaaatgccgtgtttatctcgtcaacttgttggcgagatggtgttattccagctaagcctcccgtatatggtgcctgcaa

SEQ ID NO: 18016 - DNA, 139 bp, synthetic construct
  source 1..139: mol_type = other DNA
aagagcttgcaggcaccatatgttttagtactctggaaacagaatctactaaaacaaggcaaaatgccgtgtttatctcgtcaacttgttggcgagatggtgttattccagctaagcctcccgtatatggtgcctgcaa

SEQ ID NO: 18017 - DNA, 138 bp, synthetic construct
  source 1..138: mol_type = other DNA
caccgttttttttttttttcgttttagagctagaaatagcaagttaaaataaggctagtccgttatcaacttgaaaaagtggcaccgagtcggtgcacgggaggcttagctggaataacaccagaaaaaaaaaaaaaa

SEQ ID NO: 18018 - DNA, 138 bp, synthetic construct
  source 1..138: mol_type = other DNA
agagcttgcaggcaccatatgttttagagctagaaatagcaagttaaaataaggctagtccgttatcaacttgaaaaagtggcaccgagtcggtgctggtgttattccagctaagcctcccgtatatggtgcctgcaa

SEQ ID NO: 18019 - DNA, 139 bp, synthetic construct
  source 1..139: mol_type = other DNA
caagagcttgcaggcaccatagttttagtactctggaaacagaatctactaaaacaaggcaaaatgccgtgtttatctcgtcaacttgttggcgagaggtgttattccagctaagcctcccgtatatggtgcctgcaag

SEQ ID NO: 18020 - DNA, 139 bp, synthetic construct
  source 1..139: mol_type = other DNA
agcaccgttttttttttttttgttttagtactctggaaacagaatctactaaaacaaggcaaaatgccgtgtttatctcgtcaacttgttggcgagacgggaggcttagctggaataacaccagaaaaaaaaaaaaaac

SEQ ID NO: 18021 - DNA, 138 bp, synthetic construct
  source 1..138: mol_type = other DNA
gcaccgttttttttttttttgttttagagctagaaatagcaagttaaaataaggctagtccgttatcaacttgaaaaagtggcaccgagtcggtgccgggaggcttagctggaataacaccagaaaaaaaaaaaaaac

SEQ ID NO: 18022 - DNA, 138 bp, synthetic construct
  source 1..138: mol_type = other DNA
aagagcttgcaggcaccatagttttagagctagaaatagcaagttaaaataaggctagtccgttatcaacttgaaaaagtggcaccgagtcggtgcggtgttattccagctaagcctcccgtatatggtgcctgcaag

SEQ ID NO: 18023 - DNA, 139 bp, synthetic construct
  source 1..139: mol_type = other DNA
cagcaccgtttttttttttttgttttagtactctggaaacagaatctactaaaacaaggcaaaatgccgtgtttatctcgtcaacttgttggcgagagggaggcttagctggaataacaccagaaaaaaaaaaaaaacg

SEQ ID NO: 18024 - DNA, 138 bp, synthetic construct
  source 1..138: mol_type = other DNA
agcaccgtttttttttttttgttttagagctagaaatagcaagttaaaataaggctagtccgttatcaacttgaaaaagtggcaccgagtcggtgcgggaggcttagctggaataacaccagaaaaaaaaaaaaaacg

SEQ ID NO: 18025 - DNA, 138 bp, synthetic construct
  source 1..138: mol_type = other DNA
caagagcttgcaggcaccatgttttagagctagaaatagcaagttaaaataaggctagtccgttatcaacttgaaaaagtggcaccgagtcggtgcgtgttattccagctaagcctcccgtatatggtgcctgcaagc

SEQ ID NO: 18026 - DNA, 138 bp, synthetic construct
  source 1..138: mol_type = other DNA
cagcaccgttttttttttttgttttagagctagaaatagcaagttaaaataaggctagtccgttatcaacttgaaaaagtggcaccgagtcggtgcggaggcttagctggaataacaccagaaaaaaaaaaaaaacgg

SEQ ID NO: 18027 - DNA, 138 bp, synthetic construct
  source 1..138: mol_type = other DNA
ccaagagcttgcaggcaccagttttagagctagaaatagcaagttaaaataaggctagtccgttatcaacttgaaaaagtggcaccgagtcggtgctgttattccagctaagcctcccgtatatggtgcctgcaagct

SEQ ID NO: 18028 - DNA, 212 bp, synthetic construct
  source 1..212: mol_type = other DNA
tgtccaagagcttgcaggcaccagctatagttccttactgaaaggtaagttgctatagtaagggcaacagacccgaggcgttggggatcgcctagcccgtgtttacgggctctccccatattcaaaataatgacagacgagcaccttggagcatttatctccgaggtgcttgttattccagctaagcctcccgtatatggtgcctgcaagct

SEQ ID NO: 18029 - DNA, 138 bp, synthetic construct
  source 1..138: mol_type = other DNA
acagcaccgtttttttttttgttttagagctagaaatagcaagttaaaataaggctagtccgttatcaacttgaaaaagtggcaccgagtcggtgcgaggcttagctggaataacaccagaaaaaaaaaaaaaacggt

SEQ ID NO: 18030 - DNA, 138 bp, synthetic construct
  source 1..138: mol_type = other DNA
tccaagagcttgcaggcaccgttttagagctagaaatagcaagttaaaataaggctagtccgttatcaacttgaaaaagtggcaccgagtcggtgcgttattccagctaagcctcccgtatatggtgcctgcaagctc

SEQ ID NO: 18031 - DNA, 138 bp, synthetic construct
  source 1..138: mol_type = other DNA
cacagcaccgttttttttttgttttagagctagaaatagcaagttaaaataaggctagtccgttatcaacttgaaaaagtggcaccgagtcggtgcaggcttagctggaataacaccagaaaaaaaaaaaaaacggtg

SEQ ID NO: 18032 - DNA, 138 bp, synthetic construct
  source 1..138: mol_type = other DNA
gtccaagagcttgcaggcacgttttagagctagaaatagcaagttaaaataaggctagtccgttatcaacttgaaaaagtggcaccgagtcggtgcttattccagctaagcctcccgtatatggtgcctgcaagctct

SEQ ID NO: 18033 - DNA, 212 bp, synthetic construct
  source 1..212: mol_type = other DNA
actcacagcaccgttttttttttgctatagttccttactgaaaggtaagttgctatagtaagggcaacagacccgaggcgttggggatcgcctagcccgtgtttacgggctctccccatattcaaaataatgacagacgagcaccttggagcatttatctccgaggtgctaggcttagctggaataacaccagaaaaaaaaaaaaaacggtg

SEQ ID NO: 18034 - DNA, 138 bp, synthetic construct
  source 1..138: mol_type = other DNA
tcacagcaccgtttttttttgttttagagctagaaatagcaagttaaaataaggctagtccgttatcaacttgaaaaagtggcaccgagtcggtgcggcttagctggaataacaccagaaaaaaaaaaaaaacggtgc

SEQ ID NO: 18035 - DNA, 138 bp, synthetic construct
  source 1..138: mol_type = other DNA
tgtccaagagcttgcaggcagttttagagctagaaatagcaagttaaaataaggctagtccgttatcaacttgaaaaagtggcaccgagtcggtgctattccagctaagcctcccgtatatggtgcctgcaagctctt

SEQ ID NO: 18036 - DNA, 138 bp, synthetic construct
  source 1..138: mol_type = other DNA
ctcacagcaccgttttttttgttttagagctagaaatagcaagttaaaataaggctagtccgttatcaacttgaaaaagtggcaccgagtcggtgcgcttagctggaataacaccagaaaaaaaaaaaaaacggtgct

SEQ ID NO: 18037 - DNA, 138 bp, synthetic construct
  source 1..138: mol_type = other DNA
atgtccaagagcttgcaggcgttttagagctagaaatagcaagttaaaataaggctagtccgttatcaacttgaaaaagtggcaccgagtcggtgcattccagctaagcctcccgtatatggtgcctgcaagctcttg

SEQ ID NO: 18038 - DNA, 139 bp, synthetic construct
  source 1..139: mol_type = other DNA
actcacagcaccgtttttttgttttagagctagaaatagcaagttaaaataaggctagtccgttatcaacttgaaaaagtggcaccgagtcggtgcgcttagctggaataacaccagaaaaaaaaaaaaaacggtgctg

SEQ ID NO: 18039 - DNA, 139 bp, synthetic construct
  source 1..139: mol_type = other DNA
catgtccaagagcttgcagggttttagagctagaaatagcaagttaaaataaggctagtccgttatcaacttgaaaaagtggcaccgagtcggtgcattccagctaagcctcccgtatatggtgcctgcaagctcttgg

SEQ ID NO: 18040 - DNA, 140 bp, synthetic construct
  source 1..140: mol_type = other DNA
cactcacagcaccgttttttgttttagagctagaaatagcaagttaaaataaggctagtccgttatcaacttgaaaaagtggcaccgagtcggtgcgcttagctggaataacaccagaaaaaaaaaaaaaacggtgctgt

SEQ ID NO: 18041 - DNA, 140 bp, synthetic construct
  source 1..140: mol_type = other DNA
ccatgtccaagagcttgcaggttttagagctagaaatagcaagttaaaataaggctagtccgttatcaacttgaaaaagtggcaccgagtcggtgcattccagctaagcctcccgtatatggtgcctgcaagctcttgga

SEQ ID NO: 18042 - DNA, 214 bp, synthetic construct
  source 1..214: mol_type = other DNA
gctccatgtccaagagcttgcaggctatagttccttactgaaaggtaagttgctatagtaagggcaacagacccgaggcgttggggatcgcctagcccgtgtttacgggctctccccatattcaaaataatgacagacgagcaccttggagcatttatctccgaggtgctattccagctaagcctcccgtatatggtgcctgcaagctcttgga

SEQ ID NO: 18043 - DNA, 190 bp, synthetic construct
  source 1..190: mol_type = other DNA
cagctccatgtccaagagcttgcagttgtagctccctttctcatttcggaaacgaaatgagaaccgttgctacaataaggccgtctgaaaagatgtgccgcaacgctctgccccttaaagcttctgctttaaggggcatcgtttaattccagctaagcctcccgtatatggtgcctgcaagctcttggac

SEQ ID NO: 18044 - DNA, 141 bp, synthetic construct
  source 1..141: mol_type = other DNA
tccatgtccaagagcttgcagttttagagctagaaatagcaagttaaaataaggctagtccgttatcaacttgaaaaagtggcaccgagtcggtgcattccagctaagcctcccgtatatggtgcctgcaagctcttggac

SEQ ID NO: 18045 - DNA, 141 bp, synthetic construct
  source 1..141: mol_type = other DNA
tcactcacagcaccgtttttgttttagagctagaaatagcaagttaaaataaggctagtccgttatcaacttgaaaaagtggcaccgagtcggtgcgcttagctggaataacaccagaaaaaaaaaaaaaacggtgctgtg

SEQ ID NO: 18046 - DNA, 215 bp, synthetic construct
  source 1..215: mol_type = other DNA
agctccatgtccaagagcttgcagctatagttccttactgaaaggtaagttgctatagtaagggcaacagacccgaggcgttggggatcgcctagcccgtgtttacgggctctccccatattcaaaataatgacagacgagcaccttggagcatttatctccgaggtgctattccagctaagcctcccgtatatggtgcctgcaagctcttggac

SEQ ID NO: 18047 - DNA, 142 bp, synthetic construct
  source 1..142: mol_type = other DNA
ctccatgtccaagagcttgcgttttagagctagaaatagcaagttaaaataaggctagtccgttatcaacttgaaaaagtggcaccgagtcggtgcattccagctaagcctcccgtatatggtgcctgcaagctcttggaca

SEQ ID NO: 18048 - DNA, 142 bp, synthetic construct
  source 1..142: mol_type = other DNA
ctcactcacagcaccgttttgttttagagctagaaatagcaagttaaaataaggctagtccgttatcaacttgaaaaagtggcaccgagtcggtgcgcttagctggaataacaccagaaaaaaaaaaaaaacggtgctgtga

SEQ ID NO: 18049 - DNA, 144 bp, synthetic construct
  source 1..144: mol_type = other DNA
agctccatgtccaagagcttggttttagtactctggaaacagaatctactaaaacaaggcaaaatgccgtgtttatctcgtcaacttgttggcgagaattccagctaagcctcccgtatatggtgcctgcaagctcttggacat

SEQ ID NO: 18050 - DNA, 143 bp, synthetic construct
  source 1..143: mol_type = other DNA
gctccatgtccaagagcttggttttagagctagaaatagcaagttaaaataaggctagtccgttatcaacttgaaaaagtggcaccgagtcggtgcattccagctaagcctcccgtatatggtgcctgcaagctcttggacat

SEQ ID NO: 18051 - DNA, 143 bp, synthetic construct
  source 1..143: mol_type = other DNA
cctcactcacagcaccgtttgttttagagctagaaatagcaagttaaaataaggctagtccgttatcaacttgaaaaagtggcaccgagtcggtgcgcttagctggaataacaccagaaaaaaaaaaaaaacggtgctgtgag

SEQ ID NO: 18052 - DNA, 217 bp, synthetic construct
  source 1..217: mol_type = other DNA
ccagctccatgtccaagagcttggctatagttccttactgaaaggtaagttgctatagtaagggcaacagacccgaggcgttggggatcgcctagcccgtgtttacgggctctccccatattcaaaataatgacagacgagcaccttggagcatttatctccgaggtgctattccagctaagcctcccgtatatggtgcctgcaagctcttggacat

SEQ ID NO: 18053 - DNA, 145 bp, synthetic construct
  source 1..145: mol_type = other DNA
cagctccatgtccaagagcttgttttagtactctggaaacagaatctactaaaacaaggcaaaatgccgtgtttatctcgtcaacttgttggcgagaattccagctaagcctcccgtatatggtgcctgcaagctcttggacatg

SEQ ID NO: 18054 - DNA, 144 bp, synthetic construct
  source 1..144: mol_type = other DNA
gcctcactcacagcaccgttgttttagagctagaaatagcaagttaaaataaggctagtccgttatcaacttgaaaaagtggcaccgagtcggtgcgcttagctggaataacaccagaaaaaaaaaaaaaacggtgctgtgagt

SEQ ID NO: 18055 - DNA, 144 bp, synthetic construct
  source 1..144: mol_type = other DNA
agctccatgtccaagagcttgttttagagctagaaatagcaagttaaaataaggctagtccgttatcaacttgaaaaagtggcaccgagtcggtgcattccagctaagcctcccgtatatggtgcctgcaagctcttggacatg

SEQ ID NO: 18056 - DNA, 146 bp, synthetic construct
  source 1..146: mol_type = other DNA
ccagctccatgtccaagagctgttttagtactctggaaacagaatctactaaaacaaggcaaaatgccgtgtttatctcgtcaacttgttggcgagaattccagctaagcctcccgtatatggtgcctgcaagctcttggacatgg

SEQ ID NO: 18057 - DNA, 145 bp, synthetic construct
  source 1..145: mol_type = other DNA
cagctccatgtccaagagctgttttagagctagaaatagcaagttaaaataaggctagtccgttatcaacttgaaaaagtggcaccgagtcggtgcattccagctaagcctcccgtatatggtgcctgcaagctcttggacatgg

SEQ ID NO: 18058 - DNA, 145 bp, synthetic construct
  source 1..145: mol_type = other DNA
ggcctcactcacagcaccgtgttttagagctagaaatagcaagttaaaataaggctagtccgttatcaacttgaaaaagtggcaccgagtcggtgcgcttagctggaataacaccagaaaaaaaaaaaaaacggtgctgtgagtg

SEQ ID NO: 18059 - DNA, 96 bp, synthetic construct
  source 1..96: mol_type = other DNA
actgtgagtgaccgcagcgtgttttagagctagaaatagcaagttaaaataaggctagtccgttatcaacttgaaaaagtggcaccgagtcggtgc

SEQ ID NO: 18060 - DNA, 145 bp, synthetic construct
  source 1..145: mol_type = other DNA
agggctctcctgccgggtgtctatgttgtagctccctttctcatttcggaaacgaaatgagaaccgttgctacaataaggccgtctgaaaagatgtgccgcaacgctctgccccttaaagcttctgctttaaggggcatcgttta

SEQ ID NO: 18061 - DNA, 97 bp, synthetic construct
  source 1..97: mol_type = other DNA
catcccaaagggctctcctgcgttttagtactctggaaacagaatctactaaaacaaggcaaaatgccgtgtttatctcgtcaacttgttggcgaga

SEQ ID NO: 18062 - DNA, 96 bp, synthetic construct
  source 1..96: mol_type = other DNA
tgtgagtgaccgcagcgtccgttttagagctagaaatagcaagttaaaataaggctagtccgttatcaacttgaaaaagtggcaccgagtcggtgc

SEQ ID NO: 18063 - DNA, 96 bp, synthetic construct
  source 1..96: mol_type = other DNA
caaagggctctcctgccggggttttagagctagaaatagcaagttaaaataaggctagtccgttatcaacttgaaaaagtggcaccgagtcggtgc

SEQ ID NO: 18064 - DNA, 96 bp, synthetic construct
  source 1..96: mol_type = other DNA
ctgtgagtgaccgcagcgtcgttttagagctagaaatagcaagttaaaataaggctagtccgttatcaacttgaaaaagtggcaccgagtcggtgc

SEQ ID NO: 18065 - DNA, 170 bp, synthetic construct
  source 1..170: mol_type = other DNA
atcccaaagggctctcctgccgggctatagttccttactgaaaggtaagttgctatagtaagggcaacagacccgaggcgttggggatcgcctagcccgtgtttacgggctctccccatattcaaaataatgacagacgagcaccttggagcatttatctccgaggtgct

SEQ ID NO: 18066 - DNA, 99 bp, synthetic construct
  source 1..99: mol_type = other DNA
gggacagatgaaacctgatgactgttttagtactctggaaacagaatctactaaaacaaggcaaaatgccgtgtttatctcgtcaacttgttggcgaga

SEQ ID NO: 18067 - DNA, 97 bp, synthetic construct
  source 1..97: mol_type = other DNA
agggctctcctgccgggtgtcgttttagtactctggaaacagaatctactaaaacaaggcaaaatgccgtgtttatctcgtcaacttgttggcgaga

SEQ ID NO: 18068 - DNA, 97 bp, synthetic construct
  source 1..97: mol_type = other DNA
gactgtgagtgaccgcagcgtgttttagtactctggaaacagaatctactaaaacaaggcaaaatgccgtgtttatctcgtcaacttgttggcgaga

SEQ ID NO: 18069 - DNA, 96 bp, synthetic construct
  source 1..96: mol_type = other DNA
aaagggctctcctgccgggtgttttagagctagaaatagcaagttaaaataaggctagtccgttatcaacttgaaaaagtggcaccgagtcggtgc

SEQ ID NO: 18070 - DNA, 97 bp, synthetic construct
  source 1..97: mol_type = other DNA
actgtgagtgaccgcagcgtcgttttagtactctggaaacagaatctactaaaacaaggcaaaatgccgtgtttatctcgtcaacttgttggcgaga

SEQ ID NO: 18071 - DNA, 96 bp, synthetic construct
  source 1..96: mol_type = other DNA
aagggctctcctgccgggtggttttagagctagaaatagcaagttaaaataaggctagtccgttatcaacttgaaaaagtggcaccgagtcggtgc

SEQ ID NO: 18072 - DNA, 96 bp, synthetic construct
  source 1..96: mol_type = other DNA
gtgagtgaccgcagcgtccagttttagagctagaaatagcaagttaaaataaggctagtccgttatcaacttgaaaaagtggcaccgagtcggtgc

SEQ ID NO: 18073 - DNA, 84 bp, synthetic construct
  source 1..84: mol_type = other DNA
gtctttgtactctggtaccagaagctacaaagataaggcttcatgccgaaatcaacaccctgtcattttatggcagggtgtttt

SEQ ID NO: 18074 - DNA, 96 bp, synthetic construct
  source 1..96: mol_type = other DNA
agggctctcctgccgggtgtgttttagagctagaaatagcaagttaaaataaggctagtccgttatcaacttgaaaaagtggcaccgagtcggtgc

SEQ ID NO: 18075 - DNA, 96 bp, synthetic construct
  source 1..96: mol_type = other DNA
tgagtgaccgcagcgtccaggttttagagctagaaatagcaagttaaaataaggctagtccgttatcaacttgaaaaagtggcaccgagtcggtgc

SEQ ID NO: 18076 - DNA, 96 bp, synthetic construct
  source 1..96: mol_type = other DNA
gggctctcctgccgggtgtcgttttagagctagaaatagcaagttaaaataaggctagtccgttatcaacttgaaaaagtggcaccgagtcggtgc

SEQ ID NO: 18077 - DNA, 96 bp, synthetic construct
  source 1..96: mol_type = other DNA
gagtgaccgcagcgtccagggttttagagctagaaatagcaagttaaaataaggctagtccgttatcaacttgaaaaagtggcaccgagtcggtgc

SEQ ID NO: 18078 - DNA, 96 bp, synthetic construct
  source 1..96: mol_type = other DNA
gtgaccgcagcgtccaggccgttttagagctagaaatagcaagttaaaataaggctagtccgttatcaacttgaaaaagtggcaccgagtcggtgc

SEQ ID NO: 18079 - DNA, 96 bp, synthetic construct
  source 1..96: mol_type = other DNA
ggctctcctgccgggtgtctgttttagagctagaaatagcaagttaaaataaggctagtccgttatcaacttgaaaaagtggcaccgagtcggtgc

SEQ ID NO: 18080 - DNA, 96 bp, synthetic construct
  source 1..96: mol_type = other DNA
agtgaccgcagcgtccaggcgttttagagctagaaatagcaagttaaaataaggctagtccgttatcaacttgaaaaagtggcaccgagtcggtgc

SEQ ID NO: 18081 - DNA, 170 bp, synthetic construct
  source 1..170: mol_type = other DNA
gggctctcctgccgggtgtctatgctatagttccttactgaaaggtaagttgctatagtaagggcaacagacccgaggcgttggggatcgcctagcccgtgtttacgggctctccccatattcaaaataatgacagacgagcaccttggagcatttatctccgaggtgct

SEQ ID NO: 18082 - DNA, 97 bp, synthetic construct
  source 1..97: mol_type = other DNA
tgaccgcagcgtccaggccttgttttagtactctggaaacagaatctactaaaacaaggcaaaatgccgtgtttatctcgtcaacttgttggcgaga

SEQ ID NO: 18083 - DNA, 97 bp, synthetic construct
  source 1..97: mol_type = other DNA
gaccgcagcgtccaggccttggttttagtactctggaaacagaatctactaaaacaaggcaaaatgccgtgtttatctcgtcaacttgttggcgaga

SEQ ID NO: 18084 - DNA, 96 bp, synthetic construct
  source 1..96: mol_type = other DNA
gctctcctgccgggtgtctagttttagagctagaaatagcaagttaaaataaggctagtccgttatcaacttgaaaaagtggcaccgagtcggtgc

SEQ ID NO: 18085 - DNA, 96 bp, synthetic construct
  source 1..96: mol_type = other DNA
ctctcctgccgggtgtctatgttttagagctagaaatagcaagttaaaataaggctagtccgttatcaacttgaaaaagtggcaccgagtcggtgc

SEQ ID NO: 18086 - DNA, 96 bp, synthetic construct
  source 1..96: mol_type = other DNA
tgaccgcagcgtccaggcctgttttagagctagaaatagcaagttaaaataaggctagtccgttatcaacttgaaaaagtggcaccgagtcggtgc

SEQ ID NO: 18087 - DNA, 96 bp, synthetic construct
  source 1..96: mol_type = other DNA
tctcctgccgggtgtctatagttttagagctagaaatagcaagttaaaataaggctagtccgttatcaacttgaaaaagtggcaccgagtcggtgc

SEQ ID NO: 18088 - DNA, 96 bp, synthetic construct
  source 1..96: mol_type = other DNA
gaccgcagcgtccaggccttgttttagagctagaaatagcaagttaaaataaggctagtccgttatcaacttgaaaaagtggcaccgagtcggtgc

SEQ ID NO: 18089 - DNA, 170 bp, synthetic construct
  source 1..170: mol_type = other DNA
ggctctcctgccgggtgtctatagctatagttccttactgaaaggtaagttgctatagtaagggcaacagacccgaggcgttggggatcgcctagcccgtgtttacgggctctccccatattcaaaataatgacagacgagcaccttggagcatttatctccgaggtgct

SEQ ID NO: 18090 - DNA, 145 bp, synthetic construct
  source 1..145: mol_type = other DNA
gggctctcctgccgggtgtctatagttgtagctccctttctcatttcggaaacgaaatgagaaccgttgctacaataaggccgtctgaaaagatgtgccgcaacgctctgccccttaaagcttctgctttaaggggcatcgttta

SEQ ID NO: 18091 - DNA, 96 bp, synthetic construct
  source 1..96: mol_type = other DNA
ccgcagcgtccaggccttgcgttttagagctagaaatagcaagttaaaataaggctagtccgttatcaacttgaaaaagtggcaccgagtcggtgc

SEQ ID NO: 18092 - DNA, 96 bp, synthetic construct
  source 1..96: mol_type = other DNA
ctcctgccgggtgtctataggttttagagctagaaatagcaagttaaaataaggctagtccgttatcaacttgaaaaagtggcaccgagtcggtgc

SEQ ID NO: 18093 - DNA, 96 bp, synthetic construct
  source 1..96: mol_type = other DNA
accgcagcgtccaggccttggttttagagctagaaatagcaagttaaaataaggctagtccgttatcaacttgaaaaagtggcaccgagtcggtgc

SEQ ID NO: 18094 - DNA, 170 bp, synthetic construct
  source 1..170: mol_type = other DNA
gctctcctgccgggtgtctataggctatagttccttactgaaaggtaagttgctatagtaagggcaacagacccgaggcgttggggatcgcctagcccgtgtttacgggctctccccatattcaaaataatgacagacgagcaccttggagcatttatctccgaggtgct

SEQ ID NO: 18095 - DNA, 96 bp, synthetic construct
  source 1..96: mol_type = other DNA
tcctgccgggtgtctatagagttttagagctagaaatagcaagttaaaataaggctagtccgttatcaacttgaaaaagtggcaccgagtcggtgc

SEQ ID NO: 18096 - DNA, 96 bp, synthetic construct
  source 1..96: mol_type = other DNA
cctgccgggtgtctatagatgttttagagctagaaatagcaagttaaaataaggctagtccgttatcaacttgaaaaagtggcaccgagtcggtgc

SEQ ID NO: 18097 - DNA, 96 bp, synthetic construct
  source 1..96: mol_type = other DNA
cgcagcgtccaggccttgctgttttagagctagaaatagcaagttaaaataaggctagtccgttatcaacttgaaaaagtggcaccgagtcggtgc

SEQ ID NO: 18098 - DNA, 170 bp, synthetic construct
  source 1..170: mol_type = other DNA
gaccgcagcgtccaggccttgctgctatagttccttactgaaaggtaagttgctatagtaagggcaacagacccgaggcgttggggatcgcctagcccgtgtttacgggctctccccatattcaaaataatgacagacgagcaccttggagcatttatctccgaggtgct

SEQ ID NO: 18099 - DNA, 135 bp, synthetic construct
  source 1..135: mol_type = other DNA
tggcaataaaacatcaagctcactgttgtagctccctttttcatttcgcgaaagcgaaatgaaaaacgttgttacaataagagatgaatttctcgcaaagctctgcctcttgaaatttcggtttcaagaggcatc

SEQ ID NO: 18100 - DNA, 97 bp, synthetic construct
  source 1..97: mol_type = other DNA
agcgtccaggccttgctggtagttttagtactctggaaacagaatctactaaaacaaggcaaaatgccgtgtttatctcgtcaacttgttggcgaga

SEQ ID NO: 18101 - DNA, 96 bp, synthetic construct
  source 1..96: mol_type = other DNA
ccgggtgtctatagatcccagttttagagctagaaatagcaagttaaaataaggctagtccgttatcaacttgaaaaagtggcaccgagtcggtgc

SEQ ID NO: 18102 - DNA, 96 bp, synthetic construct
  source 1..96: mol_type = other DNA
ctgccgggtgtctatagatcgttttagagctagaaatagcaagttaaaataaggctagtccgttatcaacttgaaaaagtggcaccgagtcggtgc

SEQ ID NO: 18103 - DNA, 96 bp, synthetic construct
  source 1..96: mol_type = other DNA
gcagcgtccaggccttgctggttttagagctagaaatagcaagttaaaataaggctagtccgttatcaacttgaaaaagtggcaccgagtcggtgc

SEQ ID NO: 18104 - DNA, 99 bp, synthetic construct
  source 1..99: mol_type = other DNA
gtacccagctctctgttcccacagttttagtactctggaaacagaatctactaaaacaaggcaaaatgccgtgtttatctcgtcaacttgttggcgaga

SEQ ID NO: 18105 - DNA, 96 bp, synthetic construct
  source 1..96: mol_type = other DNA
gccgggtgtctatagatcccgttttagagctagaaatagcaagttaaaataaggctagtccgttatcaacttgaaaaagtggcaccgagtcggtgc

SEQ ID NO: 18106 - DNA, 96 bp, synthetic construct
  source 1..96: mol_type = other DNA
tgccgggtgtctatagatccgttttagagctagaaatagcaagttaaaataaggctagtccgttatcaacttgaaaaagtggcaccgagtcggtgc

SEQ ID NO: 18107 - DNA, 96 bp, synthetic construct
  source 1..96: mol_type = other DNA
cagcgtccaggccttgctgggttttagagctagaaatagcaagttaaaataaggctagtccgttatcaacttgaaaaagtggcaccgagtcggtgc

SEQ ID NO: 18108 - DNA, 97 bp, synthetic construct
  source 1..97: mol_type = other DNA
gcgtccaggccttgctggtacgttttagtactctggaaacagaatctactaaaacaaggcaaaatgccgtgtttatctcgtcaacttgttggcgaga

SEQ ID NO: 18109 - DNA, 96 bp, synthetic construct
  source 1..96: mol_type = other DNA
gtccaggccttgctggtaccgttttagagctagaaatagcaagttaaaataaggctagtccgttatcaacttgaaaaagtggcaccgagtcggtgc

SEQ ID NO: 18110 - DNA, 96 bp, synthetic construct
  source 1..96: mol_type = other DNA
agcgtccaggccttgctggtgttttagagctagaaatagcaagttaaaataaggctagtccgttatcaacttgaaaaagtggcaccgagtcggtgc

SEQ ID NO: 18111 - DNA, 96 bp, synthetic construct
  source 1..96: mol_type = other DNA
gcgtccaggccttgctggtagttttagagctagaaatagcaagttaaaataaggctagtccgttatcaacttgaaaaagtggcaccgagtcggtgc

SEQ ID NO: 18112 - DNA, 97 bp, synthetic construct
  source 1..97: mol_type = other DNA
tgccgggtgtctatagatcccgttttagtactctggaaacagaatctactaaaacaaggcaaaatgccgtgtttatctcgtcaacttgttggcgaga

SEQ ID NO: 18113 - DNA, 96 bp, synthetic construct
  source 1..96: mol_type = other DNA
cgggtgtctatagatcccatgttttagagctagaaatagcaagttaaaataaggctagtccgttatcaacttgaaaaagtggcaccgagtcggtgc

SEQ ID NO: 18114 - DNA, 96 bp, synthetic construct
  source 1..96: mol_type = other DNA
cgtccaggccttgctggtacgttttagagctagaaatagcaagttaaaataaggctagtccgttatcaacttgaaaaagtggcaccgagtcggtgc

SEQ ID NO: 18115 - DNA, 97 bp, synthetic construct
  source 1..97: mol_type = other DNA
ccgggtgtctatagatcccatgttttagtactctggaaacagaatctactaaaacaaggcaaaatgccgtgtttatctcgtcaacttgttggcgaga

SEQ ID NO: 18116 - DNA, 96 bp, synthetic construct
  source 1..96: mol_type = other DNA
gggtgtctatagatcccatggttttagagctagaaatagcaagttaaaataaggctagtccgttatcaacttgaaaaagtggcaccgagtcggtgc

SEQ ID NO: 18117 - DNA, 96 bp, synthetic construct
  source 1..96: mol_type = other DNA
ggtgtctatagatcccatgggttttagagctagaaatagcaagttaaaataaggctagtccgttatcaacttgaaaaagtggcaccgagtcggtgc

SEQ ID NO: 18118 - DNA, 96 bp, synthetic construct
  source 1..96: mol_type = other DNA
tccaggccttgctggtacccgttttagagctagaaatagcaagttaaaataaggctagtccgttatcaacttgaaaaagtggcaccgagtcggtgc

SEQ ID NO: 18119 - DNA, 170 bp, synthetic construct
  source 1..170: mol_type = other DNA
gcgtccaggccttgctggtacccgctatagttccttactgaaaggtaagttgctatagtaagggcaacagacccgaggcgttggggatcgcctagcccgtgtttacgggctctccccatattcaaaataatgacagacgagcaccttggagcatttatctccgaggtgct

SEQ ID NO: 18120 - DNA, 96 bp, synthetic construct
  source 1..96: mol_type = other DNA
gtgtctatagatcccatggcgttttagagctagaaatagcaagttaaaataaggctagtccgttatcaacttgaaaaagtggcaccgagtcggtgc

SEQ ID NO: 18121 - DNA, 96 bp, synthetic construct
  source 1..96: mol_type = other DNA
ccaggccttgctggtacccagttttagagctagaaatagcaagttaaaataaggctagtccgttatcaacttgaaaaagtggcaccgagtcggtgc

SEQ ID NO: 18122 - DNA, 96 bp, synthetic construct
  source 1..96: mol_type = other DNA
tgtctatagatcccatggcagttttagagctagaaatagcaagttaaaataaggctagtccgttatcaacttgaaaaagtggcaccgagtcggtgc

SEQ ID NO: 18123 - DNA, 96 bp, synthetic construct
  source 1..96: mol_type = other DNA
caggccttgctggtacccaggttttagagctagaaatagcaagttaaaataaggctagtccgttatcaacttgaaaaagtggcaccgagtcggtgc

SEQ ID NO: 18124 - DNA, 170 bp, synthetic construct
  source 1..170: mol_type = other DNA
gtgtctatagatcccatggcaatgctatagttccttactgaaaggtaagttgctatagtaagggcaacagacccgaggcgttggggatcgcctagcccgtgtttacgggctctccccatattcaaaataatgacagacgagcaccttggagcatttatctccgaggtgct

SEQ ID NO: 18125 - DNA, 96 bp, synthetic construct
  source 1..96: mol_type = other DNA
gtctatagatcccatggcaagttttagagctagaaatagcaagttaaaataaggctagtccgttatcaacttgaaaaagtggcaccgagtcggtgc

SEQ ID NO: 18126 - DNA, 96 bp, synthetic construct
  source 1..96: mol_type = other DNA
aggccttgctggtacccagcgttttagagctagaaatagcaagttaaaataaggctagtccgttatcaacttgaaaaagtggcaccgagtcggtgc

SEQ ID NO: 18127 - DNA, 96 bp, synthetic construct
  source 1..96: mol_type = other DNA
tctatagatcccatggcaatgttttagagctagaaatagcaagttaaaataaggctagtccgttatcaacttgaaaaagtggcaccgagtcggtgc

SEQ ID NO: 18128 - DNA, 96 bp, synthetic construct
  source 1..96: mol_type = other DNA
ggccttgctggtacccagctgttttagagctagaaatagcaagttaaaataaggctagtccgttatcaacttgaaaaagtggcaccgagtcggtgc

SEQ ID NO: 18129 - DNA, 96 bp, synthetic construct
  source 1..96: mol_type = other DNA
ctatagatcccatggcaatagttttagagctagaaatagcaagttaaaataaggctagtccgttatcaacttgaaaaagtggcaccgagtcggtgc

SEQ ID NO: 18130 - DNA, 96 bp, synthetic construct
  source 1..96: mol_type = other DNA
gccttgctggtacccagctcgttttagagctagaaatagcaagttaaaataaggctagtccgttatcaacttgaaaaagtggcaccgagtcggtgc

SEQ ID NO: 18131 - DNA, 96 bp, synthetic construct
  source 1..96: mol_type = other DNA
tatagatcccatggcaataagttttagagctagaaatagcaagttaaaataaggctagtccgttatcaacttgaaaaagtggcaccgagtcggtgc

SEQ ID NO: 18132 - DNA, 96 bp, synthetic construct
  source 1..96: mol_type = other DNA
ccttgctggtacccagctctgttttagagctagaaatagcaagttaaaataaggctagtccgttatcaacttgaaaaagtggcaccgagtcggtgc

SEQ ID NO: 18133 - DNA, 170 bp, synthetic construct
  source 1..170: mol_type = other DNA
ggccttgctggtacccagctctcgctatagttccttactgaaaggtaagttgctatagtaagggcaacagacccgaggcgttggggatcgcctagcccgtgtttacgggctctccccatattcaaaataatgacagacgagcaccttggagcatttatctccgaggtgct

SEQ ID NO: 18134 - DNA, 145 bp, synthetic construct
  source 1..145: mol_type = other DNA
aggccttgctggtacccagctctcgttgtagctccctttctcatttcggaaacgaaatgagaaccgttgctacaataaggccgtctgaaaagatgtgccgcaacgctctgccccttaaagcttctgctttaaggggcatcgttta

SEQ ID NO: 18135 - DNA, 96 bp, synthetic construct
  source 1..96: mol_type = other DNA
cttgctggtacccagctctcgttttagagctagaaatagcaagttaaaataaggctagtccgttatcaacttgaaaaagtggcaccgagtcggtgc

SEQ ID NO: 18136 - DNA, 96 bp, synthetic construct
  source 1..96: mol_type = other DNA
atagatcccatggcaataaagttttagagctagaaatagcaagttaaaataaggctagtccgttatcaacttgaaaaagtggcaccgagtcggtgc

SEQ ID NO: 18137 - DNA, 96 bp, synthetic construct
  source 1..96: mol_type = other DNA
tagatcccatggcaataaaagttttagagctagaaatagcaagttaaaataaggctagtccgttatcaacttgaaaaagtggcaccgagtcggtgc

SEQ ID NO: 18138 - DNA, 96 bp, synthetic construct
  source 1..96: mol_type = other DNA
ttgctggtacccagctctctgttttagagctagaaatagcaagttaaaataaggctagtccgttatcaacttgaaaaagtggcaccgagtcggtgc

SEQ ID NO: 18139 - DNA, 97 bp, synthetic construct
  source 1..97: mol_type = other DNA
tacccagctctctgttcccacgttttagtactctggaaacagaatctactaaaacaaggcaaaatgccgtgtttatctcgtcaacttgttggcgaga

SEQ ID NO: 18140 - DNA, 96 bp, synthetic construct
  source 1..96: mol_type = other DNA
agatcccatggcaataaaacgttttagagctagaaatagcaagttaaaataaggctagtccgttatcaacttgaaaaagtggcaccgagtcggtgc

SEQ ID NO: 18141 - DNA, 96 bp, synthetic construct
  source 1..96: mol_type = other DNA
tgctggtacccagctctctggttttagagctagaaatagcaagttaaaataaggctagtccgttatcaacttgaaaaagtggcaccgagtcggtgc

SEQ ID NO: 18142 - DNA, 170 bp, synthetic construct
  source 1..170: mol_type = other DNA
ccttgctggtacccagctctctggctatagttccttactgaaaggtaagttgctatagtaagggcaacagacccgaggcgttggggatcgcctagcccgtgtttacgggctctccccatattcaaaataatgacagacgagcaccttggagcatttatctccgaggtgct

SEQ ID NO: 18143 - DNA, 97 bp, synthetic construct
  source 1..97: mol_type = other DNA
gtacccagctctctgttcccagttttagtactctggaaacagaatctactaaaacaaggcaaaatgccgtgtttatctcgtcaacttgttggcgaga

SEQ ID NO: 18144 - DNA, 96 bp, synthetic construct
  source 1..96: mol_type = other DNA
gatcccatggcaataaaacagttttagagctagaaatagcaagttaaaataaggctagtccgttatcaacttgaaaaagtggcaccgagtcggtgc

SEQ ID NO: 18145 - DNA, 96 bp, synthetic construct
  source 1..96: mol_type = other DNA
gctggtacccagctctctgtgttttagagctagaaatagcaagttaaaataaggctagtccgttatcaacttgaaaaagtggcaccgagtcggtgc

SEQ ID NO: 18146 - DNA, 96 bp, synthetic construct
  source 1..96: mol_type = other DNA
atcccatggcaataaaacatgttttagagctagaaatagcaagttaaaataaggctagtccgttatcaacttgaaaaagtggcaccgagtcggtgc

SEQ ID NO: 18147 - DNA, 96 bp, synthetic construct
  source 1..96: mol_type = other DNA
ctggtacccagctctctgttgttttagagctagaaatagcaagttaaaataaggctagtccgttatcaacttgaaaaagtggcaccgagtcggtgc

SEQ ID NO: 18148 - DNA, 138 bp, synthetic construct
  source 1..138: mol_type = other DNA
ttctgggaccatcagcgggcgttttagagctagaaatagcaagttaaaataaggctagtccgttatcaacttgaaaaagtggcaccgagtcggtgcgccctcagtgcagccagatactcacaggcccgctgatggtcc

SEQ ID NO: 18149 - DNA, 138 bp, synthetic construct
  source 1..138: mol_type = other DNA
ttctgggaccatcagcgggcgttttagagctagaaatagcaagttaaaataaggctagtccgttatcaacttgaaaaagtggcaccgagtcggtgcgccctcagtgcagccagatactcaccggaccgctgatggtcc

SEQ ID NO: 18150 - DNA, 138 bp, synthetic construct
  source 1..138: mol_type = other DNA
ttctgggaccatcagcgggcgttttagagctagaaatagcaagttaaaataaggctagtccgttatcaacttgaaaaagtggcaccgagtcggtgcgccctcagtgcagccaggggcgaacaggaccgctgatggtcc

SEQ ID NO: 18151 - DNA, 42 bp, synthetic construct
  source 1..42: mol_type = other DNA
gccctcagtgcagccagatactcaccggcccgctgatggtcc

SEQ ID NO: 18152 - DNA, 42 bp, synthetic construct
  source 1..42: mol_type = other DNA
gccctcagtgcagccagatactcacaggcccgctgatggtcc

SEQ ID NO: 18153 - DNA, 42 bp, synthetic construct
  source 1..42: mol_type = other DNA
gccctcagtgcagccagatactcaccggaccgctgatggtcc

SEQ ID NO: 18154 - DNA, 42 bp, synthetic construct
  source 1..42: mol_type = other DNA
gccctcagtgcagccaggggcgaacaggaccgctgatggtcc

SEQ ID NO: 18155 - DNA, 76 bp, synthetic construct
  source 1..76: mol_type = other DNA
gttttagagctagaaatagcaagttaaaataaggctagtccgttatcaacttgaaaaagtggcaccgagtcggtgc

SEQ ID NO: 18156 - RNA, 122 nt, synthetic construct
  source 1..122: mol_type = other RNA
  modified_base 1: mod_base = OTHER; note = 2'-O-methyl modified nucleotide with phosphorothioate linkage
  modified_base 2: mod_base = OTHER; note = 2'-O-methyl modified nucleotide with phosphorothioate linkage
  modified_base 3: mod_base = OTHER; note = 2'-O-methyl modified nucleotide with phosphorothioate linkage
  modified_base 29: mod_base = OTHER; note = 2'-O-methyl modified nucleotide
  modified_base 30: mod_base = OTHER; note = 2'-O-methyl modified nucleotide
  modified_base 31: mod_base = OTHER; note = 2'-O-methyl modified nucleotide
  modified_base 32: mod_base = OTHER; note = 2'-O-methyl modified nucleotide
  modified_base 33: mod_base = OTHER; note = 2'-O-methyl modified nucleotide
  modified_base 34: mod_base = OTHER; note = 2'-O-methyl modified nucleotide
  modified_base 35: mod_base = OTHER; note = 2'-O-methyl modified nucleotide
  modified_base 36: mod_base = OTHER; note = 2'-O-methyl modified nucleotide
  modified_base 37: mod_base = OTHER; note = 2'-O-methyl modified nucleotide
  modified_base 38: mod_base = OTHER; note = 2'-O-methyl modified nucleotide
  modified_base 39: mod_base = OTHER; note = 2'-O-methyl modified nucleotide
  modified_base 40: mod_base = OTHER; note = 2'-O-methyl modified nucleotide
  modified_base 69: mod_base = OTHER; note = 2'-O-methyl modified nucleotide
  modified_base 70: mod_base = OTHER; note = 2'-O-methyl modified nucleotide
  modified_base 71: mod_base = OTHER; note = 2'-O-methyl modified nucleotide
  modified_base 72: mod_base = OTHER; note = 2'-O-methyl modified nucleotide
  modified_base 73: mod_base = OTHER; note = 2'-O-methyl modified nucleotide
  modified_base 74: mod_base = OTHER; note = 2'-O-methyl modified nucleotide
  modified_base 75: mod_base = OTHER; note = 2'-O-methyl modified nucleotide
  modified_base 76: mod_base = OTHER; note = 2'-O-methyl modified nucleotide
  modified_base 77: mod_base = OTHER; note = 2'-O-methyl modified nucleotide
  modified_base 78: mod_base = OTHER; note = 2'-O-methyl modified nucleotide
  modified_base 79: mod_base = OTHER; note = 2'-O-methyl modified nucleotide
  modified_base 80: mod_base = OTHER; note = 2'-O-methyl modified nucleotide
  modified_base 81: mod_base = OTHER; note = 2'-O-methyl modified nucleotide
  modified_base 82: mod_base = OTHER; note = 2'-O-methyl modified nucleotide
  modified_base 83: mod_base = OTHER; note = 2'-O-methyl modified nucleotide
  modified_base 84: mod_base = OTHER; note = 2'-O-methyl modified nucleotide
  modified_base 85: mod_base = OTHER; note = 2'-O-methyl modified nucleotide
  modified_base 86: mod_base = OTHER; note = 2'-O-methyl modified nucleotide
  modified_base 87: mod_base = OTHER; note = 2'-O-methyl modified nucleotide
  modified_base 88: mod_base = OTHER; note = 2'-O-methyl modified nucleotide
  modified_base 89: mod_base = OTHER; note = 2'-O-methyl modified nucleotide
  modified_base 90: mod_base = OTHER; note = 2'-O-methyl modified nucleotide
  modified_base 91: mod_base = OTHER; note = 2'-O-methyl modified nucleotide
  modified_base 92: mod_base = OTHER; note = 2'-O-methyl modified nucleotide
  modified_base 93: mod_base = OTHER; note = 2'-O-methyl modified nucleotide
  modified_base 94: mod_base = OTHER; note = 2'-O-methyl modified nucleotide
  modified_base 95: mod_base = OTHER; note = 2'-O-methyl modified nucleotide
  modified_base 96: mod_base = OTHER; note = 2'-O-methyl modified nucleotide
  modified_base 119: mod_base = OTHER; note = Nucleotide with phosphorothioate linkage
  modified_base 120: mod_base = OTHER; note = 2'-O-methyl modified nucleotide with phosphorothioate linkage
  modified_base 121: mod_base = OTHER; note = 2'-O-methyl modified nucleotide with phosphorothioate linkage
  modified_base 122: mod_base = OTHER; note = 2'-O-methyl modified nucleotide
ggatggtcctcatgaacgacgttttagagctagaaatagcaagttaaaataaggctagtccgttatcaacttgaaaaagtggcaccgagtcggtgcttaccgctccagtcgttcatgaggac

SEQ ID NO: 18157 - RNA, 127 nt, synthetic construct
  source 1..127: mol_type = other RNA
  modified_base 1: mod_base = OTHER; note = 2'-O-methyl modified nucleotide with phosphorothioate linkage
  modified_base 2: mod_base = OTHER; note = 2'-O-methyl modified nucleotide with phosphorothioate linkage
  modified_base 3: mod_base = OTHER; note = 2'-O-methyl modified nucleotide with phosphorothioate linkage
  modified_base 29: mod_base = OTHER; note = 2'-O-methyl modified nucleotide
  modified_base 30: mod_base = OTHER; note = 2'-O-methyl modified nucleotide
  modified_base 31: mod_base = OTHER; note = 2'-O-methyl modified nucleotide
  modified_base 32: mod_base = OTHER; note = 2'-O-methyl modified nucleotide
  modified_base 33: mod_base = OTHER; note = 2'-O-methyl modified nucleotide
  modified_base 34: mod_base = OTHER; note = 2'-O-methyl modified nucleotide
  modified_base 35: mod_base = OTHER; note = 2'-O-methyl modified nucleotide
  modified_base 36: mod_base = OTHER; note = 2'-O-methyl modified nucleotide
  modified_base 37: mod_base = OTHER; note = 2'-O-methyl modified nucleotide
  modified_base 38: mod_base = OTHER; note = 2'-O-methyl modified nucleotide
  modified_base 39: mod_base = OTHER; note = 2'-O-methyl modified nucleotide
  modified_base 40: mod_base = OTHER; note = 2'-O-methyl modified nucleotide
  modified_base 69: mod_base = OTHER; note = 2'-O-methyl modified nucleotide
  modified_base 70: mod_base = OTHER; note = 2'-O-methyl modified nucleotide
  modified_base 71: mod_base = OTHER; note = 2'-O-methyl modified nucleotide
  modified_base 72: mod_base = OTHER; note = 2'-O-methyl modified nucleotide
  modified_base 73: mod_base = OTHER; note = 2'-O-methyl modified nucleotide
  modified_base 74: mod_base = OTHER; note = 2'-O-methyl modified nucleotide
  modified_base 75: mod_base = OTHER; note = 2'-O-methyl modified nucleotide
  modified_base 76: mod_base = OTHER; note = 2'-O-methyl modified nucleotide
  modified_base 77: mod_base = OTHER; note = 2'-O-methyl modified nucleotide
  modified_base 78: mod_base = OTHER; note = 2'-O-methyl modified nucleotide
  modified_base 79: mod_base = OTHER; note = 2'-O-methyl modified nucleotide
  modified_base 80: mod_base = OTHER; note = 2'-O-methyl modified nucleotide
  modified_base 81: mod_base = OTHER; note = 2'-O-methyl modified nucleotide
  modified_base 82: mod_base = OTHER; note = 2'-O-methyl modified nucleotide
  modified_base 83: mod_base = OTHER; note = 2'-O-methyl modified nucleotide
  modified_base 84: mod_base = OTHER; note = 2'-O-methyl modified nucleotide
  modified_base 85: mod_base = OTHER; note = 2'-O-methyl modified nucleotide
  modified_base 86: mod_base = OTHER; note = 2'-O-methyl modified nucleotide
  modified_base 87: mod_base = OTHER; note = 2'-O-methyl modified nucleotide
  modified_base 88: mod_base = OTHER; note = 2'-O-methyl modified nucleotide
  modified_base 89: mod_base = OTHER; note = 2'-O-methyl modified nucleotide
  modified_base 90: mod_base = OTHER; note = 2'-O-methyl modified nucleotide
  modified_base 91: mod_base = OTHER; note = 2'-O-methyl modified nucleotide
  modified_base 92: mod_base = OTHER; note = 2'-O-methyl modified nucleotide
  modified_base 93: mod_base = OTHER; note = 2'-O-methyl modified nucleotide
  modified_base 94: mod_base = OTHER; note = 2'-O-methyl modified nucleotide
  modified_base 95: mod_base = OTHER; note = 2'-O-methyl modified nucleotide
  modified_base 96: mod_base = OTHER; note = 2'-O-methyl modified nucleotide
  modified_base 124: mod_base = OTHER; note = Nucleotide with phosphorothioate linkage
  modified_base 125: mod_base = OTHER; note = 2'-O-methyl modified nucleotide with phosphorothioate linkage
  modified_base 126: mod_base = OTHER; note = 2'-O-methyl modified nucleotide with phosphorothioate linkage
  modified_base 127: mod_base = OTHER; note = 2'-O-methyl modified nucleotide
ggatggtcctcatgaacgacgttttagagctagaaatagcaagttaaaataaggctagtccgttatcaacttgaaaaagtggcaccgagtcggtgcaggcattaccgctccagtcgttcatgaggac

SEQ ID NO: 18158 - RNA, 121 nt, synthetic construct
  source 1..121: mol_type = other RNA
  modified_base 1: mod_base = OTHER; note = 2'-O-methyl modified nucleotide with phosphorothioate linkage
  modified_base 2: mod_base = OTHER; note = 2'-O-methyl modified nucleotide with phosphorothioate linkage
  modified_base 3: mod_base = OTHER; note = 2'-O-methyl modified nucleotide with phosphorothioate linkage
  modified_base 29: mod_base = OTHER; note = 2'-O-methyl modified nucleotide
  modified_base 30: mod_base = OTHER; note = 2'-O-methyl modified nucleotide
  modified_base 31: mod_base = OTHER; note = 2'-O-methyl modified nucleotide
  modified_base 32: mod_base = OTHER; note = 2'-O-methyl modified nucleotide
  modified_base 33: mod_base = OTHER; note = 2'-O-methyl modified nucleotide
  modified_base 34: mod_base = OTHER; note = 2'-O-methyl modified nucleotide
  modified_base 35: mod_base = OTHER; note = 2'-O-methyl modified nucleotide
  modified_base 36: mod_base = OTHER; note = 2'-O-methyl modified nucleotide
  modified_base 37: mod_base = OTHER; note = 2'-O-methyl modified nucleotide
  modified_base 38: mod_base = OTHER; note = 2'-O-methyl modified nucleotide
  modified_base 39: mod_base = OTHER; note = 2'-O-methyl modified nucleotide
  modified_base 40: mod_base = OTHER; note = 2'-O-methyl modified nucleotide
  modified_base 69: mod_base = OTHER; note = 2'-O-methyl modified nucleotide
  modified_base 70: mod_base = OTHER; note = 2'-O-methyl modified nucleotide
  modified_base 71: mod_base = OTHER; note = 2'-O-methyl modified nucleotide
  modified_base 72: mod_base = OTHER; note = 2'-O-methyl modified nucleotide
  modified_base 73: mod_base = OTHER; note = 2'-O-methyl modified nucleotide
  modified_base 74: mod_base = OTHER; note = 2'-O-methyl modified nucleotide
  modified_base 75: mod_base = OTHER; note = 2'-O-methyl modified nucleotide
  modified_base 76: mod_base = OTHER; note = 2'-O-methyl modified nucleotide
  modified_base 77: mod_base = OTHER; note = 2'-O-methyl modified nucleotide
  modified_base 78: mod_base = OTHER; note = 2'-O-methyl modified nucleotide
  modified_base 79: mod_base = OTHER; note = 2'-O-methyl modified nucleotide
  modified_base 80: mod_base = OTHER; note = 2'-O-methyl modified nucleotide
  modified_base 81: mod_base = OTHER; note = 2'-O-methyl modified nucleotide
  modified_base 82: mod_base = OTHER; note = 2'-O-methyl modified nucleotide
  modified_base 83: mod_base = OTHER; note = 2'-O-methyl modified nucleotide
  modified_base 84: mod_base = OTHER; note = 2'-O-methyl modified nucleotide
  modified_base 85: mod_base = OTHER; note = 2'-O-methyl modified nucleotide
  modified_base 86: mod_base = OTHER; note = 2'-O-methyl modified nucleotide
  modified_base 87: mod_base = OTHER; note = 2'-O-methyl modified nucleotide
  modified_base 88: mod_base = OTHER; note = 2'-O-methyl modified nucleotide
  modified_base 89: mod_base = OTHER; note = 2'-O-methyl modified nucleotide
  modified_base 90: mod_base = OTHER; note = 2'-O-methyl modified nucleotide
  modified_base 91: mod_base = OTHER; note = 2'-O-methyl modified nucleotide
  modified_base 92: mod_base = OTHER; note = 2'-O-methyl modified nucleotide
  modified_base 93: mod_base = OTHER; note = 2'-O-methyl modified nucleotide
  modified_base 94: mod_base = OTHER; note = 2'-O-methyl modified nucleotide
  modified_base 95: mod_base = OTHER; note = 2'-O-methyl modified nucleotide
  modified_base 96: mod_base = OTHER; note = 2'-O-methyl modified nucleotide
  modified_base 118: mod_base = OTHER; note = Nucleotide with phosphorothioate linkage
  modified_base 119: mod_base = OTHER; note = 2'-O-methyl modified nucleotide with phosphorothioate linkage
  modified_base 120: mod_base = OTHER; note = 2'-O-methyl modified nucleotide with phosphorothioate linkage
  modified_base 121: mod_base = OTHER; note = 2'-O-methyl modified nucleotide
ggatggtcctcatgaacgacgttttagagctagaaatagcaagttaaaataaggctagtccgttatcaacttgaaaaagtggcaccgagtcggtgcattaccgctccagtcgttcatgagg

SEQ ID NO: 18159 - RNA, 125 nt, synthetic construct
  source 1..125: mol_type = other RNA
  modified_base 1: mod_base = OTHER; note = 2'-O-methyl modified nucleotide with phosphorothioate linkage
  modified_base 2: mod_base = OTHER; note = 2'-O-methyl modified nucleotide with phosphorothioate linkage
  modified_base 3: mod_base = OTHER; note = 2'-O-methyl modified nucleotide with phosphorothioate linkage
  modified_base 29: mod_base = OTHER; note = 2'-O-methyl modified nucleotide
  modified_base 30: mod_base = OTHER; note = 2'-O-methyl modified nucleotide
  modified_base 31: mod_base = OTHER; note = 2'-O-methyl modified nucleotide
  modified_base 32: mod_base = OTHER; note = 2'-O-methyl modified nucleotide
  modified_base 33: mod_base = OTHER; note = 2'-O-methyl modified nucleotide
  modified_base 34: mod_base = OTHER; note = 2'-O-methyl modified nucleotide
  modified_base 35: mod_base = OTHER; note = 2'-O-methyl modified nucleotide
  modified_base 36: mod_base = OTHER; note = 2'-O-methyl modified nucleotide
  modified_base 37: mod_base = OTHER; note = 2'-O-methyl modified nucleotide
  modified_base 38: mod_base = OTHER; note = 2'-O-methyl modified nucleotide
  modified_base 39: mod_base = OTHER; note = 2'-O-methyl modified nucleotide
  modified_base 40: mod_base = OTHER; note = 2'-O-methyl modified nucleotide
  modified_base 69: mod_base = OTHER; note = 2'-O-methyl modified nucleotide
  modified_base 70: mod_base = OTHER; note = 2'-O-methyl modified nucleotide
  modified_base 71: mod_base = OTHER; note = 2'-O-methyl modified nucleotide
  modified_base 72: mod_base = OTHER; note = 2'-O-methyl modified nucleotide
  modified_base 73: mod_base = OTHER; note = 2'-O-methyl modified nucleotide
  modified_base 74: mod_base = OTHER; note = 2'-O-methyl modified nucleotide
  modified_base 75: mod_base = OTHER; note = 2'-O-methyl modified nucleotide
  modified_base 76: mod_base = OTHER; note = 2'-O-methyl modified nucleotide
  modified_base 77: mod_base = OTHER; note = 2'-O-methyl modified nucleotide
  modified_base 78: mod_base = OTHER; note = 2'-O-methyl modified nucleotide
  modified_base 79: mod_base = OTHER; note = 2'-O-methyl modified nucleotide
  modified_base 80: mod_base = OTHER; note = 2'-O-methyl modified nucleotide
  modified_base 81: mod_base = OTHER; note = 2'-O-methyl modified nucleotide
  modified_base 82: mod_base = OTHER; note = 2'-O-methyl modified nucleotide
  modified_base 83: mod_base = OTHER; note = 2'-O-methyl modified nucleotide
  modified_base 84: mod_base = OTHER; note = 2'-O-methyl modified nucleotide
  modified_base 85: mod_base = OTHER; note = 2'-O-methyl modified nucleotide
  modified_base 86: mod_base = OTHER; note = 2'-O-methyl modified nucleotide
  modified_base 87: mod_base = OTHER; note = 2'-O-methyl modified nucleotide
  modified_base 88: mod_base = OTHER; note = 2'-O-methyl modified nucleotide
  modified_base 89: mod_base = OTHER; note = 2'-O-methyl modified nucleotide
  modified_base 90: mod_base = OTHER; note = 2'-O-methyl modified nucleotide
  modified_base 91: mod_base = OTHER; note = 2'-O-methyl modified nucleotide
  modified_base 92: mod_base = OTHER; note = 2'-O-methyl modified nucleotide
  modified_base 93: mod_base = OTHER; note = 2'-O-methyl modified nucleotide
  modified_base 94: mod_base = OTHER; note = 2'-O-methyl modified nucleotide
  modified_base 95: mod_base = OTHER; note = 2'-O-methyl modified nucleotide
  modified_base 96: mod_base = OTHER; note = 2'-O-methyl modified nucleotide
  modified_base 122: mod_base = OTHER; note = Nucleotide with phosphorothioate linkage
  modified_base 123: mod_base = OTHER; note = 2'-O-methyl modified nucleotide with phosphorothioate linkage
  modified_base 124: mod_base = OTHER; note = 2'-O-methyl modified nucleotide with phosphorothioate linkage
  modified_base 125: mod_base = OTHER; note = 2'-O-methyl modified nucleotide
ggatggtcctcatgaacgacgttttagagctagaaatagcaagttaaaataaggctagtccgttatcaacttgaaaaagtggcaccgagtcggtgcaggcattaccgctccagtcgttcatgagg

SEQ ID NO: 18160 - RNA, 126 nt, synthetic construct
  source 1..126: mol_type = other RNA
  modified_base 1: mod_base = OTHER; note = 2'-O-methyl modified nucleotide with phosphorothioate linkage
  modified_base 2: mod_base = OTHER; note = 2'-O-methyl modified nucleotide with phosphorothioate linkage
  modified_base 3: mod_base = OTHER; note = 2'-O-methyl modified nucleotide with phosphorothioate linkage
  modified_base 29: mod_base = OTHER; note = 2'-O-methyl modified nucleotide
  modified_base 30: mod_base = OTHER; note = 2'-O-methyl modified nucleotide
  modified_base 31: mod_base = OTHER; note = 2'-O-methyl modified nucleotide
  modified_base 32: mod_base = OTHER; note = 2'-O-methyl modified nucleotide
  modified_base 33: mod_base = OTHER; note = 2'-O-methyl modified nucleotide
  modified_base 34: mod_base = OTHER; note = 2'-O-methyl modified nucleotide
  modified_base 35: mod_base = OTHER; note = 2'-O-methyl modified nucleotide
  modified_base 36: mod_base = OTHER; note = 2'-O-methyl modified nucleotide
  modified_base 37: mod_base = OTHER; note = 2'-O-methyl modified nucleotide
  modified_base 38: mod_base = OTHER; note = 2'-O-methyl modified nucleotide
  modified_base 39: mod_base = OTHER; note = 2'-O-methyl modified nucleotide
  modified_base 40: mod_base = OTHER; note = 2'-O-methyl modified nucleotide
  modified_base 69: mod_base = OTHER; note = 2'-O-methyl modified nucleotide
  modified_base 70: mod_base = OTHER; note = 2'-O-methyl modified nucleotide
  modified_base 71: mod_base = OTHER; note = 2'-O-methyl modified nucleotide
  modified_base 72: mod_base = OTHER; note = 2'-O-methyl modified nucleotide
  modified_base 73: mod_base = OTHER; note = 2'-O-methyl modified nucleotide
  modified_base 74: mod_base = OTHER; note = 2'-O-methyl modified nucleotide
  modified_base 75: mod_base = OTHER; note = 2'-O-methyl modified nucleotide
  modified_base 76: mod_base = OTHER; note = 2'-O-methyl modified nucleotide
  modified_base 77: mod_base = OTHER; note = 2'-O-methyl modified nucleotide
  modified_base 78: mod_base = OTHER; note = 2'-O-methyl modified nucleotide
  modified_base 79: mod_base = OTHER; note = 2'-O-methyl modified nucleotide
  modified_base 80: mod_base = OTHER; note = 2'-O-methyl modified nucleotide
  modified_base 81: mod_base = OTHER; note = 2'-O-methyl modified nucleotide
  modified_base 82: mod_base = OTHER; note = 2'-O-methyl modified nucleotide
  modified_base 83: mod_base = OTHER; note = 2'-O-methyl modified nucleotide
  modified_base 84: mod_base = OTHER; note = 2'-O-methyl modified nucleotide
  modified_base 85: mod_base = OTHER; note = 2'-O-methyl modified nucleotide
  modified_base 86: mod_base = OTHER; note = 2'-O-methyl modified nucleotide
  modified_base 87: mod_base = OTHER; note = 2'-O-methyl modified nucleotide
  modified_base 88: mod_base = OTHER; note = 2'-O-methyl modified nucleotide
  modified_base 89: mod_base = OTHER; note = 2'-O-methyl modified nucleotide
  modified_base 90: mod_base = OTHER; note = 2'-O-methyl modified nucleotide
  modified_base 91: mod_base = OTHER; note = 2'-O-methyl modified nucleotide
  modified_base 92: mod_base = OTHER; note = 2'-O-methyl modified nucleotide
  modified_base 93: mod_base = OTHER; note = 2'-O-methyl modified nucleotide
  modified_base 94: mod_base = OTHER; note = 2'-O-methyl modified nucleotide
  modified_base 95: mod_base = OTHER; note = 2'-O-methyl modified nucleotide
  modified_base 96: mod_base = OTHER; note = 2'-O-methyl modified nucleotide
  modified_base 123: mod_base = OTHER; note = Nucleotide with phosphorothioate linkage
  modified_base 124: mod_base = OTHER; note = 2'-O-methyl modified nucleotide with phosphorothioate linkage
  modified_base 125: mod_base = OTHER; note = 2'-O-methyl modified nucleotide with phosphorothioate linkage
  modified_base 126: mod_base = OTHER; note = 2'-O-methyl modified nucleotide
tcagaggaagctgggccaccgttttagagctagaaatagcaagttaaaataaggctagtccgttatcaacttgaaaaagtggcaccgagtcggtgctggagcggtaatggctggtggcccagcttc

SEQ ID NO: 18161 - RNA, 128 nt, synthetic construct
  source 1..128: mol_type = other RNA
  modified_base 1: mod_base = OTHER; note = 2'-O-methyl modified nucleotide with phosphorothioate linkage
  modified_base 2: mod_base = OTHER; note = 2'-O-methyl modified nucleotide with phosphorothioate linkage
  modified_base 3: mod_base = OTHER; note = 2'-O-methyl modified nucleotide with phosphorothioate linkage
  modified_base 29: mod_base = OTHER; note = 2'-O-methyl modified nucleotide
  modified_base 30: mod_base = OTHER; note = 2'-O-methyl modified nucleotide
  modified_base 31: mod_base = OTHER; note = 2'-O-methyl modified nucleotide
  modified_base 32: mod_base = OTHER; note = 2'-O-methyl modified nucleotide
  modified_base 33: mod_base = OTHER; note = 2'-O-methyl modified nucleotide
  modified_base 34: mod_base = OTHER; note = 2'-O-methyl modified nucleotide
  modified_base 35: mod_base = OTHER; note = 2'-O-methyl modified nucleotide
  modified_base 36: mod_base = OTHER; note = 2'-O-methyl modified nucleotide
  modified_base 37: mod_base = OTHER; note = 2'-O-methyl modified nucleotide
  modified_base 38: mod_base = OTHER; note = 2'-O-methyl modified nucleotide
  modified_base 39: mod_base = OTHER; note = 2'-O-methyl modified nucleotide
  modified_base 40: mod_base = OTHER; note = 2'-O-methyl modified nucleotide
  modified_base 69: mod_base = OTHER; note = 2'-O-methyl modified nucleotide
  modified_base 70: mod_base = OTHER; note = 2'-O-methyl modified nucleotide
  modified_base 71: mod_base = OTHER; note = 2'-O-methyl modified nucleotide
  modified_base 72: mod_base = OTHER; note = 2'-O-methyl modified nucleotide
  modified_base 73: mod_base = OTHER; note = 2'-O-methyl modified nucleotide
  modified_base 74: mod_base = OTHER; note = 2'-O-methyl modified nucleotide
  modified_base 75: mod_base = OTHER; note = 2'-O-methyl modified nucleotide
  modified_base 76: mod_base = OTHER; note = 2'-O-methyl modified nucleotide
  modified_base 77: mod_base = OTHER; note = 2'-O-methyl modified nucleotide
  modified_base 78: mod_base = OTHER; note = 2'-O-methyl modified nucleotide
  modified_base 79: mod_base = OTHER; note = 2'-O-methyl modified nucleotide
  modified_base 80: mod_base = OTHER; note = 2'-O-methyl modified nucleotide
  modified_base 81: mod_base = OTHER; note = 2'-O-methyl modified nucleotide
  modified_base 82: mod_base = OTHER; note = 2'-O-methyl modified nucleotide
  modified_base 83: mod_base = OTHER; note = 2'-O-methyl modified nucleotide
  modified_base 84: mod_base = OTHER; note = 2'-O-methyl modified nucleotide
  modified_base 85: mod_base = OTHER; note = 2'-O-methyl modified nucleotide
  modified_base 86: mod_base = OTHER; note = 2'-O-methyl modified nucleotide
  modified_base 87: mod_base = OTHER; note = 2'-O-methyl modified nucleotide
  modified_base 88: mod_base = OTHER; note = 2'-O-methyl modified nucleotide
  modified_base 89: mod_base = OTHER; note = 2'-O-methyl modified nucleotide
  modified_base 90: mod_base = OTHER; note = 2'-O-methyl modified nucleotide
  modified_base 91: mod_base = OTHER; note = 2'-O-methyl modified nucleotide
  modified_base 92: mod_base = OTHER; note = 2'-O-methyl modified nucleotide
  modified_base 93: mod_base = OTHER; note = 2'-O-methyl modified nucleotide
  modified_base 94: mod_base = OTHER; note = 2'-O-methyl modified nucleotide
  modified_base 95: mod_base = OTHER; note = 2'-O-methyl modified nucleotide
  modified_base 96: mod_base = OTHER; note = 2'-O-methyl modified nucleotide
  modified_base 125: mod_base = OTHER; note = Nucleotide with phosphorothioate linkage
  modified_base 126: mod_base = OTHER; note = 2'-O-methyl modified nucleotide with phosphorothioate linkage
  modified_base 127: mod_base = OTHER; note = 2'-O-methyl modified nucleotide with phosphorothioate linkage
  modified_base 128: mod_base = OTHER; note = 2'-O-methyl modified nucleotide
tcagaggaagctgggccaccgttttagagctagaaatagcaagttaaaataaggctagtccgttatcaacttgaaaaagtggcaccgagtcggtgctggagcggtaatggctggtggcccagcttcct

SEQ ID NO: 18162 - DNA, 62 bp, synthetic construct
  source 1..62: mol_type = other DNA
cactcctccccatcctctccctctgtccctctgtccctctgaccctgcactgtcccagcacc

SEQ ID NO: 18163 - DNA, 122 bp, synthetic construct
  source 1..122: mol_type = other DNA
caggacacagccttggatcaggacagagacttgggggccatcctgcccctccaacccgacatgtgtacctcagctttttccctcacttgcatcaataaagcttctgtgtttggaacagctaa

SEQ ID NO: 18164 - RNA, 47 nt, synthetic construct
  source 1..47: mol_type = other RNA
gggaaataagagagaaaagaagagtaagaagaaatataagagccacc

SEQ ID NO: 18165 - RNA, 110 nt, synthetic construct
  source 1..110: mol_type = other RNA
tgataataggctggagcctcggtggccatgcttcttgccccttgggcctccccccagcccctcctccccttcctgcacccgtacccccgtggtctttgaataaagtctga

SEQ ID NO: 18166 - DNA, 20 bp, synthetic construct
  source 1..20: mol_type = other DNA
gccgaagcactgcacgccgt

SEQ ID NO: 18167 - DNA, 13 bp, synthetic construct
  source 1..13: mol_type = other DNA
accctgacgtacg

SEQ ID NO: 18168 - DNA, 13 bp, synthetic construct
  source 1..13: mol_type = other DNA
gcgtgcagtgctt

SEQ ID NO: 18169 - DNA, 20 bp, synthetic construct
  source 1..20: mol_type = other DNA
agaagtcgtgctgcttcatg

SEQ ID NO: 18170 - DNA, 47 bp, synthetic construct
  source 1..47: mol_type = other DNA
accctgacctacggcgtgcagtgcttcggccgctaccccgatcacat

SEQ ID NO: 18171 - DNA, 13 bp, synthetic construct
  source 1..13: mol_type = other DNA
gaagcagcacgac

SEQ ID NO: 18172 - protein, 2122 aa, synthetic construct
MPAAKRVKLDGGDKKYSIGLDIGTNSVGWAVITDEYKVPSKKFKVLGNTDRHSIKKNLIGALLFDSGETAEATRLKRTARRRYTRRKNRICYLQEIFSNEMAKVDDSFFHRLEESFLVEEDKKHERHPIFGNIVDEVAYHEKYPTIYHLRKKLVDSTDKADLRLIYLALAHMIKFRGHFLIEGDLNPDNSDVDKLFIQLVQTYNQLFEENPINASGVDAKAILSARLSKSRRLENLIAQLPGEKKNGLFGNLIALSLGLTPNFKSNFDLAEDAKLQLSKDTYDDDLDNLLAQIGDQYADLFLAAKNLSDAILLSDILRVNTEITKAPLSASMIKRYDEHHQDLTLLKALVRQQLPEKYKEIFFDQSKNGYAGYIDGGASQEEFYKFIKPILEKMDGTEELLVKLNREDLLRKQRTFDNGSIPHQIHLGELHAILRRQEDFYPFLKDNREKIEKILTFRIPYYVGPLARGNSRFAWMTRKSEETITPWNFEEVVDKGASAQSFIERMTNFDKNLPNEKVLPKHSLLYEYFTVYNELTKVKYVTEGMRKPAFLSGEQKKAIVDLLFKTNRKVTVKQLKEDYFKKIECFDSVEISGVEDRFNASLGTYHDLLKIIKDKDFLDNEENEDILEDIVLTLTLFEDREMIEERLKTYAHLFDDKVMKQLKRRRYTGWGRLSRKLINGIRDKQSGKTILDFLKSDGFANRNFMQLIHDDSLTFKEDIQKAQVSGQGDSLHEHIANLAGSPAIKKGILQTVKVVDELVKVMGRHKPENIVIEMARENQTTQKGQKNSRERMKRIEEGIKELGSQILKEHPVENTQLQNEKLYLYYLQNGRDMYVDQELDINRLSDYDVDHIVPQSFLKDDSIDNKVLTRSDKARGKSDNVPSEEVVKKMKNYWRQLLNAKLITQRKFDNLTKAERGGLSELDKAGFIKRQLVETRQITKHVAQILDSRMNTKYDENDKLIREVKVITLKSKLVSDFRKDFQFYKVREINNYHHAHDAYLNAVVGTALIKKYPKLESEFVYGDYKVYDVRKMIAKSEQEIGKATAKYFFYSNIMNFFKTEITLANGEIRKRPLIETNGETGEIVWDKGRDFATVRKVLSMPQVNIVKKTEVQTGGFSKESILPKRNSDKLIARKKDWDPKKYGGFDSPTVAYSVLVVAKVEKGKSKKLKSVKELLGITIMERSSFEKNPIDFLEAKGYKEVKKDLIIKLPKYSLFELENGRKRMLASAGELQKGNELALPSKYVNFLYLASHYEKLKGSPEDNEQKQLFVEQHKHYLDEIIEQISEFSKRVILADANLDKVLSAYNKHRDKPIREQAENIIHLFTLTNLGAPAAFKYFDTTIDRKRYTSTKEVLDATLIHQSITGLYETRIDLSQLGGDSGGSSGGSSGSETPGTSESATPESSGGSSGGSSTLNIEDEYRLHETSKEPDVSLGSTWLSDFPQAWAETGGMGLAVRQAPLIIPLKATSTPVSIKQYPMSQEARLGIKPHIQRLLDQGILVPCQSPWNTPLLPVKKPGTNDYRPVQDLREVNKRVEDIHPTVPNPYNLLSGLPPSHQWYTVLDLKDAFFCLRLHPTSQPLFAFEWRDPEMGISGQLTWTRLPQGFKNSPTLFNEALHRDLADFRIQHPDLILLQYVDDLLLAATSELDCQQGTRALLQTLGNLGYRASAKKAQICQKQVKYLGYLLKEGQRWLTEARKETVMGQPTPKTPRQLREFLGKAGFCRLFIPGFAEMAAPLYPLTKPGTLFNWGPDQQKAYQEIKQALLTAPALGLPDLTKPFELFVDEKQGYAKGVLTQKLGPWRRPVAYLSKKLDPVAAGWPPCLRMVAAIAVLTKDAGKLTMGQPLVILAPHAVEALVKQPPDRWLSNARMTHYQALLLDTDRVQFGPVVALNPATLLPLPEEGLQHNCLDILAEAHGTRPDLTDQPLPDADHTWYTDGSSLLQEGQRKAGAAVTTETEVIWAKALPAGTSAQRAELIALTQALKMAEGKKLNVYTDSRYAFATAHIHGEIYRRRGWLTSEGKEIKNKDEILALLKALFLPKRLSIIHCPGHQKGHSAEARGNRMADQAARKAAITETPDTSTLLIENSSPSGGSKRTADGSEFEKRTADGSEFESPKKKAKVE

SEQ ID NO: 18173 - protein, 2122 aa, synthetic construct
MPAAKRVKLDGGDKKYSIGLDIGTNSVGWAVITDEYKVPSKKFKVLGNTDRHSIKKNLIGALLFDSGETAEATRLKRTARRRYTRRKNRICYLQEIFSNEMAKVDDSFFHRLEESFLVEEDKKHERHPIFGNIVDEVAYHEKYPTIYHLRKKLVDSTDKADLRLIYLALAHMIKFRGHFLIEGDLNPDNSDVDKLFIQLVQTYNQLFEENPINASGVDAKAILSARLSKSRRLENLIAQLPGEKKNGLFGNLIALSLGLTPNFKSNFDLAEDAKLQLSKDTYDDDLDNLLAQIGDQYADLFLAAKNLSDAILLSDILRVNTEITKAPLSASMIKRYDEHHQDLTLLKALVRQQLPEKYKEIFFDQSKNGYAGYIDGGASQEEFYKFIKPILEKMDGTEELLVKLNREDLLRKQRTFDNGSIPHQIHLGELHAILRRQEDFYPFLKDNREKIEKILTFRIPYYVGPLARGNSRFAWMTRKSEETITPWNFEEVVDKGASAQSFIERMTNFDKNLPNEKVLPKHSLLYEYFTVYNELTKVKYVTEGMRKPAFLSGEQKKAIVDLLFKTNRKVTVKQLKEDYFKKIECFDSVEISGVEDRFNASLGTYHDLLKIIKDKDFLDNEENEDILEDIVLTLTLFEDREMIEERLKTYAHLFDDKVMKQLKRRRYTGWGRLSRKLINGIRDKQSGKTILDFLKSDGFANRNFMQLIHDDSLTFKEDIQKAQVSGQGDSLHEHIANLAGSPAIKKGILQTVKVVDELVKVMGRHKPENIVIEMARENQTTQKGQKNSRERMKRIEEGIKELGSQILKEHPVENTQLQNEKLYLYYLQNGRDMYVDQELDINRLSDYDVDHIVPQSFLKDDSIDNKVLTRSDKNRGKSDNVPSEEVVKKMKNYWRQLLNAKLITQRKFDNLTKAERGGLSELDKAGFIKRQLVETRQITKHVAQILDSRMNTKYDENDKLIREVKVITLKSKLVSDFRKDFQFYKVREINNYHHAHDAYLNAVVGTALIKKYPKLESEFVYGDYKVYDVRKMIAKSEQEIGKATAKYFFYSNIMNFFKTEITLANGEIRKRPLIETNGETGEIVWDKGRDFATVRKVLSMPQVNIVKKTEVQTGGFSKESILPKRNSDKLIARKKDWDPKKYGGFDSPTVAYSVLVVAKVEKGKSKKLKSVKELLGITIMERSSFEKNPIDFLEAKGYKEVKKDLIIKLPKYSLFELENGRKRMLASAGELQKGNELALPSKYVNFLYLASHYEKLKGSPEDNEQKQLFVEQHKHYLDEIIEQISEFSKRVILADANLDKVLSAYNKHRDKPIREQAENIIHLFTLTNLGAPAAFKYFDTTIDRKRYTSTKEVLDATLIHQSITGLYETRIDLSQLGGDSGGSSGGSSGSETPGTSESATPESSGGSSGGSSTLNIEDEYRLHETSKEPDVSLGSTWLSDFPQAWAETGGMGLAVRQAPLIIPLKATSTPVSIKQYPMSQEARLGIKPHIQRLLDQGILVPCQSPWNTPLLPVKKPGTNDYRPVQDLREVNKRVEDIHPTVPNPYNLLSGLPPSHQWYTVLDLKDAFFCLRLHPTSQPLFAFEWRDPEMGISGQLTWTRLPQGFKNSPTLFNEALHRDLADFRIQHPDLILLQYVDDLLLAATSELDCQQGTRALLQTLGNLGYRASAKKAQICQKQVKYLGYLLKEGQRWLTEARKETVMGQPTPKTPRQLREFLGKAGFCRLFIPGFAEMAAPLYPLTKPGTLFNWGPDQQKAYQEIKQALLTAPALGLPDLTKPFELFVDEKQGYAKGVLTQKLGPWRRPVAYLSKKLDPVAAGWPPCLRMVAAIAVLTKDAGKLTMGQPLVILAPHAVEALVKQPPDRWLSNARMTHYQALLLDTDRVQFGPVVALNPATLLPLPEEGLQHNCLDILAEAHGTRPDLTDQPLPDADHTWYTDGSSLLQEGQRKAGAAVTTETEVIWAKALPAGTSAQRAELIALTQALKMAEGKKLNVYTDSRYAFATAHIHGEIYRRRGWLTSEGKEIKNKDEILALLKALFLPKRLSIIHCPGHQKGHSAEARGNRMADQAARKAAITETPDTSTLLIENSSPSGGSKRTADGSEFEKRTADGSEFESPKKKAKVE

SEQ ID NO: 18174 - RNA, 100 nt, synthetic construct
  source 1..100: mol_type = other RNA
  modified_base 1: mod_base = OTHER; note = 2'-O-methyl modified nucleotide with phosphorothioate linkage
  modified_base 2: mod_base = OTHER; note = 2'-O-methyl modified nucleotide with phosphorothioate linkage
  modified_base 3: mod_base = OTHER; note = 2'-O-methyl modified nucleotide with phosphorothioate linkage
  modified_base 29: mod_base = OTHER; note = 2'-O-methyl modified nucleotide
  modified_base 30: mod_base = OTHER; note = 2'-O-methyl modified nucleotide
  modified_base 31: mod_base = OTHER; note = 2'-O-methyl modified nucleotide
  modified_base 32: mod_base = OTHER; note = 2'-O-methyl modified nucleotide
  modified_base 33: mod_base = OTHER; note = 2'-O-methyl modified nucleotide
  modified_base 34: mod_base = OTHER; note = 2'-O-methyl modified nucleotide
  modified_base 35: mod_base = OTHER; note = 2'-O-methyl modified nucleotide
  modified_base 36: mod_base = OTHER; note = 2'-O-methyl modified nucleotide
  modified_base 37: mod_base = OTHER; note = 2'-O-methyl modified nucleotide
  modified_base 38: mod_base = OTHER; note = 2'-O-methyl modified nucleotide
  modified_base 39: mod_base = OTHER; note = 2'-O-methyl modified nucleotide
  modified_base 40: mod_base = OTHER; note = 2'-O-methyl modified nucleotide
  modified_base 69: mod_base = OTHER; note = 2'-O-methyl modified nucleotide
  modified_base 70: mod_base = OTHER; note = 2'-O-methyl modified nucleotide
  modified_base 71: mod_base = OTHER; note = 2'-O-methyl modified nucleotide
  modified_base 72: mod_base = OTHER; note = 2'-O-methyl modified nucleotide
  modified_base 73: mod_base = OTHER; note = 2'-O-methyl modified nucleotide
  modified_base 74: mod_base = OTHER; note = 2'-O-methyl modified nucleotide
  modified_base 75: mod_base = OTHER; note = 2'-O-methyl modified nucleotide
  modified_base 76: mod_base = OTHER; note = 2'-O-methyl modified nucleotide
  modified_base 77: mod_base = OTHER; note = 2'-O-methyl modified nucleotide
  modified_base 78: mod_base = OTHER; note = 2'-O-methyl modified nucleotide
  modified_base 79: mod_base = OTHER; note = 2'-O-methyl modified nucleotide
  modified_base 80: mod_base = OTHER; note = 2'-O-methyl modified nucleotide
  modified_base 81: mod_base = OTHER; note = 2'-O-methyl modified nucleotide
  modified_base 82: mod_base = OTHER; note = 2'-O-methyl modified nucleotide
  modified_base 83: mod_base = OTHER; note = 2'-O-methyl modified nucleotide
  modified_base 84: mod_base = OTHER; note = 2'-O-methyl modified nucleotide
  modified_base 85: mod_base = OTHER; note = 2'-O-methyl modified nucleotide
  modified_base 86: mod_base = OTHER; note = 2'-O-methyl modified nucleotide
  modified_base 87: mod_base = OTHER; note = 2'-O-methyl modified nucleotide
  modified_base 88: mod_base = OTHER; note = 2'-O-methyl modified nucleotide
  modified_base 89: mod_base = OTHER; note = 2'-O-methyl modified nucleotide
  modified_base 90: mod_base = OTHER; note = 2'-O-methyl modified nucleotide
  modified_base 91: mod_base = OTHER; note = 2'-O-methyl modified nucleotide
  modified_base 92: mod_base = OTHER; note = 2'-O-methyl modified nucleotide
  modified_base 93: mod_base = OTHER; note = 2'-O-methyl modified nucleotide
  modified_base 94: mod_base = OTHER; note = 2'-O-methyl modified nucleotide
  modified_base 95: mod_base = OTHER; note = 2'-O-methyl modified nucleotide
  modified_base 96: mod_base = OTHER; note = 2'-O-methyl modified nucleotide
  modified_base 97: mod_base = OTHER; note = 2'-O-methyl modified nucleotide with phosphorothioate linkage
  modified_base 98: mod_base = OTHER; note = 2'-O-methyl modified nucleotide with phosphorothioate linkage
  modified_base 99: mod_base = OTHER; note = 2'-O-methyl modified nucleotide with phosphorothioate linkage
  modified_base 100: mod_base = OTHER; note = 2'-O-methyl modified nucleotide
ttaccaactttctccatggcgttttagagctagaaatagcaagttaaaataaggctagtccgttatcaacttgaaaaagtggcaccgagtcggtgctttt

SEQ ID NO: 18175 - protein, 30 aa, synthetic construct
AHFKISGEKRPSTDPGKKAKNPKKKKKKDP

SEQ ID NO: 18176 - protein, 12 aa, synthetic construct
AHRAKKMSKTHA

SEQ ID NO: 18177 - protein, 14 aa, synthetic construct
ASPEYVNLPINGNG

SEQ ID NO: 18178 - protein, 15 aa, synthetic construct
EELRLKEELLKGIYA

SEQ ID NO: 18179 - protein, 16 aa, synthetic construct
EEQLRRRKNSRLNNTG

SEQ ID NO: 18180 - protein, 17 aa, synthetic construct
HKKKHPDASVNFSEFSK

SEQ ID NO: 18181 - protein, 8 aa, synthetic construct
KAEQERRK

SEQ ID NO: 18182 - protein, 16 aa, synthetic construct
KKKTVINDLLHYKKEK

SEQ ID NO: 18183 - protein, 6 aa, synthetic construct
KNKKRK

SEQ ID NO: 18184 - protein, 16 aa, synthetic construct
KRGLNSSFETSPKKVK

SEQ ID NO: 18185 - protein, 15 aa, synthetic construct
KVQHRIAKKTTRRRR

SEQ ID NO: 18186 - protein, 18 aa, synthetic construct
PGKMDKGEHRQERRDRPY

SEQ ID NO: 18187 - protein, 11 aa, synthetic construct
PKKGDKYDKTD

SEQ ID NO: 18188 - protein, 7 aa, synthetic construct
PKKKSRK

SEQ ID NO: 18189 - protein, 7 aa, synthetic construct
PSRKRPR

SEQ ID NO: 18190 - protein, 8 aa, synthetic construct
PSSKKRKV

SEQ ID NO: 18191 - protein, 7 aa, synthetic construct
PTKKRVK

SEQ ID NO: 18192 - protein, 18 aa, synthetic construct
RGKGGKGLGKGGAKRHRK

SEQ ID NO: 18193 - protein, 24 aa, synthetic construct
RKAGKGGGGHKTTKKRSAKDEKVP

SEQ ID NO: 18194 - protein, 9 aa, synthetic construct
RKIKLKRAK

SEQ ID NO: 18195 - protein, 9 aa, synthetic construct
RKIKRKRAK

SEQ ID NO: 18196 - protein, 17 aa, synthetic construct
RKKEAPGPREELRSRGR

SEQ ID NO: 18197 - protein, 7 aa, synthetic construct
RKKRKGK

SEQ ID NO: 18198 - protein, 9 aa, synthetic construct
RKKRRQRRR

SEQ ID NO: 18199 - protein, 25 aa, synthetic construct
RKKSIPLSIKNLKRKHKRKKNKITR

SEQ ID NO: 18200 - protein, 16 aa, synthetic construct
RKRLILSDKGQLDWKK

SEQ ID NO: 18201 - protein, 9 aa, synthetic construct
RKRRVRDNM

SEQ ID NO: 18202 - protein, 22 aa, synthetic construct
RKRSPKDKKEKDLDGAGKRRKT

SEQ ID NO: 18203 - protein, 10 aa, synthetic construct
RLPVRRRRRR

SEQ ID NO: 18204 - protein, 10 aa, synthetic construct
RLRFRKPKSK

SEQ ID NO: 18205 - protein, 6 aa, synthetic construct
RQQRKR

SEQ ID NO: 18206 - protein, 16 aa, synthetic construct
RRDLNSSFETSPKKVK

SEQ ID NO: 18207 - protein, 8 aa, synthetic construct
RRDRAKLR

SEQ ID NO: 18208 - protein, 8 aa, synthetic construct
RRGDGRRR

SEQ ID NO: 18209 - protein, 11 aa, synthetic construct
RRGRKRKAEKQ

SEQ ID NO: 18210 - protein, 19 aa, synthetic construct
RRKRSKSEDMDSVESKRRR

SEQ ID NO: 18211 - protein, 15 aa, synthetic construct
RRRGKNKVAAQNCRK

SEQ ID NO: 18212 - protein, 61 aa, synthetic construct
RRTIRLKLVYDKCDRSCKIQKKNRNKCQYCRFHKCLSVGMSHNAIRFGRMPRSEKAKLKAE

SEQ ID NO: 18213 - protein, 30 aa, synthetic construct
TLSPASSPSSVSCPVIPASTDESPGSALNI

SEQ ID NO: 18214 - protein, 12 aa, synthetic construct
VSKKQRTGKKIH

SEQ ID NO: 18215 - protein, 101 aa, synthetic construct
CLSYDTEILTVEYGFLPIGKIVEERIECTVYTVDKNGFVYTQPIAQWHNRGEQEVFEYCLEDGSIIRATKDHKFMTTDGQMLPIDEIFERGLDLKQVDGLP

SEQ ID NO: 18216 - DNA, 159 bp, synthetic construct
  source 1..159: mol_type = other DNA
atgaagaggactgccgatggatcagagtttgaatctcccaagaagaagaggaaagtaaagataatatctcgaaaaagtcttggtacccaaaatgtctatgatattggagtggagaaagatcacaacttccttctcaagaacggtctcgtagccagcaac
